United States Patent Application Publication US 2020/0377945 A1 - sequence listing, part 2

SEQ ID NO: 193 - DNA, 72383 bp, Unknown
  gut microbiota DNA sequence
atgtacgctgatgcgtacctggctcagacagatggggcttactctgcggcttgtggccgcagagtaccttcccgccaggtgcctcaggcgccaagtatgaccagcggcttactccgacgcaccgggtcccgaccatgcagccgtcccgctggcagtctgtccgttctggtttttgggggtgtgaggtgtggtggtctgacgggagggtggtgggccatcaacgctgcgctggatggctgcaggggctgagtttccttgtgatgtgccgggaggtggtgtggcatcggcgctgcgttggatgtgggtggggtgagttttttgtgatttgtcgtgaggggattgggggatagaggctgttttggatagggtgtggtgtttttgtgtaatatttaaatttatttttggagtattttggattataattatggaaaaagatggttggcctgattggttgactgattgactgattgactggttgattgatatccggagttttggtgactgttttgtgggacttgagagaagagcttcggatgtgtgctgatgtgacttgagagaagagcttcggatgtatgctgatgtggcttgagagaagagcttcggatgtacgctgatgtggcttgagagaagagcttcggatgtacgctgatgtgacttgagagaagagcttcggatgtacgctgatgtggcttgagaggtgagcttcggatgtgtgttgatgagggttgtgtgatgggcttcggatgtgtgttgatgtggcttgggtgaagggcttcggatgtttgtgttggtctggttttgagggtggtctttttgggggctgcctgggttttggaggggagtgggttgtttgtgtgattatatggttttgccgcttttgaattcgtcttttgagcctgggagggctcgggaggttgttgaggggtttgtggatgtggatttgaggaatattgcgcgggctgagcttttttattttacggggcgggctgaggagtgttgtgagattacgagggggtatctgtccagcagggttattgagctgcggctttcggcgtgtattttgtatgggtattctaatctgacgctggggaatgtggcggcggctaagcgggggatggagggaatccagtcctgtttgaagctggctatgaagaaaaaggttcctgcggatgtttatgcgtcctgtcttctggcggggtatgtgggggcggttttgcttcatctgcctacggatgagatgcctgcttttggggagtacagcaggatgcttcctgagggactgaggctttttgctacgtatgtgatggctcaccatacttatcttaacggggagatatggagtgcttatgggatgggtaaggctgctttgtttatggcggagaggccgtatccgatcagtatgacgtatatccattgtatgatggcggtgtgtgcgataaaccgaaagcataagcaggaggcgcaggaggagatgctccggagctgggagctggcgaagatggatgggtttctggagccttttattgagcatcatgggcttttgcgggggctggtcgaggcttgtatccggaatcgggatccggaggcgtatcagcgtatcacgaaaggggtgatttctttcagcaggggctggatggcgcttcataatccggaaaaccggagaaaggttacgggggagctgtcgacgatggagttttctattgccatgctggcaagtgggggatggagcaataaggagataggagagcatctggggatttccattaatactgtcaagcattaccttacggatatcttttgcaagctgaatgtcaagaagcgggatgagctgaagaaattcatgttaaaatagtgacagaggcacttttttatgaaaaaaagtgccttacaaaacaactattagtgttgtataataaataccacgaatagtcagattttattgaaaaatcaggcgaaaagaaccagtgaacgagtaagttaagaaggaggagttgaaggctgattttcgatagcatctgataatgtcagtatccttaccaaaaatgtctggtatattgacactacaatcacataagggtaaaatattgtaaaggtgtaacctgtttactcaccggctaaaaacatgaagcttttttaagagaaaggaatataaacagaagtaaagtaataagaaatacagtacacgttaatgcacacacaggaaagcgggaaaggtatgaaaaaattaaggaataataagatcagaaaactcctggcatttatggtggctttggcgttgatggtatcctgtatgccgagtgcatatacgatctccgcgagtgaagcgttcggagatggaacggaggatatatttacagatggcgaatttacatctgaaccagcggccgaagaatcgacaccggatgtaagcagcgctgaccaggaggaaacggaacaggcgcagcaatcgacgcttacatatgaaaatgattctgttaaagtaacagcagaggcactggaggacggagctcttccgcagaatacagcattgaaggctgacggcgtaaacgagaattcatccgtatcttatgatacagtttctcagaagctttcagcaacagctacagacaagggcagcagcctgagaggtttttttgcgtatgatgtgtattttgctgatggcgacggaaacagagtcgagccgaacggcagagtcagagtaacttttgagtacaagacaccggcagcaccggagcttaccgatgcagccagcacgagtgtaaccgttgagaagcttcattataacagcagtaccggtgatactgatgttaacaccttacaggccaacgaggatctgaaggttctgaatgtcaacgagggcaaacagatccagacacttcaggttgagactggcaacgcagctgtttttgccgttatgtgggattctcctgagacagcagatgtcgaggcggaagctgtttccggtaatggggacgaggtgtctatcgcatcagaggagcttacggacggaatggatatttcggacgagcctgagcaggatgcagctgagacaccggcagcagagaatccggaggtaactcctgatgcagagccttctgaggctccggcggagaatccggatgctgaacctaccgaagcgccggcagaggatccggatgtggtggaagaaccggcagaggatattgcgagcccggatgaggttccggcagcagatgagaatggtgagacaagcctgatcgaggttctgggagacgatacgaatcttcgtgtcagtccatctgtcgaggcagaggttctggcaactgtaaacgcaggaacacagctcacacttctggataccgtaacagcagaggacggagcaacctggtacaaggtttcctgggaaggaaccgaggcttacataagaagtgatatggcacaggttgttgacagcagtgatgaggcagaagagcctgaggatgtgcaggaagaagaaattcagcctgagatcaccagatatgattacaagagtgacgaggtcaatgtcaaggttactcttactgatccggcagaccttccggacaacgcaaagctttccgtaacaccggtagagctcagccaggaagccgaagaccagatcacagaagaagcgatcaaagaaaagaaagccatcgagaagattcactcctatgatatcaaattcctggtggacggcgaagaggttcagccaggtgctacagtgaaggtatctgtatctctgaatgatgagaagaaggtcaaggatgcggatgtatatcacgtagacgagaatgataacgttgaaaatatggatggcagcgttgctaagaatggtgatgttgagttcgagacgacgcatttttctacttatgtaattgtaaataacagtcttagtagcaaagttaaggttacattacagcattattgcgataatattaaaatttatgcggatacagtacgccatatagaagttggaggaaagattcctgattacagagcaacagagaattatgagataaaaggggttgtatttgtaaaagatgatggaaaagaaactccagtatctgatatccatgaagtacaagttgcaagtgatacagttgtaaaaatttattatactccaaagcaatcacctgaaagtggagatgtggttttttatgattatcaggtaagtcctgtaaatgggaggggcattaatgatgcttcacattatcctaaagatagtaaggaaaataacaggatgattatgggaactcaagaacaaaccggtttaaaagagtataatgcactcggaaataataataaaaatgccaatatctattatgaaaatgataatagggctacgaccggtttagtaacagggctatctaatgactataaggaagttttatggaaagttgatcaacccggattttttacagatgataacttaggtgaccatgaaggtaaagaaaaatatacaaactacaagctgttgtttagcaagacaggaaataattacaaactgaccggagtagagcagccaggaggtcatacctttaaatggaatgaggatggttctaacttctttcctttagagaatcctatatatgatcagacacaaggtggaaaatactatttcggaatgagatatgatatagaattcaagcttggagattatgtagggccattgaattatacctttactggtgatgatgatttatgggttttactggatggaaaagtagtaattgatgttggtggtattcatgagtcaattgaatgttctactgatttatggagaaaccttggattcgaggaaggaaaaggagcaccaacagatgaagaaaaaaataaaacccataggattaccgtactttatatggaacgaggtgcttttaaatccaattgtaagatggatttcacaattccagatgcaagatttgtaaatgtagaaaatgttcctcttgcagatcttacacttacaaaggttgactctaaaggcaaaggtatttccggtgcgaagttcaaactggtaaatgataatggaggcgaaacatacccgattacaacatccgatgataagggtagtgttacatttaataacctgaaagagggaacatatactttaacagaaaccatggcacctaatggctatgaagcatcacaagaatcttggattgtaaaggttacgtcatctgatgataaaaaagcagtggcaactctttataaagcagatggcaagacaatgatagaaaaagatccagattcgtcgtatcatatcatgaattatacacagcaggagattattgaatccagtatggattacagtaagactgcaactgtaaacgactgggataagagaacttatgatatcaacattacggctgattctaaggtgaccagtggtacaatagtagaaaaagacccagttgcggatattatgatggtattcgatactagtggaagcatgttatacaacactgggtacttcgtgtcctccgataagggtggttttaaactagttggaaaatttaaagatatatctccatcattggatacatctaaaatatattattatggaaatggaatatatcattatggcagctatgggaatgcgcaatatccaatgatatatttgaatgatctggatcagtggatatattatgatcaatctcggtggagcaaggtaccgtctgatagtactactaaaatttatactctggacagtgggctaaatggtttaaaagaagcagctaatgcttttattgcttcaacggcaacgtcttctccgaaaagtcggattggtttagcaacatttaattcttcaggagatctgaaacaggaattaactgaagttggaagttcaaaagattctttaattaaaactacagatagtatatatgctgcaggtggaacttcaccacaggaaggattaaagattgccgctaatcagttaacgacaaaacaggaagatgtttcacgatatgtaatcttatttacggatggtgatccgtcatatgatgacgataagaagaaatcagaagccgaagcagagaaattaaaaaaagcgggaattaaagtatttacaataggacttaaattaaatgatactacaaaaggatggttgtctagcaaaattgcttctgaaggttgtgcatttgaagcaagttctatagatgaactgaaagtcatctttgaaaagattcagcaaacaattacacaaaaggttgagatttccggtgctgaaattaaggacgtaattgatcctagatttgtaattgtaggagacaaaggaaatccgataacaaatgagatgattaaagctgctgaagatagtagaaaaccaattcaattaggtaatggaggaatcctttccgttgattcagcaggaaatcaggttgtaaaatggacagatcagacaatccccaatattgcagatgggaaatggaataaaaccattacagtaaaggccaaggaagaatttattggtggaaatagtatttcaactaatgtatacccagattctaagattacaacaggatatggagaggcaattttaccacagccatctgtaaatgttaaacttttaagtctggatattggaaatgatgaaacaactgttttcaaaggtgaccaaattgatccgacaggatataaggatgagcttgccaagacattaaaggttaaagaactggatggaacgacaactacaattactggtgttaatccaatagatggcgagtcagcagccttcccaacattgtcatctgatcagaaagacgaattgcttagaaatgctacaataatacttggtgacaaaaagagttcagatggaaaatatccatatgaatatatttatcctggtactacggatgcggtaggatattttacctatacgtataaggtatcagaaacaccaggtgaaaacatgaagccacataaaacgacaacagtaggaactgcagtagagaagtatgaacttgtagtaacgtatcatctatattctcaagatgagagaaaaaatatattgtctggaacaaaagttcagcagccagatgcagaaaagggtggaacaccggttaattcaaatctgaaagcaactggtaattatgtagtaaatgtagtagccggtaatattcagattattaaagaactggacggagcggctgagaaggacgaaacatttaatttcacaattacagatggaaataatcaaacagttgcaactgcaactgcaacgattaaaaaagacgatccaacagcaacagcaacagcggtatttaagcttgcaaagggagtcaatgcaaaacttgaatctggtaatacaaaattaagtgagttgtccagaggtgattataaggttgtagaatctcttggcacagatgttcattatgaattgcaggagattgcaacagatgatagaacaaactgccacagtgcaattgcaaaaaatcaacagcagaaggctacagatattacgtttaccatgggaacagatactggtaataatgaagttctcaaaaatggaaatacagacaaaattaatggacagattggaattgccaaatttacaaataagaaaacagttgtgaatattaatcttgagaaggttgatagtcagacagccgatacaaaattgtctggtgctaaatttgatttatataaagtagatgcaaatggcgaaaaaacagacaaagcaattcgttcttatacgtcaggtcagcatggagcgatttctatagagaatcttccaattgggcagtatgtattgattgaaacagaagcaccagcaggttatatggtatctgcaaaaccgtggaatattgtagtggcaaatgacagaacagtaacggtaacttataatggtaagagtgtaaaatcaagacaagataataatacaatttattatcagattactaacgcaaaggtatattccttaccagaatccggtggtccgggaacctatggatttacaatcagtggtgtagcgattcttgcaactgcactcctgttgtttataaataataaacgaagggaggaagaagcaaagagatcgtaacacattaattgtaaatggccgatgaagggcgaaaaagaaaaatgcagagaaagaaaggagcaaaccttatgaaaaatttattcaagaagattggtgcgttgttagtggcagcagttatggtactggcaatggcatctacagcattcgcagcagtagagcctgcaacaattacagttaataatctggatactaatgcaacaataagctatttagagattattgtaccagatcagacaacagaaacaggttgggcatttgctaatggtgcagctgataaatttaaggaagtattttccggattatcagatcagcagattatttggaaattaattaaatatgcagatggtaatgcagaagttccaacaggtttaaccccagcaactgcaacagattttcagaccgcaatgtcaaaggtagagacagacttaggtaaatcttataaaccagttagcggaaatacaatcacagcaactacagctggcgtttatgcaattaaagcaactacaactgatgatgcaaattatgtgtatagtccaatggcagcatttgtatcttttaaaacatatacagatgttcctactgaattagaaaatgaaacagtaaatgcaaaaagaacaaccattaaaattgagaagagcagtaatgaaacagatggtgttgtagaaattaataaagaagttacttatacagtaaaaacaaatgttccgtatatttcagatgctgttgcaaatgatgatgtaaactatacgattactgatacaattgatggtgcagtctatagtgttaatgatgagggtaaattagtagtatctgtaaaaattggtactgcagcaccagttgatagagttgtaaacgttacagaaaacgcagagggaaagaagcagtttgttttagatttaagtgatgtagcaagagtaagaactaatgctaacgcagaggtagtaattacttacaatgctattgttaaatctgaagttgtaaacaactctgttaaaccaaatgatggaacacatcattttacaccaaaaactaacactctgtatactggaaaaatcacaatgacaaaaactgatgatggtaaagaaaaggtaagacttgcaaatgcaggatttgttatttacagagtagatggtgcaaaaacatattatgcaattgtttctagagatactgagaaaacaaataatgaatatgtagttacagattggactgaaagccttgataccgcaaaagctaacttaattatgactgattcaaatggtgaagcagttgtaagaggtctggatgattcctatacttataacttcaaagagattaaagctccagagggatattctgttaatacaacagattctgaagcaacatggggaacaaatcagacagcagataatcgtactggtacagcttctatgagcgataccaaactcaactcccttccatccacaggtggcatgggaacatacctcttcactatcatcggtgttgtagttatggctggcgctgctggtgctttcttcatcagccgcagaaaaggatctgaggagtaatcgtttgattgccggatcgattcaattcaaaaattatttataagcaacgacaaagcaagtattaaaacagaatagtttctgattattctgttgaagaaatcattaccgcccggccccttcgggggccggatggtaatacaacagtatggagaaacctatgagaaagaataagaagaaaaattatattggacttggtttgctgtttctgatagggttgtccatactgctgtatccaatggtcagtgatgcctggaaccggtacagggacagcctgctgatcagtaattatagcagcagtgtttcttcggatgataattcggagaagattgacagcatgtggaaggcagcgcaggagtataacgaacagatcaagcaggaaagtgtgccggatgctttttccgtgagggatggtcagacggacagtacatatgagtctcttctgaacctgaatggtgatggaatgatggggtatgtggagattcctgtgatcgatgtgagcattccaatctatcattacacgacagatgagtctctggagaagggtgcaggtcatttgttcggcagcagtcttccggttggcggcaagagtacccattgtattttgtcggcacacagaggacttccaagtgcgaaactttttacagatctgaatcttgtggaagagggagatgttttttacctgcatgtgctgggtaagactcttgcctacgaggtggatcagattcttaccgttcttccggagcagacagagtctctgggtatcacggatggggatgattatgtaacgctggttacgtgtacgccttatgcggtgaatacgcacagacttctggtgaggggacacagagttccgatgaaggctgcgaaggcggttcagaaagcagagaagaaggttaccggaatcaccaatccgacgcttccgatgcttgctctctgtgttgtgatcggaattgtgatcgcggtggtcctggttgccggtatcaattctgttcagaacaaaaaacgacgcaggaaatagtttatggctaaaaagaaaaaaaagaaaaagagtaatgttgtcctgaacatcattattgccctggtgtttctggcgggggcgggtgtgttcctttatcccacgatcagtgatatgtggaaccagtatcgaaatgcccagctggtcagtaagtacgaggaagcggtaacggagctttcggacaacgactatgacaggctgtggaaagaggcgaaggagtataatgccgagcatccggtgaatgccattgtagatgcttttgaggaagaggatacttatgagctgagtcatccttatgacagagtcctggatcctaatggtgacggactgatgggcagtatcgagatcccgaagatcaaagcgaagctggctatctatcacggactgagcaagaccgtgctggaaaagggtgtgggccacgtggagggtaccagccttccgatcggaggcaagagcacccatgcggttctggcggcgcatcgaggtcttcctaacgcaaagctttttacagatctggatcagatggaaaagggagatatttttatcctgcacattcttggtaagcatctggcctacaaggtggatcagatcaagacggtgcttccggatgagaccagtgacctggatattatcgagggtgaagatcatgtgactctgatcacgtgtaccccttatggagttaacacccacaggcttcttgtccggggagtgcggacgaaatatgtggtggaagatacaaagaatgacgaaacgataccgcagaagcttgctgttgtggatccgaagagggttctggccggcggcgctgcagtgcttgttgttctgattctgctgatttatctgatcgtccgtcatagggacaaaaaacggaaaaagaagcagctttcagaaaggaaagaggaggcagagagcgatgaaaaatagaagaaagcaagggaaaatattccggagccttctggctgttctgatgctgacggctatgctggtcacgagtgttttgcagccggttttcgccggggattatgaagctggaaaaacaggtaatctgacgttgacggttcagcaggcggatgaggagggaaaccagactccgctgccggatgtagggctgacgatctacaaggttggcagtgtgaattttgatggcaatgtgcatttcgtgctggatgaggcactggctgccgcagcaatcgattttgattccatcacgacggctgatggctggtatgaagcggcagagaagctggcggctatgatcgtcagcggaagcgtggatgtgtggggcctgtccaagtcctctgatgcagagggaaatatgactttcgctgatctggctgagggtatgtacctggtggtgcagacagatggaaacagtgatgttagtggtgttacggtttcaccgatgctgatctccgttccttttgcagatcaggagcagggatggatgtacgatgtacaggcttatccgaagtctgtaagtaatccgccgaagcatacacagatccaggttacgaagaggatctataatgttgatgataacgggaatgtgattcctctggaaacgaaggaggatgtaacttataaggttggcgttttttcggatcaggaaggtacgatcccgttccgtgatgattatttaaaggatatccatatccagaatgcttccagtggtacagctacatggacggatgttccggatggcacctattatgtatttgagctggatgaggatggaaatcttcttcagcagaatacgaagatcgaggtggatgaggagaatctttactactacaatgtaacgaagctgaatggcgagagtgaagagaagtccaatcaggttgtgatcggtggagatagtggtgctactgaggcagtggcttatgtaaataactattatacaaagatttccgatatattcagccgtaacggatttatcaacattaagaagaatgtgatgatcgatggtgttgcttctactgtggatgatacgttctatgcaggtttgttctccactgagagtaacggtgagctgacgcttaagaaggtagtgactctgaaacagaatgatagtgttcaggtaatgttggatcttccaaaggatcaggagatcaacagtgttacttatactgttctggagacggataaggatggaaatccggttgatgatgatacctttaagtatacagttaccggtcagggtgaggttacactgaataatgataaccgatatactgtaacaaaggagatcaccaacagtctttcttccgagccgacaccgattccgactgttacacctggtggaaatcatggtggaaatgatcggatcactccgatcccgaataatggtacagcgggcggaactgctccgaacgataccagtggtacagcaagacgttctgtaaagaccggcgatgatacaccgatcggcgtatgggttggaatccttgcagcagcgatcattgttggcggtggtgcagcttatggagttaagagaaagaagaaaaaataaataacggatcattctgaaggatgatcgatggaagaaccgggcgatgtggatgcccggttctttttttggaatatttacgttctgttgggactgtaaaatgttataatggttaataattttttttatgcaaatcgcagaactgatagtgagtgataatgtaagagaggtggatgatatgaaaagggacccgtttgaagagtatctgaaagaatcggaaccggataaggcaaataaggggtatgcgtggagtactgcaatcggtcttcaggctgttgatggtcttaaaacatcggaatatctgatcgatactgctattcagaatatcgaaggtaagatcacaatgagagaagcgcaggagcttatcaacagttactatgaggaacgtccggcacatttttccgatgaggaacggacggaggaagcagataaggtatcttcgcggatcgcaggactgctttctgagacagcattttcattttcacctaatgaatatatttcaatccacagaaagctttttatggggatttacagtcatgcagggaagatcagagattataatattacgaaaaaggaatgggtgctggatggtgcaacggttatgtatggcagtgcttcagaactgatagccacgctggaatatgatttttctcaggagaaggcgttcagctataaggggctttccatggaggagatcattcatcatcttgctgtttttatttcaagattgtggcagatccatatttttgaagagggaaatacgagaaccacggcagtattttttatcaagtatctgcgaatgcttggttttacggcaactaatgatatttttgcggagaatgcatggtatttccgaaatgcgcttgttcgtgccaattatacgaatctgcagaaagggatctatgagacaacagagtatctggaagtttttctgagaaatctgcttttgggcgagaggaatgagcttcataatcgaaatctgcatatcagtggagtactgaatactggaaaagtggatattgaggatgaaaaagtggatattggagatgagaaagtagatattggggatgaaaaagtagatattgaggatggaaaagtagatattggagatggaaaagcagaggttggatgtgaaagcggatatatgggcggtccgaatgcagagatagagaagctttttttggaaaaggggatagctttttctgcaaaaactacagggcatattctcagattgtttgaggtggtcgggtatgacaggatttttaataagactgtggttaaagaactgatcggactgaaggattccggtgcttcaaagtttctttccaaattggtacatgcagatgttattggaacagtccctggctatggaaagggaaaataccggttcaaaaagtaacgggtgatattttttatcgaaaattgctcttgacattttggtatgataagtatattgtatgtgttgcagtaaatttcataaaagatagccttttattcagagtggtggagatacaaaggatctgtgaagccacggcaaccccggagaatccaggaaggtgccaacctgagcgagcaatcgaacaataagaggattgtttacagaacttaaacagtccggattgtacgggctgttttttatgtgtataaccgttgttttattacaaaaggagaagattatggagaaaattttatttacgtctgaatctgtaactgagggtcatcctgacaaggtctgcgactctatttctgatgcgatccttgatgctatgatggcacaggatccgatgagccgtgttgcctgcgagactgctactacaacaggtcttgtacttgttatgggtgagatcacaaccaaggctaatgttgatatccagaagatcgttcgtgatactatccgtgagatcggatatgacaatgcggattatggttttgacgcagatacctgtgcggttatcacatcacttgacaagcagtccacagatatcgctatgggtgttgacaaggctcttgagcagaaagaggacgatatgaatgaggacgagctggattccatcggtgccggtgaccagggtcttcagtttggttatgcttccaatgagactgaggagtatatgccatatgccatcaacatggctcacaagcttgctcagcagctgacaaaggttcgtaaggacggcactctgaaatatttaagaccggatggaaagactcaggttactgttgagtatgatgaggccggcaagccgaagagaatcgatgctgtcgtatgctctacacagcatgatccggatgttactcaggagcagatccatgaggacattaagaagtatgtttttgatgcgatcattccggctgatatggttgatgcggatactaagtatttcatcaatccgacaggtcgttttgttatcggcggacctcacggtgacagtggtctgacaggtcgtaagatcatcgttgatacctacggcggaacaggacgtcacggcggcggtgctttctccggtaaggactgcacaaaggttgaccgttctgctgcttatgctgcacgttatgttgcaaagaacattgttgcagccggtcttgctgacaagtgtgagatccagctttcctatgcgatcggtgttgcgcatccgacttctgtcagtgtgaataccttcggaacaggtaagctttctgagactaagcttgttgagatcgttcgtgagaattttgatcttcgtccggctggtatcatcaagatgcttgaccttcgccgtccgatctacaagcagactgctgcttatggtcattttggccgtacagatgttgatcttccatgggagcatctggacaaggttgagactctgaagaagtatctgtaagagagtcaaaaaaatatttatatatccttttggcaggaatattgattttaagaaatgcatatgatataatgccattaggcaaaagagatagtaatagttccaaaagaacaaagagtgaagcccccggtagtgccaataccgggggcttcttctaattttttatagtggacaagaaaccactaggttagcgttgtcctacttgttgccgtctagccatttgcaaacgtaataggcagttatgtttgccatgcaggaaacaagaaaagagataataatttccaaaagaactcacctcctcccgttgccgggtatcgggtggacaacaagaatatgatagcatagtttagaacaaaatggaataatactgatgctagaagatggggcttttttatagaaaatttagagatagggaatatagtttatgttataatacgtgtatgtgaatgtgtgaatttataaaggacggagatacagatgaagttaaaaacacgtattattgtgggcttcgttgcgatcatcctgctgccgctgcttcttttttccgcaagtctgtacgggttcagccagacgcaggcgaagcatgtgcaggagagcagcagccaggcttcggattccagccagatggtctatgatatttcgctggcgcagtcttccagcagccaggtgaagctgatggccaaggatatgatcctgaccgcaacgatcatccttgtttttactgctttgtccgtggggctgtggatctatcggagtattgcggttccgctggtgaagcttaagaaggctaccaagaacatcaaggaggggaatctggattttgtgctggaggttgaggggaatgatgaattttcccagctttgccaggattttgaggagatgcgtaagcgtctgaaggagtccacggaagagaagatcctgatggataaggagaataaggagctgatcagcaatatttcccatgacctgaagacgccgatcactgcggtgaagggttatgtggagggaatcatggatggtgtggcagatacgccggagaagatggaccggtatgtgcgtaccatttataataagaccaatgagatggatcatctgatcaatgagctgaccttttattccaagatcgataccaaccgtattccgtatacgttcagcaagctgaatgtggaggattatttttcggattgtgcggaggagcttgggcttgagatggagaccagggggatcgagcttgtgtatgccaattatgtggagaaggatgtgcaggttattgcggatggtgagcagatccgccgtgtgatccataatattgtgagtaatgctattaagtatatggagaagcccagggggatcatccagctccgggtgaaggatgtgggtgattttatccaggtggagatcgaggataacggcaagggtattgccgccaaggatctgccgtatatttttgaccgtttttaccgtaccgatgtttccaggaattcttccaagggaggaagcggtatcggactttccatcgtaaagaagatcatggaggatcatggtggaaaggtctgggccacaagccggctggggatcggaacgatcatgtattttgttctcagaaaatatcaggaggtaccgctaaatgagtaggattttgatcatagaggatgaggaagcgatcgcggatctggagaaggattatctggagctttcgggttttgaggtggagatcgagaaccgtggtgatacggggcttgtacgtgccatgaaggaggagtttgatctgatcatcctggatctgatgcttccggaggtggatggctttgatatctgccggcaggtccgtgaggagaagaatacgccgatcattatggtttctgccaagaaggatgatatcgataagatccgcggactgggtcttggtgcggatgattatatgaccaagccgttcagcccaagtgagctggttgcacgtgtgaaggcgcatatggagcgttataaccggctggttggttctaatgtgcataagaatgatgtgatcgagatccgtggtattaagatcgataagacggccaggcgtgtgtgggtcaatggtgaggagacgacgtttactaccaaggagtttgatcttttgacttttctggctgagaatccgaacagggtttttaccaaggaggagcttttccgggagatctgggatatggagtctgtgggtgatatcgctacggttacggtgcatatcaagaagatccgtgagaagatcgagtttaatacggccaagccgcagtatattgagacgatctggggtgtggggtaccggtttaaggtgtgagccttcggggaaagcttcggatggggctgctgcaggtgtatgagtgcagatcggaatgatggtgtatgatctgccgggtgcttttgagaggagtggagatatgccgctgtcgagggaaagaatttatacgatagaggatatttatgctttgccggagggtgaaagagcggaactgatcgatggacatatttattatatggcgccgccgaatacgatgcatcagaggatctcaagtatcttgtccagaaagataggtaactatatagattctaacaaggggaaatgtgaggtgtttgccgcaccgtttgcggtgtatctggatgagaagacgaatacttatgtggaaccggatgtttctgttatctgtgatccggataagctggatgacaggggatgcaagggggctccggactggatcatcgagatcgtttctccggcgagcaggcgtatggattattataccaagctgtttaaatacaggattgccggtgtgagagagtactggatcgtggatcctgtgaagaagctggtaatggtgtatgattttgaaaatgaggatacggagcagtatacatttcaggattcaatcaaagtggggatctatgaggagctgaggatcgattttgctgagatgtgataaaaatggaggggaatatcgtctggtgatagcccctccttgtttttaagatgaaaaggacgaactatggaagacagattatacaagaaactggaagcgtatggtaagagtgatttttatccatttcatatgccagggcataagaggaatccgctggctgtggagggggattttccggtggagagggatattacggagattgacgggtttgataacctgcatcatgctgaggatattttgaaaagggcccaggaggatgttgcacggctttatggtgtgccggagagtttttacagtattaatggaagctccggggcgatcctggcggcggtgtctgcggctgtggataagggaggacagatcctggtggcaaggaactgccataaggcggtttatcatgcaatttatctgcgggagctgagtgccacgtatatttatccacatgaggatccgaaattggggataaacggagggatttcacccggccgtgtggaaatgtatctggcggaaaatccggagatccaggcggtgctgatcacttcgccgacttatgacgggatcgtgtcggatgtggcgaggatcgcggagatcgcgcatcactatggtgtgccgctgatcgtggatgaggctcacggggcgcattttcggttttcggattattttccggtgtctgcggcgcagcttggtgcggatgtggtgatcaacagtgtgcataagacgctgccctgtctgacccagacgggggtgatccacctgtgcagtgatcgtgtgagccgggaaaaactgaagcgttttctgggaatctatcagagcagcagtccttcttatattcttatgagcagcattgatgcgtgcatggataagctggagcgtgagggggatgagatgttccgtgtgtttacggagaatctggaaaaagcacgcaggcgtctttccgagtgtaagtatatccggctggtaacgccgcaggcctgtgagtgccagagagtttttgattttgacagatccaagatattgctttctactgtgaacagttcgttgaacggccgggagctgcatcagatcctccggagggagtttcatctggaaatggagatggaggcggagaattatgtgctggcgctggcggctgtgggtgatactgcggagggctttgagcggctttgtgatgctattgaagagatcgaccgtcgtgaatcgttaaaatacagagaagaggctgtggagagagcgcccttgaaaaacggaaaaatgaagcaggtcatgcggatctcccaggctatggatgcggagagtgagcggtgtccgctggatgagtgtatcggacggacgtccggggagtttgcgtatctttatccgccggggatcccgctgatcgttccgggggaacagatttctggacatttcgtaaaaaatgtgagaagatacctggaacagggctttgaggtgcagggcctgagcgaccagaccagtgagacggtgtgtgttgtgagaaatgatatgtgaggtgcgtcgcagcagactgctctgtgaattacggagcagagcgtgtatagtaacgcatatgcagcagaggagacatatgggaaagattttttacattatgggaaaaagctcttccggtaaggacagtatttacagacagctggagaaggatcaggagctggggcttaagcggcttgtgatctatactacccgtccgatccgggatggagagatgaatggaagagaatatttttttgcagatgagaataaactgaaggagttccgaagaaacgggaagctgatcgaggcgcgtacttatcagacggtttacgggccgtggacatattttactgcggatgacgggcaggtgtctgtgggtaatgacagctatctggggatcggtacattggagtcttttgtgaggctccgggagtattacggcaatgaagtgatgtggccggtttatatagaggtggaagacggagagcgtctggagcgtgcgcttgccagggagaagacccaggaggtgccgaagtacgaggagatgtgcaggcgttttcttgcagaccagaatgatttttccgaggaaaatattcttaaagcaggtatatggaagcgttttgagaatcataatctggatgaatgtgtgaaggagatcgtaaattatataaaatctgtgcaataaggaaaaatagttttttttatacagaagattatgttataattagttgaaagatgtccgccgggtataacggagggcacaaaaggcagaaagaggtgattcttatggcaggatttcatgacatcatcggccatgacgatataatcaggcatttgaagaatgcgatagagacagggaaggtatcccactcttatatttttacaggggaaccgggatccggcaagaagcttcttgcggggacttttgcggcagcgctgcagtgtgaatcgggagagtctgaaccgtgtatgacttgtgattcctgtaagaaggtgatcggcaagaatcatccggatatcattacagtaactcatgagaagcctggaagcatcagcattgacgaggtgcgtgaccaggttgtgcgtgatgtggatatcaagccgtactgcagtccgtataagatctatatcattccggatgcggagatgatgacggtgcaggcgcagaatgccattttgaaaactatcgaggaaccgccggaatatgcggtgatcatgctgctgacaagtaatatcgacagtcttcttcctacgatccgttccagatgtgtgcgtctggatctgaaggtggtggatgacagtcttgtgaaggaatatctgatggagcatcttcaggtgccggattatcaggctgagatcgatgcgtcttatgcgcagggcagtatcggcaaggcgaaggaggctgcgacttctcaggagtttgcagatatgactgccaatgccctgaagattttgaaatatgccaattccatggaggtttatgagctgacagaggcgatcaagactttgactgctgataagaataatatcaatgattatctggatattttccagttctggttccgcgatgttctgatgtttaaggcaacaagggaaattgacaacctggtttttaaacaggagattaattttatcagagagcaggccagcgagcgttcttatgagaatatcgaaaaaatccttgaggcactggagaagacgaaggtgcgtctccgtgccaatgttaatctcgaacttgccctggagctcctgttcctgacaattagggagaaatagaatggaaaaggtagttggagtcagatttcgtaacgttggtaagatttattattttaatcctaagaattataaggtgaaggtcggcgatcatgtgatcgtggagactgcccgtggtgtggagtatggccgtgttgtcctggagccgcgcagcgtgaaggaggacgaggtggtccatccgctgaaggaggttctccgtgttgcaacgaaggaggacgaggatcatgaggctgagaaccgccagaaggagaaagaggcttttaagatctgcaagaagaagatccgtgagcatgggcttgatatgaagctgatcgatgcggagtatacctttgataataacaaggtgctgttttattttacagcggatggccgtattgatttccggcagctggttaaggatctggcgtctgtgtttaagaccaggatcgagcttcgtcagatcggtgtccgtgatgagacgaagatccttggcggtattggtatctgtggaaggacgctttgctgtcatacgtatctttcggagtttgcgccggtttccatcaagatggcgaaggagcagaatctttctctgaaccagacgaagatttccggtgtctgtggtcgtctgatgtgctgtttgaagaatgagcaggagacttatgaggagctgaaccggaatcttccgggtatcggtgatatggtaacgacgccgcagggtgtttcgggtacggtccagagtgtgaatgttctcaggcagatggttaagatcgtggttgaggtgaatgacgagaaggagatccaggagtttccggtccgtgatctgaggttccgccctaagagaaaaaagggtaagggtggttctgctgaccatgaggagaaagaggttaaaaagggagattcgaagccgaatgagaagtgatctggtttattgcggtgagcgtgtggatgatcttcagaatgggttgtttgtgatccaggatccgaagaagttttgctttgggatggatgcggttctgttgtctggttttgcccgggtgaagaggggtgaggttgcgctggatatggggaccggtacggggatcattccaatcttgctttctgatcgtacggatggggagcatttcacggggctggagatccagcatgagtgtgcggagatggctgaccgtagtgtgaggtataatggtcttgaggacagggttcggatcgttgagggtgatatcagggaggctgccgggatttttggggcggcttcttttgatgtggtgacgtgtaatccgccgtatatgatcgggcagcatgggttgacgaatccgcatcttccgaaggcgatcgcgaggcatgagattttgtgttcgtttgatgatgtggcttgtcaggctgcccgggtcctgaaggacagggggcggttttttctggtgcacaggccgtttcggcttgtggagctgatggcgactttgacgaagtataagctggagcctaagaggatgcagctggtgtatccttttattgataaggagccgaatatggtgttgatcgaggcttgtaagggcgggaattccagaattcgggttgagcggccgctggtggtttatgagcggccgggggtttatacggaggatgttttggagttgtatcggatggtgtgaatgttgtggcttagggtggttgcctggttgtgagagattggggtggctgctcgggaggttttgggccatcggcgctgcgctggatggctgggtggtagtggtggctgtggtacttcggttggtgaagggacggcgaggggaggcaggctgctggtggtgacacgctgcgccccctgctcggctgcggcgccggtttgctgccattcgcgcaaactcgcttcgctcaaacagtgcgctcggtggcagcagctatcctcacctcgctgacgggggctccgctaatgtcaccaccagcagcctgcctcccctcgcctgagattcaaagcgagagatcgcaacgcgtagcgcactgagtatcgaagaatacgggcactttgccagaagtgaatcactgagaaagtgaagaaataaaacaacatcggcacagcgtagcgcgctgagtagcgaagaatacagacaccttgccagaagtgaaccacagagaaagagaagaaataaaacaacatcggcacagcgtagcgcgctgaataccgaagcatacagacacaagtcaacaaataagaacagcgaatcccttgcactacttaaaaaaagcccaaggggtgtgcagagggggcgcggctttgcggcccctttgcgattttcaaagtttccaaacttaaacaaacccccgcggtcaagcggaatatccctcacggttaagtggaatatcccccgcggtcaagcaaaacaactcccccacggccaagtggaaaacaactccccgcggtcaagcgagaaaagaggaaaatatgaaacaaaacggaaaactatacttatgcgccacccccataggaaacctcgaagacatcacccttcgagtactaagaacccttcgggaagtggacttaatcgccgcggaagatacccgcaacagcataaaactgctgaatcattttgatataaaaacccccatgaccagctaccacgaatacaataagatcgataagggccatgtccttgtggaaaagctgctggcgggtacaaacattgcgttaatcacagatgcaggtactccgggtatctcagaccccggggaggagcttgccgccatgtgctatgaagccggaattgaagtgacttcacttccgggtcctgctgcctgcatcactgctctgactttgtcaggcctgcataccaggcgttttgctttcgaggcttttcttccggcggataagaaagaacgaaaaacgatcctggaggagctttcctgtgaaaccaggactattatcctgtatgaggcacctcacaggcttgtacggactcttggtgagctcagagaggcgcttggcaaccgccggatgactctttgcagagagctgaccaagaagcatgagacggcattccggactacgatcgatgatctgatggatttttataaagatgagaagccgctgggtgagtgtgttcttgtgatcgagggcaggagccgcagtgagatggaggcggagaagcgtgcttcctgggaggagatttccattgcggagcatgtggcgatgtatgagcagcaggggaattccaggaaggatgccatgaagcttgctgccaaggatcgtggtgtttccaagcgggatatttataaggcgcttctggatggagaaggttctgctgaatgatcaggtgtaaattgcggtacggatcgtaataacgtgatcgtggatgattgaataagctgcatactgtgaccaaggatttttttgggagcgtatgtggcttttttgtagtaataaaaaggttactgttcaccggcatcgcgaagcgtgttgctgagaacggagtgaacagtaatataaaaagtactgtgcggattttgtcgaaatgatttgcttgcagtacagaccatattgtggtaagctgatcttatcaaaaataaaaagcagttccgggattctatggaaatgctgtaaaagcatatttttctaaaataatcttatttttctattacatttcatatatcaggcagattgcctgtcatctcagaaaattcatgcttttttccatttttcagcaggagttttcagatgaggctccttgagatcaaaacagaggagtcgtgtatgatcgtaaacaaaaacagaacaaacagctctaacctgcggcagtggcatcctgcattttttgctgatatccagatagaactggagtcagaaagggagaatctgatttttgagaatgagcatcagcttgggacgaaaccaatggagatcgatgcgcttgtgatcaaaaagaagaccgatatccccattaataaaaacataggaaggatcttccggaaatataatatcattgagtataagagtccgacggattatataagcatcaatgatttttataaggtgtgtggatatgcatttttttataaagcggatacggtaactgaggatgaaatcccaattgaggagattacgatctctttggtaagcagggcatatccccggaagatgctccggcatttgagggagttttggaaatgccggataaaaaagatagaagaaggaatttattacgtaacaggatctaagatcccaatccaggttattgtaacggaacagttgtcgaagaagaaaaatctgtggctgagaagtctgactgatagaataaaagataaggaagatatgaaacgacttctcaatgaatacagagaaaagcagaaaaatcctttgtacgaatcagtcatgcagatgatcgtaagggctaatgaagaaaaattcagggaggcggattgtatgtgtgaagcattaaatcggatcatacaggatcagatcgaggaaaagataagaaaaagtttacaggctggctatgatgaaggttatggaattggaatgcaggatggaataaaggatgggatgcaacaggggatgcaacagggaatgcaacagggaatgcaacaggggatgcagcagggaatacagcagggaatgcagcagggagaacatagtattaacagtttgatcctctgccttgctgaactgggcaggacgtctgatattataaaatcggcatcagatccggaataccagaagaaattgttaaaagaatttgggcttttgccggagtagctgaatattccatatattttaagcgcatattgtgctatgtaatttgaaattgcatttaataagatacttttttgcctgtatttcctatgattttgcgtggaaatacaggcttttttgtgctataataaactctgtattcgtatgtaaaaaatatttattttacaggtataaatgacacttccggagcgggtttgagaattgctttctgcaaaatgaaaatacagtatttcctgaaattaaaagattagtttatcttgttcaggatttgatgtaatgatttctgaagctgctatggttctgcagaaatgaattttcaaatacgtccggatgacaagaacaggaggaatgacatgggcgcagagaatacagaatacggcgcggatcagatccagatcctggaaggactggaagccgtacgtaagaggcctggaatgtatatcggaagtacctccagccgtggacttcatcatctcgtatatgagatcgtggataacgcagtcgatgaagcactggctggtttttgtacggagatccatgtagatatcaatccggataattccattacagttacagataatggtcgtggtattccggttggcatcaatcataaggctggtattccggcagttgaggttgtatttaccattcttcacgcaggcggtaagttcggcggtggaggatacaaggtttccggtggtcttcatggtgttggtgcatctgttgtaaatgcactttccgaatggctggaggttaccatctaccgagagggtaaggaatacagacagagatatgagcgtggcaagactatgtacccgctgaaggtggtaggtgactgtgatccggggctttccggtacgaaggtttatttccttccggacaaggagatctttgaggagactgtttatgattatgatatcctgaaacagagacttcgagagatggctttcctgactaagggtcttcgtatcgtactggaggataagagagagggacaggagcgcgagaaggtattccactatgagggtggtatccgtgagtttgtaagttacctgaacagaagcaaggaggctctttacccggagatcatttactgtgagggtgagaaggacggcgtgtctgtagaggttgcgctgcagcataatgactcctatacagagaacacctatggctttgtaaacaatatcaatacaccggagggtggtacacacattaccggtttccgtaatgcaatcaccaatacatttaatgattatgcacgtaagaacaagcttcttaaggacagtgagccgaacttaagcggtgatgatatccgtgagggcctgactgcgatcgtcagtgttaagatcgagaatccgcagtttgagggtcagactaagcagaagcttggaaacagtgaggccagaggtgcggtagacagtgttgtaagtaaacagctggagattttcctggagcagaatcctgcagttgccaaggctacagttgagaaatctgttcttgcacagagagccagagaggcagccagaaaggcacgtgaccttacaagaagaaaatccgcactggacagtatgtcacttccgggaaagcttgcagactgttctgacaagaatccggagaactgtgagatttatatcgtagagggagattccgcgggtggttctgccaagacagcgagaaaccgtgccacacaggcgatccttccacttcgtggtaagatcctgaatgttgagaaggcacgtctggataaaatttacggaaacaaagagatcaaggcaatgatcactgccttcggaaccggaatccatgaggattttgatatttccaaacttcgttatcacaagatcatcattatgaccgatgccgatgttgacggtgcacatatcgcaacactgcttctgaccttcctgtatcggttcatgccggagctgatcaagcagggatatgtatacctggcgcagcctcctctctataaagtggagaagaacaaaaaggtatggtatgcatatgacgataatgagctgaacaatatccttaccgagatcggacgtgacggaaacaataagatccagcgttataaaggtctgggtgagatggatgccgagcagctttgggagactactatggaccctgagaagagaatccttctccgtgtgaccatggatgaagctgccacatctgagatcgatctgacatttaccactcttatgggagacaaggtagagccaagacgtgaatttatcgaagaaaatgcaagattcgttaagaatcttgatatctaggagaataaagaagaatggaagataatatttttgacaaagtccacgaagtggatctggaaaaaacgatgaaggaatcttacatcgactatgccatgagtgttatcgcctcacgagccttgcctgatgtaagagacggtctgaagccggtacagcgccgagttctgtactctatgatcgagctgaataatggtcctgacaagccacacagaaaatgtgcgcgtattgtcggtgataccatgggtaaatatcatccgcatggtgacagttccatctatggtgcgctggttaatatggctcaggaatggtccacaagatatccgctggttgatggacatggaaactttggttctgtggatggtgacggtgcggctgccatgcgatatacagaggcacgtctcagcaagatatccatggagatgcttgctgacatcaacaaggatacggttgattttcagccgaactttgatgagacagagcgtgaaccggttgtgcttccggcacgttttccgaaccttttggtaaacggtactacaggtattgcggtaggtatggcaaccaatattccgccgcataaccttcgtgaaactatcaatgcagttgttaagatcattgacaacattgtggaagaagacagagaaacagctatggaggagcttcttgagatcgtaaagggaccagacttccctacaggagcgaccatcctcggaacgagaggcatcgaggaagcttaccgtaccggacgtggcaagatccgtgtccgtgcggtgacaaatatcgaaactttgccaaacggtaaatctcgtatcgtagttaccgagcttccgtaccttgtaaacaaggcacgtctgatcgagaagatcgcagagcttgtccgtgataaaaagatcgacgggatcacagacctgaacgaccattccagccgtgagggtatgcgaatctgtattgatcttcgcaaggatgccaatgccaacgtgatcctgaatctgctctacaagcatacacagctgcaggatacttttggtgtgatcatgctttctcttgttccgaatcatggaagcatggaaccgaaggttctgaatctgaaagagatgctggagtactatctggagcatcaggagaatgtagttcgcagaagaacacagtatgatcttaataaggcacaggagagagcccatattttggagggtcttctgaaggcacttgataatattgacgaagtgatccgcatcatccgcggttcccgcaacgtacagatcgccaagcaggagctgatcgaccgttttgagctgacagatgtgcaggcacaggcaatcgtggatatgcgtctccgtgcactgacaggtctggaaagagagaagctggaggctgagtatgcagagcttatggagaagatccgcaagttccaggcaatccttgctgaccgcaagctccttctcagggtgattcgtgaggagattcttgccattgcagagaaatacggcgatgacagaaagacttccatcggatacgatgtatatgatatctctacagaggatctgattccgagagaaaatacagtgatcgcaatgacaaagcttggttatatcaagcgtatgaccgttgacaacttccgcagccagaaccgtggcggcagaggaatcaagggtatgcagactattgaggatgactatatcgaagagcttctgatgacgacaacgcaccattacctcatgttctttactaatacaggacgtgtatacagactgaaggcatatgagatcccggaggccggtcgtacagccagaggaactgcaatcatcaatcttctgcagcttgcaccgggagaaaagatcacagctgtgatcccgcttcgtaaatatgaagagggtcactatctgatgatggccaccaagaaaggtcttgtgaagaaaactccgatcaaggattacgagaatgtccgtaagacaggtcttacagcaatcgttctccgtgatgatgacgagctgatagaggttaaggctactgataataacaaggatattattcttgtgaccagggacggacagtgtatccgctttaaggaaacggatgtccgcagcacaggccgtgcgtccatgggagtaagaggtatgaatcttactgacggtgatgaagttgttgccatgcagctgaacacccagggagattatctgcttgtagcttctgagaacggaatgggcaaacgtacagccatgagtgagtttgctgtccagaaccgtggcggtaagggtgtgaagtgctacaagatcaccgagaagaccggaaatgttgtcggcgccaaggctgtcaacgaagagaacgagattatgatgatcactacagagggtatcattatccgtctgcagtgtgcggatatctctgtccttggaaggatcacctccggtgtgaagatgatcaatcttacagagggtgtaaccgttgcaagtatcgccaaggtaagagataaagatccggaagcagatacaaatgccgaaaaagctgacggagaaaccggcgataacgaagaaggctctgcagaggaagctgtcacaggcagtgaagaagaataaggtcgaggataagtcatgacgacgacaaagaaaaaacgcagaaaaaaatctgtaaagaagctgaaatactctaataaaaaactgaattttgtccacattgcgacactggcggggatcattttgatcctgctggtgatcgttctggcggccaggggctgcggaaagatcagccacagaactccggagggagttgtggaaggctacatcaaagcggcagcagcaggcaagaataaaaagatgcagagctgttacagtgcggataagctatcggatgaggcgaaaacagagatttcctccacgataaaatatttccaggcccatggagtaaaggatgtaaatatcgacagctgtggctccatttctgaaaacaaaaattattcttatgtttatatccgctataatcttgttctggagaacgagcaggaatatccatgtatcagtacctatcttgtaaaggtccaggacaaaaagtattatctgtatgcgccttctgagatttcagataagatcagccaacaggctgcccaagactatcagaaatttatgactacgaaaacctatacagattatacaaaagcttatgaggtttttctgaaaaagaatccgggatacgaggataagatcgcagggaaactgaacggataaagcagaggcgggaggatgtaagaatgaagcggattttactgatggtgctcagaaatatagtctttgttccttactggtggatcaaactttgctggtatgcagcgcatacagatgattatccggaagagaagaaatacgcattcctgagacaggtagatgagcgtgccattgaaggcggaaatatccatattgatgtgcatggagctgaaaatatcccaagagaaaaggggtttatgttttttccgaatcaccagggtctgtttgatgtgctggcgatcatccgggcctgcccggttcctttttcggtagttgcaaagaaggaagttggagagattccttttctgaagcaggtttttgcctgtatgaaggcctttatcattgacagggaagacctgaagcagtccatgcaggttattgtcaatgtaatacgggaagtgaaggctggtcgtaattatctgatctttccggagggaaccagaagtaaaaacggaaatcatccgggaccgtttaagggcggcagcttcaagactgctaccaagacgaaatgcccgatcgttccggttgcactgatcgattcctttaaggcttttgatacaggttctacagagaggatcaccgtacaggtgcatatccttcctccgatgtattatgaggaatacaaagatatgcataccacagagatcgcagaagaagtgaagagacggatcgaaaaggtgatcgaagagaatatctgaaaataataaatatgttagtgtagtaaaaaccactgcagacggcgatataaaatgtctgtagtggtttttttgcaaaaaatagaaaaaatatataaatgaaaacaagaaacataaaagaacaatatttcatgatgaaatacaaaactgtcaaaataaataatgataataagaaataacaaattaacatgtgcatattaaacaaaagaatattgagaaaattgtgaaacaataggtatatacaactaaatagtttgatggtaatatatgctcatacattaaaagcgaacaaaaaagaaaaaggaggtaaaaaataaaaaaatgtcgaaaaatatctgttaaaaaagtgcgtacgtaaaaaaacagaaaatttttcgtaaggtattggggcaagaaacaaaaaatgtgaaagagaagggggatacaaaatgaagaaaaaactattggcagctgtattggcagcagcaatggtagcatcaacagggtgtgtagttatggccgcagacggcgatacagattatgatgtggaaaacagagaatataaggacgtgacaattactctccataccagatgggatgcagcagacgtaacgggaacactctatcagaacatcgtagatgattttatgaaaaaatatccggggattaaggtagagagcattaatattccgacagagtctgagtggttgaattccgaatctgttcttatggcagataagagctcaatgccaaatattattgtagagtacggcggatcccgtgttgcaggttatgtacaggaaaatctgatcgtagatatggatccgtattatgagcagtatccggagtggaaagaaagatttaactcaattggtgatggaatgacagattatacagcgtatggagttgagggaacatatggtgtgccttggtctgcatatgaagtaatgttgttctataatgaagatatcctcaatgaaaatggcattgatcccgcatcacttaaaagttgggatgatttgatggatgcatgtgcgaaactgaaagaaaacggtgtacagccatttgatatgggtgagaaagatgactaccgtttcggacatcttcattccgtactgaattacaagacatatggctgcgaaatggctgaaaagctgggaagtcgtgaggtttcttacgatggagaagaacagaaaaagatatatgatatgatcaaagatgcagtagataaaggctatcttggaacaaatctccttggaaatgatgatggtcaggagagatctatctttaatactggcggctgtgcatttattaccatgggaacatggttctgtgcagaagatcatgatgcacttgagctttttgacagtcagaaagttcatgcaattcgtttcccatatgtagatgaaaaatatgagttccacgatatgggcggtggaaacgaagcttattacattgttgatactggcgatgcagatgaggttgcagcatctgttctcttcatgaaatatatgacaagtgaagatgttgttaatacgttttatgaaggatatccggcaccaatgagtgttaacgtaacaacagaggccggtgattatctgacagcagaggcaaatcagattattgctgaaacaaaagaggttcgtggagatattgagaactatgacagtgcaacacatatgatcaatacggttcgtcaggcattacagggtattgcaatgggacattcttccgaagaagtaggaaaaacaattacagatctgattgctgaatatgaataagataacagaataacagagtgagaatgtaaacagcggcgggcagtgcggaatataatgtgttcggcatgcctgccgcttcaaattttaggagggatgttcgtgttttttaaatcagccaaatatagaaaatcttttcttaagtccctgctttttgtacttccgggagtaattattacactggtgttcgttatctatccggttatcaatacagcctggctttctctgaacagctggaatggaatcggtggatctccgataaaatgggtgggacttcagaattacataaaaacattgacaagtgtcaagttctggaacagtatgctgaatgcattgtattttgtaattggtggttttgtcattctgatgccaattgcgtttgggctggcacttcttgtaacaagtaagcttaaaggaactaaattttttaaagcagcatatctgatgccagttatgcttggaacaacagctgtaggtcttatgtggtcctttatgctgaatgcaaacttcggtgtgcttgcgcagtttttgaaagcaatcggacattctgaatggatcataaactggctggcaacacctacagtaaatatctggtgtgtcgtactggtaaatgagtggatgtacgcaggctataacatgctgatctttgcagcaggcattgtagcaattccggatgatgttcatgaggcagcactccttgatggatgtacaggaattaagaaggtcatttatatcacagcacctctttgtaaaaatatgttcatggtattctcggtactgtgtatcacaggatgtctgaaggctttcgatattgtatgggccatgaccaatggaggacctatggattccagtgcaacacctgcagttcttctgtatacacagggattccagtacaagcttatgggacgaagcggatcaatcagtatcattcttctggtattaggactgattctatcattattgcttaataacgtgatcttcaaagaaagagattgatgtgtaacagaagaaaggatgatgatgtcaatgaataaaaatagattctggagaggcctgaaaaaaggtcttatgtatttcattgcaatatttgcggcaatggtgacattttttccgctgattgtaacatttgtctcttcactgaaaacaaatgaggagattttgcttggaatgttttcctggcctaaagtatggaactttggtaattatccggaggctgttcgagcggcaaatgcatttaaggcaattggtaattccctgtttgtggccattgccacactggtggttactgttattattgcaatgcctggagcttatgcaattgcacgtaagaattattcctatctgaaagcagtatatatcctgtttatggcaggtgttatggttccggtacattgtacactggtttctgtaacaaaaatctccagtgcactgggaacaaaaaacagctatatattcctgattttaatttatacagcgtttaatctttcgcaggcagtttttttgtttacaggatatatttccagtcttgataaaggattagatgaagctgctaagattgatggctgcagtgatctgaggattcttgttcagattctgctgccgatttgtaaaccgattattgcgacagaagcaattctggtatttatttatggatatagcgaattgattttctcactgattctgattacagatagtacaaaatatacaatttcaagagcaatgctgaattttacatcaaactttactacggattatggtccgcagtttgcatttgtgatcatgtctatgattccgatgttagttatttatctgatccttcatgagaaggtagaagccggtatgcttgccggagcagttaaaggttgataaaaatttgtatgtaaatataacacggagggttaaggaatggcaaaaacaagacagcagtggtttgaggatgcaaagtatggtctgtttattcactggggattgtattccattcttgcaggagaatacaaaggaagaaaaacagatcgtatcgcagagtggattgagaacgatttcgatattccggtagaggaatatgagaaacttgcagcacagtttaatcctacacagtttgacgcagatgcttttgtaaagagagcaaaagaacagtggggagtaaaatatatcgttcttactgcaaaacatcacgaaggttttgcaatgtatgattccaaagtcagcgatttcaatgttgtgaaagcgactccgtatggaaaggatatcctgaaggatcttcagcttgcatgcgagaaatatggtattcgtatgggattctattattcacagtctcaggactgggatgacccaaatggatatatagctcataaagataactccggaaaagattttcagaaatatttagatgagaaatgtaaaccacaggtaaaagaacttcttgagaattatggaaaaatcggcctgatttggtttgatactccaatgggaattacggtagctcagacacaggaactgatcgatcttgtaagatctattcagccggactgtctgctgagtggacgtaccggaaatcaaatgggcgattatatgacaaccggtgataattttattccgagactgccatacgaagatacatgggaaattcctgcaacggtaaatgatacctggggatataataagtatgatacaaattggaaaagcgcagaccacatcatcaatcttcttctgaaaattatcagcagaggaggaaactatcttctgaatgtgggaccaacagcagacggtgttgttccggagaaatgtgtggaaatactgaatgaagttggaagatatgtaacagaaaacagcgaagcaatttacggaaccaagacggttggcatttatccgtatgatattcccggtatcgagtttacaagaagagagaataaattatatgtacatgttctttctccaagaatccgcatcgaacttctcaatataggaaaccagcttacaggtgcatatcttgtaagaaatggacagaagcttgattacggagttatgagaacctgtgaaggagatggaaaaattgaggtagagattcctgaagaacttcacaatgcgaagaactactgcgtatgtctggaacttgtagaaaaagaaccaatttttgaggctatcaaaggttgatatgaaaggagaataatgatagtatgaaaaaagaagaatacctttctctgattgatgaggtgatcgcacagggaccatacacggatacctgggattctctctgtgagcatcctgtaccgaagtggtatgcaagagataaattcggaatttttatccactggggtgtttacagtgttccggcattcggaaacgaatggtatcccagaaatatgtatgtgaaaggctctaaggagaacctgcatcatacagagaaatacggaactctggataaattcggctacaaggattttattcctcagtttaaggctgagaagtttgatccgaaggaatgggcggcattatttaaagaggcgggggcgaagttcgtagttccggtagcggagcatcacgatggatttcagatgtatgccagtgacctttgtcgctggaacgccgctgagatgggaccaaagagagatattctcggagaactgaagacagaggttgagaaagagggaatggttctcggtgcttcttctcacagagcagagcattactggttctttaacggaggtcgtcagattccggaggctgatgtcaatgatccggaatatgcggatctttatgggccggcagcaggaatcaccagagatatgactgatatttatgacaatcccccgacggaggagcatatgcaggattggcttgtccgcacctgcgagatcgtggataaatatcagccatctatcgtatattttgactggtggatacagcagtatgcatggaaaccgtatcttcgtaaatttgcagcatattattacaatcgttctgcacagtggggaaaagaaacagccattgatgccaaatttgacgcatatgtttacggcagcgcagtcaatgatctggaaagagggcagttagaccatatcacaccggatctgtggcagaatgatacttctgtagctaagaattcctggggctataccattggaaatgattataagaagccttccgatgtagtgctggatctgatcgatgtagtcagcaaaaatggtgcacttcttcttaatatcggaccgaagccggatggaacaattccggaagaggatgcacatatcctgagagaaatgggaaaatggctgaaggtaaacggagaggcaatatacggaaccagacactggaagatattcggagagggaccgacggtagttccggagggacatttcacggatacctatgataagaactttacttctgaggatatccgttttacaagtaagagcaatcatatttatgcgactgttctgcactggccggaggatggagagatccatatcaaagctcttggcaatgatatgaagcttttgaaatccacgatccgggatattgagatcctcggaacagatctgcatccggcatttgcgagaaataaagaactggatatttcctgcggaagaggtacggttgatgcaggggatatgccggttgtgttaaagattacgatagaataagcgaccgggaaagacggctctgtttcgaataaaccggataaacacagctgattggacaaaagccatatatcaagtataaatgggaaatattgttgaaattggatttgttccgtcagaagaaaaattcaggaaatcagcataaacttatatataacagaaagggtttggggattacactatggaaaacaaaagatacacaggaaactggaactctgtaaatgcacacacagttccaaaatggtatgatgattgtaaatttggaatttttatccactggggaatttattccgtgccggcttttgcaccgcatacatgggaactgggagaggttgattccaaggaatggtttgcggataatccgtatgcagaatggtattacaattctctgaacattggaaaaggccctacatataagcatcatatagaaaaatacggaaaagatttcaaatatgaagattttattcctatgtggaaagctgaaaactgggatccaaagcagtgggcagagattttcaaagaagcaggtgcggagtatgttgttctgacaactaagcatcatgacggattctgcctgttcccaagtaaatatacacatttcaattccgtagaaatgggaccgaagagaaatatcaccggtgagctgacagaagctgtccgtgacgcaggaatccgtatgggtctgtattattccggactgatcgattggcagtatgcaaacgatcctatttttgaggatgatgatctgtttggaacagccagcccgacatttgcatatgcagattattcctataatcagatgaaagagcttgtagatgattatgcaccgagtgtgttctggaatgatatcggatggccgacacagagtgaagagatgatgccgtatttcttagcacattattacaataaggttccggagggtgtggtaaatgaccgtttcaacggacgttatcacgatttccttactaaggaatataaatccggttctgtaaacagaaatgagaaatgggagatgtgccgtggaatgggcttatccttcggttataatgccaacgaaggcgatgacaagctgatctctgttccggatctgatctcacttcttgtcggaacagtggcaaataacggaaatcttctcctgaacatcggaccgaaggcagacggaactatcccggaggagcaggtaagaagactgaagatcctgggtgcatggctgaaggtaaaccatgacggtatttacggaacacgctgcagtgaccgtgaatctgagctgcttgagaatggaatcgagcttcattatacacagaaagacggaaatctgaatgtgtttgcagatcatcttaaggaaggcgcaaatgaattcctgatcaaaggctaccacggagcgctgagaccatttgatccggcagtgaaggtagaaactgaagatactgcagagggacttcttgtgaaaatcccggaatataaagaagatatgtatgtggttggattaaccaacagattctaaatgatgaacatgaggaccggatgtatgctggtccttttgttgctgcatgggagaagatcgtggatatccgatcgattctcagggagggagcttttatgtttgggaaaaaaatcgcaatactgttatcaacggcaatgatcctgacagggtcctgtgtatcttctgtggctgtacatgcacagaccggttatgcggctgaatatgcacaggaagcatcggcagcaggcgtgcagagcactgcaaagcttgttgcgaagggctcctgcggaagtaaagctgtttaccggttgtactccaatggaaacctgcagatacagggaaaaggggaggttaaggttaccgataatttttcatacagatcagcaatgataaaaacagtaaccgttgcatctgggatcacgggaatcggtgacagaaccttttcaggctgcagaaatatgaagaggatttcgttgccgggaactttgcggagtattggggtaagagcatttggagatactgcgatcaccaggatcaagcttcctgatggactgaaaagcattggtgcatatgctttttaccagagtaagcttacgagtctggatgtaccgaaaactgtaacaaaaattgatgaatatgctttcagttactgtaacagtctggaatctgtcagcattccgggaagtgtgaaaatattaccggaatcgttatttgaggcggatatgaagctgaaaaaggttacgcttggaccgggtgtttccaggatagaaagagcggcctttcggcattgcggtttgacaggagtaagttttccggacagtgtcacggttattggtgaaggtgcgttttctttttgtgcagatctcagaaaggtgtcgttgccgaagaagcttacagagatcgggaacggtgcatttaataattgtcgaaaactggggaatattacagtacctgccagtgtgaaaaagatcagaagccatgctttttatgattgcctggctatgaaaaagattacgatcctcaacagtaaaacagtgatagaaaaagaagcgatcggctataatttcaatagtggaaaaaataaaacttttgtcattgccggaaaaaagagttctactgctcagacttatgcaaagaaaaatgggttccgttttttgaacaatactgccgcagtaaggaccgcaaagatgaccggcgtgcccaaaacaaaaaccatacttcgtggaaaaacatacacgatccaggcagtgaccgtgccgtattacagcgacgagaagattcttttccgttcctcggatcgcaggatcgctacggtaaattccaaaggtgttgtaaagggaatccgaaaagggacggccgtgatcaccgtgcagagcggagcgaaaaaactgaactgtaagataacggttaaataattcaagggatattagcaatccgcatttgttatttgctcatagttatatcttatatgtttgagcacgcaaaacagactggagcttgataagaatatatatcaggttctcagtctgtttttatatattgcaggcaaaaaaagaatacgttttcacaaaataagattgacttttttcaaaactcttattatcatataaaacatattcaattactatgaaataagaaatgataaaaagttctgttacacagatgatgctgagttacatatatgatgctgagcagcttacaggactggcagcgggcaaatttttttcagagggaggggacgggtacatgtccatcaagaagattgcagaaaaggcaggggtttcaccggcgacagtttccagagttttgaataatcccaattataaatgttctgttcccggcctccgggacaagatatggaaaacagctatcgagatgaattatgtgcccaacgaggcggcccggaatctgaaaaaaggcgtttccgcaaagaaggagaaaacctggtacatcaatatcctgatgacaagaaccgattcttccataacggatccgttttttgcggagctccttcgggtggttgaaagtgagatccatgataaaaactgcattctttccaaagtatggtatatgtctgtgttttccgatgaccgtaagtgccgaagagagaatctggaccggctgatcgacagaatgtatgacgaggtggacgggaaaagggatggtctgatcattatcggcagatgtaataaagaggctttgaagaagctgaataagaagtataagagtgtggtatccgtgaaccggaattctaccaattatgaagtggatgaggtcctttgtgatgggaaaaagatcgcagcagcggcagtggaatatctgatctccctggggcacaaaaatatcggttatattggccagtgtcacagcgaggaccggtataacgggtatctggaaacactgaagaagcatgatctggatgtgataccggagtatgttatcgaaacaaagcagactgaggccgagggctacgaggccatggaaaagttctttcagtcggacgacatgccaaccggaatctactgtgccaatgatatttcggcgattggaatgctgaagtgcctgaataaatttcggaaccggtattatatgccttcgatcatatccagcgatgatatccaggaggcacagtttaccagaccgatgctgacaacggtgagcctgcccaaggaggatatgggaaaatttgcattatacctgctgttggaccggctgaagggcgggcattccggtatcgtgcggatggaactggaaggcagattgatgatacgaaacagctgcagcagtgtggaggacagtatgtggagcgattattgtatctgagtgttgcggatgcgcagatatagtgacagacaggatgcggatgcgctatgaccagagtatttggtgaaaacgttttcagatattcctatttaattaatgggaataataaggtttaatgtattcaattcaaataaaaaaattacagaaccacagtaaacggaaagaacaggtatgatttgacagcgaaatgaagcagttacattggtgggaaaaagatttctaaataaaaatgtggttgtaaaggagtacacagatcatgaaaagaaaacgcattgcaggtgtctgtatcacactggcagcagtggtactggcaggaacttttgcagtatcgggaaacaatacaaaggataaaaatcatgtggagatcatcaatgtgtcctatgatccgaccagagaattttatgaagcatataataagattttttcaaaatattggaaagaggaaacaggtcagagtgtggatgtgatccagtctcatggcggttctggaaaacaggcgttggagatttccaacggacttccggcagatgtggcaacacttgccctggaatacgacattgatgcaatccagaattccggactgatcgacaatggctggattaatgaatatccggatgacagtgctccttatacttccaccattgtatttctggtacggaagggaaatccgaagaacatccacgactgggatgacctgacaaaggatggcgtgggagtgatcacaccgaacccgaaaacttccggtggtgcccgctggaattacatggcagcctgggcttatgccaatgagaaatataacggcaacgagacagagatgaaagcctttatcaagaagctttacaaaaatgtcctggttctggattccggagccagaggtgccacaacttccttcgtggaaaacgggcagggggatgtgctgatcgcctgggaaaatgaagcgtttctttctgtaagggacaacccggatgattacgagattgtaacgccgagcatcagtatcctggcgcagccgtctgttgctgttgtagatgaaaatgtaaaaaaacacgataacgcagatgccgcaaaagcttatctgaaatatctgtattccgatgaagcgcaggagctgattgctgagaattactacagaccggttgatcagacgatcctgaaaaagcatgcagatacttttaacctgaaggtgaagctgaccacgatcaaagatttcggcggctgggatgcagttcagaaaaagcatttcgcagacggcggagtgtttgatgaaatctatgaagagtagaagagtcagagatttacagcagatcggggatttgtagaagagtcagagatttgcaacagatcagaggtttgtagaagagtcagagatttgcaacagatcggggatttgtagaagagccagagatttgcagcagatcagagagttgtagaagagtcagagatttgcagcagctcagagatttgcagcagctcagagacttagaaaagaggggagacagaaatgaagaaacaacagagtaaacgtgtgataccaggctttggactgacaatgggagtgactttggcgatgctgagtatcgtagttctgatccctcttgcgtctttggcagtatactcggcgcggctgggttttcgggaatttattgaggtgatcacacggccgagggttttgtccggattctatgtaagctttattaccgcatttgcggccacagtgatcaatgctattatgggcctggtccttgcgtgggtgctggtaagatatgattttccgggaaaaaggatcatggatggaatgatcgagctgcctttcgcactgccgactgcggttgccggtatctcgctgacatccctgacatccgataaaggtctggtgggaagcttttttgcaaagttcggcattaagatcgcgtataccaggatcggtatcacggtagcattgatctttgtgggaatcccttttgtagtcagggccattcagccggttctggagaagctggacggttcttatgaggaggcggctcgtgttatgggtgcaaaaccattcaccgttttccgcagggttattcttccggagcttctgccggcaatgctttccggggcgggacttgccttcggacgttgcctgggagaatacggaagcgttgtttttatcgcaggaaacaagccttactatacagagatcacgccgctgatcatcatgtcaaagcttcaggagtttgactatgaaagcgcaacagctatcgcactggttacactggcagtatcattcctgatcctgtttggtgtgaatctggtgcaggcaagaaatacgaaacgtatcagagggagggatgcataatggatgaaaaaaagaagcaggcttccgggccggtgaaatggatccttatcgggatttccgtaatctttctttttgtgatgctggtactgcctctggtggttgttgtaacccaggcgctgagcaagggatggcagtgctacgtgcaggcggtggccgatgagtacacgctgaaagcgctgaagctgaccattaaggcgacggctgcggctgttgtatgcaacacaatctttggtctgtgtgcggcatgggcaatgaccagatttcattttcggggaaaaaagctacttaccactttgagcgatgttccggttacagtatcaccggttatcgcaggtcttatctatatcctggtttttggaaagcagagtcctctttattctgttcttgaaagtgcagggatacagatcgtgtttgcagttccgggaattatcctggcaacgatttttgtcacgtttccatttgtgtccagagagatcataccggttctggaatccatagggtccgatgaggaagaggcggcagcactgatgggagcaaaaggctggacgatttttaccaaggtgacatttccgcatatcaagtgggcatttctctatggtgttgtgctgtgtacagccagagccatgggagagtttggagctgtgtccgtactgtccggacatctccgtggaaaaacaaatacacttccgcttcatgtggaaattctttataacgaattccagtatgttccggcatttgcggtttcttcgatccttgtgatcctggcggtgatccttctgatcgcaagaaatgttctggagcataaaggaaagggggaaaaaggcgatgtacgttgagttaaaaaatatcaataaaacatatggggattacaaggcatctgataacgtaagctttggcatcgaaaaggggaagctgatcggtcttctggggcccagcggaagcggaaaaactacgattctccgtatgatcgccggtctggagcagccagacagcggggagatcatcatcgacggaagagtggtcaatgatgtgcctgccagcgagagaggcattggatttgtgttccagaattatgctcttttccggtatatgacggtgtatgataatattgcatttggcctgaaggtgcagaaggcggacaagaagtatattaagcagagggttatggaactggtagagctgatcgggctgaagggtctggagaaaagatatccgagtcagctgtccggtggtcagagacagcgagttgcttttgcccgggccctggctccgaatccgcagcttctccttctggatgagccttttgcggcgatcgatgcaaagatccgtacagagcttcgaagctggctgaaggatatgatcgagaagctggggatcaccagtatttttgttacccatgatcaggatgaggctattgaggtggcggatgaaatcatcattaccaaccgtggacggattgagcagaagggtacaccactggaggtttatcagaatccggatactgcgtttacggcgggatttttcgggcagacttctgtgatcgatgattaccaggtgttcaatcacttcgaggaagttccgggaggcgaaaaagccattgtccgtcctgagttcgtaaaagtgactaagaagaacgaggaacagaaatataaaagctccgcaacagagggcgtcgtagaacgagtcgcattccgcggcagcagcctggaactgaaagtccgtgtaggaaacaccacactcagcgccagaagaagccttgacgaagaacccgttcgggaaggcgaagttgtggatgtgtttgtgcagaggatttttgtaacaaagggaaatgaggcagtactgctacataatacagctatggttgaggattggttagtgatataaaaaaatgccgcgggagcggcatttttttatgagcaagtagcgttagcggattgcgaatatcatatgatgcggccgcgggagcggcatttttttatatatgtgaaattttcacaccgtaatattctgcaagagaatccaccaggtcatcacggatttttttgtggtcattgccatccagggacatgacacaggataccatctgatgttttttgtcaatgatgcagtattggccgtaattgccggacaggatcagagtatcttccataggtcccatatatatgaaatatccataaccatagctctggtaatctggatgttccgtcagtggattgtaagaatcaatgtgtttctgacaggcatcaataacgaatttttttgggacgatctgttttccgttcagggaaccctcatgcagaagcagatgtccaaaacgagccagttcatcaattgttagatacagtccgttagctgccatgcaatgtccttgagggcaaagggtccagtcaggattcggaataccaaccggttcaaagaaacgatatcgcagataattcagcagacccgttccggatttctcttccagaagaacagacaaaatataggaacagaaattgctgtacacaaaatgagtaccgggtgtatagggaaaagaatcattctgaaagaaatatcttacccagtccttttctctgtatcgttccggtccatcgcagaaaaagagaggatcgttctgcccggatgacatggtaagaagatcacgaatctttattttgtaaagattttcggaaggatttgacggaaaatatttttcaaaccaaggataaatatattcatcaagtgtgatcagtccttcacgttctgcgatacctgcagccattgcaacaaagggcttgctgacagaccatatatttaatcgggtttttaccggaaaaagtctgaattcttcttttaaaacgtcatttttgtatatctgggcatagataatattggaatgatgctgtttcgatttttccaggaaaatatctaaaatttcatgcatgataatcccccctgaaattattattcgtaaaaaagatcaaagtctgaataaagttcttccaggtcatgaagtcgtgtactgatggatttgcacctggtttttcggatttttgcaacaatactgtcaaacagacaatagaggcatgagaaggagttaaatcccatttcattgagattgatctctgtaatgatagcgtggtctgccagcgcccatgccggtgatgaaatgctgtctgtgacggcgagtatctttgcaccatggtttttggcaacctgtgcatatttcagagaccatttggtatagcgggcaaaagagatcagaagaacaactgtatcctcggatgcttctgtgagatattcgaaattggaatcgtaaaattcgtgaaccaccttggtatttccaagaagctgattcagcagagttcccatccagagtgctgcactgtaagaggaacgggcaccgacaatcagacgttttttcgcattggtcagatgagtaacgatctgatccatatcttcctgattcaggtgggaagcccagttttccatggaatggagctcttttgcaatgatgttctgatagaaatttccgttatccagtgtgtcatctgatgtagttgtgggaatggaaaggatgtcattctgtacagttctctgcatttcagaaaaactttcaaaacccagagaataagcaaggcgtatgatagtggtttcgcttacggaaatttccttgctgagtttcgcaagggtggaataactgaaagaatcaaggtgttgtaatatatattcggcaactttcttctgaccggcagaaagagaagatattttttcacggatcaactgttctactttcatgaaaaacctcctgttttgtgtagtttgtataatgaattataacaggtgcgaagtttaattacaatataatggagcaaaaaattcttctaaaacaaaataaaatgtaaataatgcacaattaaaaaggaggatttttaatgatattgtcaatagaaattctgaattttaaatgataatatagaattaaataattcatatgacgtcagaaaaagaattaaatacactatcgacattgaaacttatatgaaaaggggggcttttatgttatcaacagcaaaggaagtaaaagaaaaaacaggttatctgaaacgaagtgatctttatacgattggtgtaggacaggcaattggttcgggagttctgacattaatcggtccggcgattttgctgacaggacagtcagcgtggctggcgtatgtagctgcatgtatctggggatttatgatgatcgcaccgatcccgtggatcacatccacactgaaacttggagggggcttttattctctggtaggagatatggccggcaaacgagtagccggtatgtatgcggttggatttttaccacagacgattaaccttgcgacttatggtgttgccatcggtatgtatgccaattccctttggccgcaaatcaatgcgaaatggtttggtatcgcagcattgagtgtattctttgtaattaatctctgcggcgtggatgtaatggcgaaagttcagaaaatcctggttattttactgtttgtcgcactggggctgtttattattcttggtgttctgcagctgaaaaatccggtatttgactttacagcaccagactttttttcaaacggaccatctggatttttctcagcaatcctgctatatgtatattcaacaaacggttactcctgtatcatgaattatggtaaacaggcgaaggatgcacataaggatattccaaaggcacttctgtactgcgtaccgacactaatggttgtatatggtggtgttgcacttgtagccagtggtgtgcttccattggatcaggtggcaggacagccacttactctggtagctaaaaatattttaaatccggctctttttacagtatttatgatcggtggtccggtgcttgcactttcatcttctattaactctacaatttccaataactgtattccggttgctcagtcctgtaaagatggatggcttccgaaatcctgggcagcacaaaatggacgcggtgcttactggaaactgatgacatttacttatctcatgggaattttaccggtattactggatttttctatcagtgatgttgtaaataatattatgcttctggcatctgctctggcatttttacagatttacgcatattttcagctcccaaagaaacatgcggaagcttgggaaaaatcaccaatgcatatttctaacggaaaatattatttcctctgctgtttgagcctgctcgcatatatctgcatttttatcaattcctgcagaagcctgaaacttccggtagtaatcatcagcctgatagccattgtagtatgcatggcttacggatggtttagaagtgcaagtcctgatgtaaagatggaaacaagtgtgtgggaggattaatgtttatgaataaagaccaaaacctgatcaatgaatttgctatcaaaactttaaaagaaaatctcaatgttatgtatgcgcagatatggcgtgaaggacagttaacggcagaatataagagaatgccggtgaaaacccgtttgaatacctggtctgcatgcaaaggcgtggtatcctgtgcagtgggaattgcactggatgagggattgattcatctggatgagaagatcgttgatatttttccggaatatgctccggagaaagcagaaggatatcttggtgatgtgactctggaaaatatgctgacaatgactaccggtctggaaagctcgctatttttctgtgactggccggaacgttatacaacgccggactggatcagatatttctttgaaaatgcgaaggttgtaaataaaccaggaactcagtggctgtacagtaatttcaatacttatatgatcagctgtgctattgaaaaacgtgcgagtgtcaatcttctggaatatctgagaaatcgattttttgaaccattgggaattggaaatccggactggactttgtgtccgaaaggtcatgtacatgcggcgaatggtctttatgtaaatattgatgagttcgccagatatggacagatgattcttcataaaggaaaatacaatggaaaacagttggtgccggaagaatatatgaaagttgcgacttccaatcttgtagacaattcagcggcaggaagcccgggaaatctatattccggttttggatatggatatcagtttgtaatgaatccggaagctggttcctatcgatccgatggaaattatggtcagttctgtctggcgtttcctgacaaggatgcagtagtaactgtaatgtctctggagggggatttccagaaaataggaaatcatctgtggactacagtggttccggaattgtaatatattctggttgacaaatccgtggggaaagcataagctaatcccatcttcgacagttaaataaaaataaagtggcagaaacccttgattttacaagggcactgaaaaaagggcgtgtgaaaaaatgagaaatcattttggagcacgctcctttttatgctcttttaggccaaatcgtagaattgaggagagattcagagcatactttcccctctccccataaattcggttgtttttgaaattgtgcggctgtttttactttcattcttttgtaccaccggtcatttttcatgattctaaaagttccttctgcctggatggaacgattcattctgagcaatgctccctgaatactttccagattacggatcacttcctggtacattaccgtcaactcctgattgacccgtactgtacggtttcctttgacctttttgtatttctctgcataaggacgtccgctacaggatattttggataaaaaccataggtctcatgaaattttttcatgagaggaataaaacagtccatatctgaacggtacctggattttcagttgcttttttccatacccaggaatgcttgtttgcagttgcttcaaattttgatccatctatatataagtgctgcagatcgacgtgctcggtttcaaagatctttttgttggctatgtttttttacagcccctttttatgccattgtaaaaactgccgaatttcaccgaaagctccgattcggcgaaaaatatcatagcaggaatattttttataatgtatactatatttgttgagaaatccagatacaccacaaagcagaaaggaaaaaagcgtatgaaaagaaattggaaaaaagctttatgtggcattttgacaggttttatgcttgcgacggcggcaccagctgcggttccggagctgatcagcgtggcagaagtacaggcggcagtaactgtagcagcgccggccatgtcttctattaaaatctccggcaggaataagatcattttcagctggaaacaggtaaaaggagcagccggataccgtgtataccgcaagaccggaaacagcggatggaaagcagtaaaaaccatcataggaagtaagaatgttacatttaccgacacaaaagtaagcaccggagcacgttatacttatacggtaaaagcttaccggaaatccggaaaaaatataatctggagcggttataataaaaaaggcctgacagcgatcgcagggctgaattctcttaccctgaataagaccagcctgacactgacaccgaaaaaaacttatacactgaagatcaacggcaccagtctgaaaccgtcatggaagagcagcaacacaaaggttgtcagtgtaacttcagccggaaaggtcaccgcagtaaaaacaggaacagcgaatatcacagcgatccttggcggcagaaaattcacctgcaaggttactgtaaaaaatcctgcatcggctaacgcaaaactgacgcagaattatgccaaactgaaaaaatatatcagtcagaaaggcagatataccgaagacggaagtcagtttataaatgtcaaagtaaatgaagaaagtactctgataatcggttatctgaagaaagaagataagatagatattggaatgctgatttctgtgccttccgatggagtacttgccggactggatattatcggaaactgtgtgaaatctgatacggtcagtgtgaagtccgccctgtcttcggatggagtctttgtgctgctgacttcttccacaaaagcatctgcttataaaggtcagaatctgactttcctgtatacaaacggaaaaaaagcgatgacagatctgcaggatacttccaacattatgatgaaagcgacaatgatagcagcaaatgcttatctgaaaaagaatttaaacctgacaatgaatgatctgggattcactgcttataaattataaataagacaaaaatttattattcttgacatgaagcaggatcggaattatactaaatcatgtaaataacgggggagcttgtgacggcaggctgagaggaagtcttcaacttcgacccttatacctgatttggataatgccaacgtaggaacgtataagatgaatttacgggagataccttggcgtatctccttttttattggatgcggatgttttatccgactgaatatacgtaagatcaggatttacagagaaatattttacaattaaacatgggaaattttgagagtgaacagagttcatgaaggggtgcaccaccacgggtgtatttctttgtgaactctttttttacggatcgcgaatatccgattgaccggaagagattgcgaattacttctgacttggcgaaatttccggaaaggagagaacatgatcacagtaaacggtgagagcagaaccctggaagctccggtgaccgtaacggaatatctggaagcatgtaactatgttccggtgcaggtggtagtagaactgaatgaagagatcatcaagagagagacttacgacacgaccgtgctgaaagacggagacgttgtggaaatcctgcagtttatgggcggcggaagctgctgagacagaaagaataagaacggatacagaaattcctgttcagaagtctgaagatgggcaggaatatccggctgtgggatgggcagaatcgcagataactgcaggattgaaattgaacgagcagttattgcagctgaaatacaatgcagataaataacagaaaggtggacataaaaaatgacaacagcaaacacaaatgaagacaaactgatcctgggaggccatgagtttacttcccgttttatccttggttccggaaaattttctctggagcttgtaaaagcatgtatcgaaaaagcaggaactcagatcgtaacacttgccctgcgccgtgcaaatgagggcggacttgccaatattcttgactatgtgccgaaggatgttacgcttcttccgaacacatcaggagccagaaatgctcaggaagcagtacgcattgcaaggctttcccgcgagcttggctgcggagattttgtaaagatcgaagttatccatgactccaaatatcttcttccggataactatgagaccatcaaggcaacagagatccttgcaaaagagggctttgtagttatgccgtacatgtatccggacctgaatgcagccagagatctggtgaacgcaggagctgcctgtgtaatgccacttggctctccaataggttccaacaagggaatctgtacaaaagaattcatccagatccttatcgacgagatcgaccttccgatcatcgtggacgctggaatcggccgcccgtcacaggcatgtgaggctatggaaatgggtgctgcagcagttatggcaaatacagctattgcaactgcaggagacgtccgtgttatggcggaagcctttaagaaagctattgaggcaggaagaagtgcatatctttccggtatgggaagaactctggagagaggtgcaagtgcatcctcaccactgaccggatttcttcatgagtaaaattgataaatgaatgattgaacgcagaatgctaagcgggggacaggcactgcctgtgtagtgaaacacaggtattgtctggtttcaatcgaaattgagtttacagatatgcagtagtgaggaccagagtattgctgtaatatatgagaggagcgacataagagtaatggcagaaacagtacaggccagtcagcaggacggccattttaatgaaagtatcgtaaatgaagaaattctggaagatatgaaaaagaaccgtatcgatcacatgaagtaccttccggatatggaacagctggaagaatctgatgtaatggatcaggttatttccgcaatgaacgcatatgattatgataagtacacagaagcggatgtacggagagcgcttgctcatgacaaccgtacaccggaggattttaaagcactgctttcaccggcagcactgcctcttctggaagaaatcgcacaggctgcacggatcgaaacaaggaaacatttcggaaacagtatctgcatgtttacaccgatctacattgcaaattactgtgagaactactgtatttactgtggatttaactgccacaacaagatccgccgtgcacagctgaatgcagacgagatcgagaaagaaatggcagccattgcagaaaccggactccaggagatcctgatccttaccggagagagcaaagccaaatccaatgtggaatatatcggaaaggcctgtgagatcgcccgaaaatatttcaaggtagtcggtcttgaggtgtatccgatgaattctgatgagtacgcatatcttcacaaatgcggggcagattatgtaaccgttttccaggaaacctataattccgataaatacgaaaccctgcatctggcaggtcacaagaggatttttccatacaggttaaatacacaggagcgtgcactgaaaggcggcatgcgaggtgttggctttgcggcacttctgggactggatgatttccgcaaggatgcttttgcaacgggatatcatgcatatcttttgcagagaaaatatccacatgcagagatcgctttttcctgcccgagacttcgtccgatcatcaataatgaccggatcaacccgaaggatgtccacgaaccacagcttttgcaggtagtctgtgcgtatcgtctgtttatgccgtttgcaagtattaccgtatccaccagagagtgcgagcgtgtccgtgacaatctggtaaatatcgcagcaaccaagatctctgcaggtgtcagcacaggaatcggaagccatgtggatgatatcgaggataaaggtgatgatcagtttgaaatctcagacggaagatccgtggacgaagtctttaacgccctgaaagaccatggccttcagccggtgatgaatgattatatttatctgtgagatgaaggcggcgaaatcggatcgcacagacaacagaggataacttctgtggaatatgtggaaaaccatccgcccggaagagcgatttttcagggtgagtgtggataactgtttcaggaaagttcactgcttcgatcgtaaatatccgtctgacactgaccccaaatttcacagatgaaggaaaacatcccgcaaaaacaagatatactttggaaaaattcccgaaaaacacggaaattacaagactgatgacgttttcacatatactccgggaacaataaaatacgatgcaaaaatcaacaaaaacaacataatatcaggtggaatcaaatacaaaaatatgtgaaactagcataaacagccatattttcgaaaactcctgaaaacggtttccaatctaatagttttcttatggacttactcctgtttataatagccccaacaacaaaacacgaggtaaaacacaggaggtaagtattatgaaaagaagatggaaatcagcagcagcagttcttgcagcaatagcaacaattggaagccttacaggcgtaaccacctatgcggcggacagtgtcagcatcaccaatgtatcttatgatccgaccagagagctttacgagcagtacaacaagatcttccagaagcactggaaggaaaaaacaggccaggatgtggagatcacacagtcccatggcggttccggcaagcaggcacttgaggttgccaacggactggaagcagatgtggtaacactggcactggagtatgatgtggatgcgatccaggatgcaggactcatcgatgacggatgggtggatgaatttccggaggacagctctccctacacttcgattattgtatttcttgtgagaaaaggaaatccgaagaacatcaaagactgggacgatctggtaaagaaagacgtaggtgtgatcacaccaaacccgaaaacctccggcggagcaagatggaactatctggcagcctgggcctatgcaaaagataaatataacggagacgaggataaaattaaagaattcatcggagatctttacaaaaacgtacttgtcctggacaccggagccagaggtgcaacaacttcatttgtggaaaacgggcagggtgatgtactgatcgcatgggaaaatgaagcctatctttccgtaaaagattatccggacgactacgagatcgtaacaccaagcatcagcatccttgcacagccatctgtagcagtagtcgataaagtcgtagacaaaagaggcaccagagatgtggcagaggaatatctgaattatctctattctgatgaagcacagcggatcgccggtgataattattaccgtccgtcaaatcaggatattctgaaggaatactccgatgtgtttgacctggacatcaatcttgtcaccattgatgatttcggcggatggaaaaaggcacaggaaacacatttctcagatggagggatttttgatcagatttacgaaggatagacagcagaagatatagttggacacaataacacaaagaagctgcagaacagtgaaaaaacagagtctgcagcttcttttatgtaaatattgtgaatcacaagggatcaggcatggcttccttcggtcagggaacagccgtccattatacggatcccgtttatgacatccagataagtgtcatacatttccttccattcatcagaggcatcctcggagtactggctgatggtggacagaagatcgtatttttttccgtcgacggtttcgatacggccgagatagccctgccatacactgtccagaggctggtcttcaccatcgtaatatctggcttccagagtcagtacaggagcatcctcattgtaataagtcagtttatatccaccattttcggtttcggttgtttcataatggcagagatatttccagcgctccggagtgaggacctggaagtaatccgtcatggccatatccacacgctctgcgtaaacgaaatctatggatttgatcagctctgtggcttccttttcggcggccttatcataggtgtctgacggagtcaggacaaaaagtccgaatgtataatcgtcagtctggcatacaagagcatctacatttttttcttcttcgttgacttcggttaagtattgatatttcgtggcaggataagattcaaaggtaagatcctttttggtgatgatctcaccctttaccggatagtattctgccagaaaacccttcagggaagaatcctccagagaggaattcggtacttttaaaacaaaggcagtgctttttccgccatttacggaacgctgctcgaaataaccttctttttcgggcatggattctctgatcgtatcatcggcagggaatccaacccgcatatgaagctcgccgcgcttttccgattcggaggaatcttccgtgtttgtatcggaagaggaatttgggtatgaagaatcggaatcctgcgaggaggagtttccactggtatcggaggattcttctgaagaatctccggaggaggaatcagtttcagaatcggaatattcctgaagattgccgtagtcatcaatataatatttatctctggagccaatatatgtggttccggtggcatcttccagccacacactgccgtcttcataataataatgaggctcaaaataaccgtcctgttcggtccagccggcatcgttgccttccatcagttcaccggaatccgggtcaggggcataattaccttccccgatatattcatcctcggaaccattgcggtaccagtaatctccgttttcatcctgccagatgtactgaccgtcatcggttggagggtcagaagcgaggaccgggactgcagatatggaaagagcgatcacgcctgttaaaagaactaagatttttttatgcataggcacctcctgataaattgcgcagcagttagctgcttactattctttgatcataaatttttacaaataaaaaagatctgtctgttaagtacattgtaacagacagatcccgatatccggaaatgtgaagaaaaagagacatttacggaaagctgcgtacaggtctggaaatatgctatccgatcgtgaaaaggccggcttaccggcaggtaaaaagatatccctttccataaaccgagacaatgtcatactcatcggtatcttcggcaccgatcttggtccggaggttaaagatatgccgccgtaccgtgctggtatctgttcctgcacagctgccccataccgcttcgtagagctcctttgcagaaaaaatcttctcctggttttctgcaaggagacgcagcagagagaattcggtccgggtaaggcctgtgtcggcattattgagatatgcatggccgtccgaaagatccagccgcaggctgccgatggtgatctgacgggaggactgaaatttttcttttattttttcttccattcgtttctggcgttccagaagcatctggatcacggccagaaattcatcgaaattataaggtttggtgagataatagtcgcctccctgctgaagtccttctacccgatcccggatatcactttttccggtgagaaaaagaaccggattcatggttttttcgcggaagcggcggcagatatccagaccgtttccgtccggaagcataatgtccaggataagaagatccggcagctgttcttcaagctgatgacaggcttcggcggctgtctgtgcagtgcggacatcgtagccacggcgccgcagcatccggcagttggtattcagcacctgttcttcatcctcgaccataaggataagtgatttattttcattcatttatgattcctcctccggaagtgagaagaacacctgagttccctcgccttctttacttttcagccatattttgccgccatgggcagtgatgatctgatgacagacatagaggcctatgccgtgccgccagtaatccttatcagcggaaacataacccttgagtgcgttttttcgcatttcttctgacatgccggttccggtgtcggagacgcagatggtctgccagcccggttcgccggtaagagaaatggtgatggttccgttttgggtgtgacgctctgcattggagatcagattggtgacaacctggatcagccgttccggatcagcagagatttccgggagtccggattgtgtcgtaaggaccagctgattgttctttgagcttggatgactgcagtagtctttttttacagaatacaaaagaccggacagatctgatgagacaagggaaagggcaagccgtccctgctcaatggaaaccgtatccatcagatccagcacgatccggtcgatccgcattaccgactgttcaatggtgcggagattttcctgcataagagagaaatccagaggctcttcctcaaggagttcggaggtgtcccgcgcgtggagggaaatggaactcagaggatttttaatctcatgggcaacggtggtcaggaaggtggacttggcattatcaagggagcgcagtcgcagattctgttcctccagaaggagctgctgctggttatattccttcagatgaaaatagagaacactgccgcagacaatacttacagagacaaacgccagaaggatatctgccagccggtctgcttccgtggcaaaaggagttacagtgtccgggaaatggtatgcaaccagacacagtcccatataaaggagaatctccagcagggaaacgatcagagcgcgtcttttttccagcatcagcacggtaaaaataatagcaaacacaaagaatgccggcatgccgccacgataaccgccgctggtaaaaaacatcaccggaaaaacgatcagaaagatcacgacaatggtgatcaggtagcagcgctgatattttccactgtaataggaataaagaaaaagccctccggagattgcaaccagcgcaaaattgatcagtacatttccccaggaaccggtcccgagactgagaaaggtcatgatcaggctaatcacagtacctcccaaggcgaggatgttgaacagccggacgcggaaatcaagggtgggactgaataaagagtgaaaaatattccggagcttcgggtttatattgatagggatcacctcctgttcttaatgtaggtttgtatgcctgcgggcatctttcttttggtgctgtaattatcgtaactgttataattgtatcatgctgtcgtatagttgtgtacacaaaaaaatacatttaatcccgttttcctattgacatactatgaatagtaggttaatataagtgtcaacaaaagaaagggaagaggctatgaacgaatacggctttaatacaggactgctccacggcaccaacgagaaatatccacagggtgcaacacaggttccaatctatcagagcagcgcattccgacatgacagcgcggaagacctggagaaaatttttgacaataaaaaaatgggcttttcctatacaaggatcaacaatcctacggtagagtcctttgagaaaagagtgactatgctggaggatggaatcggcagtgtggcatgtgcttccggaatggcggcgctgaccaatgcgtttctgaacattctgcaggcaggagacgagattgtggcagcctgcggactgtacggcggaaccgtggaactgttcgatgatctgaagcctttcgggatttccgtaaaatatgtgaaagagaataagccggaagcttttgaggcagagatcacagagaagacgcgacttgtttttgcggagaccattggcaaccccaagctggatgttaccgatatccaggcagttgcggaggtggcacataagcatgacgtaccgctgatcgtagacaacacggtggcaaccccgtatctgatccagccactgaagcttggagctgacattgtggttcattcctcttccaaatatatcaatggaagcagcgatgccatcagcggtattcttgtctgtggtaagggtctgaaatgggaccctgaccgatatccgggacttgctccataccggaaattcggaccatttgcatacatcgccaagcttagaaacggacttttccggaacactggcgcgtgtcttgctccgcagaatgctttccttaataatctgggactggaaaccctggggcttcgaatgcagagacagtgtgacaacgcactggaacttgccagatttttacaaagcctgggtggtgacattgaagtaaattatccgggactggaagaaagcccttatcacgaaattgcgaaaaagcagttcaggaatggttacggagctatcgtaactgtgagaaccggaagtaaggagaaagctttttccattatcaattccctgaagatcccgctgatcatctccaatatcggagatacgaagacactggtgatccatccggaatccaccatcgcggcacatatctccgacgaggagaagcagcagtccggagtgttcgaagacctgatccggatcagcgtgggaattgaagacattgaagatttaaaagaagatttcaaacaagcgatagagagtaacagataaaatcgatagctgcaccagcagagaaatggagagttcgctatggcaaaagtagattacgctacattaaaaaaaggtggtttcatgagacagaagcagaaaaataatttttctcttcgtcttgcctgtgtaggcggtacgcttaccgcagaaaaccttaagaagattgcagaagtagctgagaaatacggtgacggatatgtacatcttacttccagacagggagttgagatcccgttcattaaattagatgatattgatgatgtaaaagatgatcttgcgaaaggcggatgcaaacctggtgtctgcggaccgagagtccgtacagttacagcctgccagggtaacgcagtctgtccaagcggaaacatcaacagctatgacattgcggtgaaattaaatgagagatattttggaagagagcttcctcataaattcaaattcggtgttaccggatgtcagaacaactgtctgaaagcagaggagaacgatgtaggaatcaaaggagcagcacaggtcagctggaaagaagatacatgtatccactgtggagtctgtgaaaaagcctgcagagaaaacgccatctcttttgaggatgacaagctggtgatcgatacagagaaatgtaactactgtggcaggtgtgcaaaatcctgtcctgtggatgcatgggatgtaaacgaagcatatatcgtttcctttggcggaacgtttggaaatcacatcagcaagggacaggaatttcttccgctgatcacctctgaggagcaacttttcagagtgaccgatgcagcaatccagttctttgatgatcatgcaaatccgggagagcgttttaaatttaccatcgaccgggtaggcgctgaaaaacttcaggaagttttgaaaggagcatacaatggctgatattaaaattgatgatacagtagatattaccgatgtagtttgcccggtaacttttgtaaaagcaaaagtagcacttgaggagctggacgacggacagatcctggcgatcaaaatgaacgatggcgagccagtacagaatgtaccgagaagcgtaaaagaagaaggacatcagatcctgaaacttgaagataatgaagatggaacttatacactgatcgtaagaaaagttgaagaataggagaacagagaaatgacaatcacagttgcaggaaataaaaaagaatacgacgacggactgaaacttacagagcttattgagaaagaggatatcgaaagtcctgagtatgtaaccgtaaccatcaacgatgaattcatcagcaaagaagacgttccgaacacagttgtaaaagacggtgatgttgttgagttcctgtactacatgggaggaggcgcaagataatggcttttacaaatgagcagcttgagcgttactcccgccacatcatcctgaaagaggtgggagtaaaaggccagaaaaagcttctgaatgccaaggttctgatcatcggagccggcggacttggagcaccggcagccctttaccttgcagcagcaggtgtgggaacaatcggaatcgtagatgcagatgaggtagatctttccaatcttcagagacaggtcatccacacaactgcagatgttggcaaactgaaagtagagtctgcggctgagactatgaaagccatcaacccggacgttaccgtaaatacatatcatacatttgtagattctagcaacattatggatctgatcaaagattacgatttcattctggatggaacggacaacttccctgcaaaattccttatcaacgatgcctgtgtaatggctgagaaaccgttttcacatgcaggtatcatccgtttccagggacagctgatgacttacgttccgggacagggaccatgctacagatgtgcattccagagcccgccaccaaaggatgccgtaccgacctgtaagcaggctggtgttatcggagccatgggcggagtgatcggaagccttcaggcaatggaagccatcaagtacatcatcggacagggtgatcttcttacaggaagacttctcacctacgatgcactgaagatgaccttccataccgtgaagcttccgaagaatcatcattgcccggtatgcggcgatgatccgacgatcacagaactgatcgattatgagcaggctgtgtgtgaattgaaacactgaaaattaagtatagaaacccattggaggctgcgaagaaatgctgaaattaaaaaaagaagattacgagaaaatattagaccactgcagaaaaggacttcccaatgagtcctgcggccttctgggcgggactattgagggcgatgtaaaaactatcgagaaggtgtatctgctgacaaacatcgatgaaagcaacgaacacttttccatggacccgaaagaacagctgagcgcgatcaaagatatccgccagaacggatatcagatgatcggaaactttcattctcatccggagtctccgtcaaggccttccgaagaagacaaacgacttgcttttgacccgaacatcgaatatctgatcctctcccttatggatgcagaaaacccggtgttgaaggcctttggcgtagataaagagaaaaatgtaactgtacatgagcttcagataacagagtgatgagtatgaaaaacagattaaacacaaaggaaattacaacagatgtgctgatcataggcggaggtaccgcaggctgctatgcggcgctggttctctcagaacagaaagccggcaaggtactgatcgcagaaaaagcaaatatcagacgaagcggctgtctggcagcaggtgttaatgcagtcaatgcctacattgtaaaaggccgcaagccgcaggattatgtagattatgcaacaaaggatgccgccgggatcgtaaggcaggaccttcttcttacagcagcggagaatttcaacgaagttactgcaaagatggaaaagcttgggcttgtgattctgaaggatgaaaatggtgattatgtagccagaggaaaccgtaacatcaagatcaacggtgaaaattttaaaccacttcttgctaatgcagttcataaagctgagaatgtagacgttctgaattatgtaaacatcacagaccttcttgtaaaagatggacaggtttacggagcggttggcttctctattatggaagaaacagcatacattatccgggcaaaagcagttcttgttgcgaccggaggtgcagctggtctctataaaccaaataatccgggattttccagacataagatgtggtatccgccatttaacacaggtgccggatatgcaatgggaatcctggcaggtgcagagatgacctcctttgagatgcgttttatcgcacttcgctgcaaggacaccatcgcacctacaggaaccatcgcacagggtgttggcgcaaaacagatcaatgcagcaggcgagatctacgaaacaaaatacggactgaccacaagcgagcgagtttacggaacagtccgggaaaaccagcttggccatggcccgtgttacctgaagactacagggatcacgaaagagcaggatgaagatcttctgaaagcatatcttaacatggcgccaagccagactctgaaatggatcgaaagcggaaagaacccaagcgaacaggatgtggagattcagggaacagagccatatatcgtaggcggccatacagccagcggctactgggtaaacacaggccgtgagactacggtgaaaggtctttacgcagcaggtgatgttgcaggcggatgtccgcagaaatacgtaacaggcgcacttgcagaaggaaaacttgcagcactggatatggtgaaacagttttccgcgggatctctgaaagaagcggatattaccacagaagcagagatcaaagttcaggaagaaaaaattctttctcagtacgaaaagttccgtaatgaagatgcaccggcattttccgttgaggagcttgaggaagccatgcagaaagtcatggatgagtatgcgggaggaattgcttccaattatcagttcaatgagaaacagcttgaccttgcagatgaaaaaattctcaggcttcaggccctcgccgaaaaaacagcgacagcagatatgcatgagctgatgtttgcatacgaacttcgtgagcgtctcattgtgtgccgttcactgatcgctcatctgaaaaaccgaaaagagaccagatggcattctttcaacgaaaatctggatcatccggaaactgatgagaaattttataaatatgtaaattcgaaactggaaaacggcgagatcaggataattttccgtgacattgtaaaggaggacacatatgagcatacgaattgatcagaaaaaatgtgttggctgcagaaaatgcagtgaagtatgtccgggaaccctgattgtcatggaagacaaaaaagccgtgatgaaatatccgaaaaactgctggggctgcgtttcctgtgtaaaggaatgtaaagccggtgccatcgactttttccttggtgcagatatcggcggtaacggaagtatcatgaatgtaaaaagcgaaggggatatccttcactggatcattacaaaaacggacggttctacatccgtgatcgatgtggatcgacggaattcgaataaatattagaccagaagataagtgctgccggttctggcggccggaacaggaggatgagatcagatatgagtggattatcacatttggatgagctggaagcagaggcaatttatatcatccgtgaagttgcagcagagtgcgagaagccggtaatgctttattctataggaaaagacagttctgtaatgcttcatcttgctatgaaggctttttatccggagaaaccgccatttccgtttcttcacgtaaatacaacatggaaatttaaagagatgatagagtttcgtgacaaaaccgcgaaggatctgggaatcgaaatgcttgagtacattaatcaggatggtttgaagcagggtatcaatccttttgacagcggttccgcatacacagatattatgaaaacacaggctctgaagcaggcccttaagaaatatggcttcacagctgcgtttggcggtggtcgtcgtgacgaggagaaaagccgtgcaaaagagcgtatcttctccttccgtaatgcagagcaggcctgggatccgaagaatcagcgtccggagatgtggaagctttataatactgagatcaataaaggcgaaagtatccgtgttttcccgatctccaactggactgagactgatatctggcagtacattaagagagaaaatatcccgatcgttcctctttattttgcaaaagagcgtccggttgtatacagagacggaaatattatcatggtggatgacgacaggatgcgcctgaacccgggtgaggagccgcagatgaaaaaggtgcgtttccgtactctcggatgctatcctctgacaggtggtatcgagtctgacgcggagacactggacgagatcattgacgagaccttaagctctgtggaatctgagagaaccacacgtgttattgattccgacggcggagctgcaagtatggaaaaaagaaagagagaggggtacttctaggatgagcggattactgaaatttatcacttgcggaagtgtagatgatggaaaatctacactgatcggtcatattctttatgattccaagcttttatatgcggaccaggaaaaagcccttcttctggacagcaaggtaggttccagaggtggtgccattgattattctcttcttctggatggcctgatggcagaacgtgagcagggaatcaccattgatgttgcgtatcgttatttttcaaccgataaaagaagctttatcgttgcggatactcccggacatgaggagtatacaaggaacatggcggttggagcttcctttgctcagctttccattattcttgtggatgcgaagcagggggttctggtccagacaaggcgtcatgcacgtatctgcgctctgatgggtatccatcattttgtatttgctgttaacaaaatggatcttgttgattacagtgagagtcgttttaatgagatcgtaaaggatatcaatgagctttctgagactctggggcttcaggatgttgtgatcattcctgtcagtgctacagagggtgataacgtaacgaagaagtctccgaatatgccctggtatacggggaaagctcttctggagcatcttgagactgtggatgtttcagaggctgagaatgtcagcgagttttatctgcctgttcagcgtgtttcccgtccaaatcatgaatttcgcggttttcagggccagatcgagagtggccgggttcatgtaggcgatatcatcacaacgctcccaagcaacgagacagcggctgttaagacgatcctggtgggcagtgacgatcgtgaagaggctgttgccggccaggctgttacgatacagttggataaagaggtggatgtaagccgtggatgtgttcttaccaataataatgagatccctgttgcaaagggctttgaggctacgcttctatggatggatgattccaggcttgaagtgggcaaggagtatcttgtgaagcttggtaccaagaagatcgcaggtgtggttaagagtattgagtttaagacggatgtaaataccggggagcatctgcatgcggatacgatcgagaagaatgagatcgctctttgcaaaatcggtctttctgataaggttgtgctggatgagtttaagaggaataagactcttggtgagctgatcctgatcgaccgtgtgagtcatatgacttctgcatgtggtgttgtggaatcggttgatactgagggggagaagccttatttccagaaggatgatgtgaaggttggcggttatgtttttgaggagttttattttaaccttgagaatgcgctgctttccaaggcggataaagaggttaagacttatcatgtaggggatgtggtgcctgttgagggtgacagctttgagtatccgggctattttgatattgtgtctctggaggatagcgcggctgttctgatccgtgataagagggtgcaggatattattccgctggatgagtatgtgtttatggggcttcctgttgtggatgagagaggttttgccctggagatccgcagtaatgatgattatcagatgtttttgagggagtttgaggctgctgataataagtcggagtttcataataagtggtttaagtttgagacttacaggaggattgtctgcacggataatttctggatgatctgatgttgggttacttatagtttctatagttatgtgtgtaagaggctgcatgtgcggcctcttttctttgggggttgcgggatttcgtggtttgacggacgccgaggagctggcatatgggcgggacaggcttcgtcggtggaaactactaagactctgaaaggtggctaaaagcgttttccaaaagtccgaactcgctgcgctcagacagcgaacttttgaaaaacaacgccaccttccagagcctaagtagttgtcacacctcctgcagagcgccccgctcatatgccagctcctcggctgtgcacacaggccggttgcggaaagtgaacagttcgagatagtattcaatgatgcatggcagtagagtgtcatacagaaattgttcaggaggaatgttgtatctaagaatcagctcggcacaacgttccggaataatatcggctcagacagtaatcagcttggcataagattccacaataaaagtcagtcgcattatatatcgaagatgtagcgcttgttccgtgcccaagagggtggggggcagggaagccctcggacttcggaactctgagatggacttcccctgcgctgtccacacggacagcgtgtcgtgcgtagccacctgtctaaggggataatatgattggtcaatcgcgctaagataaaattaatgtaaaaaaatgaaaaaaaggtgttgacaaaacttatatctttcggatataattaaccatgcgtttcggatgaaaacacagaagaaatgcactccaatttaataagaaattataagttcggagtctggagaagtactcaagaggccgaagaggtgcccctgctaagggtataggtcgctaacgcggcgcgagggttcaaatccctccttctccgttatttttttgaaaaaaattttttcaaaaaaatgaaaaaacttgttgacaaacgcttgtggatgtgataaagtaaacaagctgtcagcgagacagaggttcatcaaaaaagagtttgaaaaaaagttgaaaaaagtacttgacaaacgatttgagatgagataaaataaacgagctgtctgagagacagacacaacaaaccttgataactaaacagtgaaacacat

SEQ ID NO: 194 - DNA, 90950 bp, Unknown
  gut microbiota DNA sequence
gagaaggcgctgaaggcccttgatgccgataccctgagactttatccggatccgacagcaggagacctggtacacagtattgccgcgttctacggcctgaaggacgagcaggtatttacaggcgttggttccgatgacgtactggctatgtgttttctcacattttttaattcagagaaaccgatcctgttcccggacatcacttattctttctatgatgtatgggcagatcttttaaggatcccatatgagcgcccggcattagatgaggagttccatatccgtaaggaagattatttccgtgaaaacggcggaatcgtattccctaatcccaatgcaccgaccggcgtggaaatgcctctttctgagatcgaggagatcgtggcaaagaatccggagagtatcgtgatcgtagatgaggcgtacgtggatttcggagcagcatccgcactgccgctgatcgaaaaatatgataatctgcttgttgtgcagaccttctccaagtccagatccctggcaggaatgcgaatcggatatgccttcggaaatccggagctgatcaaatatctcaatgatgtgaaatattcctttaactcctataccatggatcgtactactattgcggctggtgtagcatctatggaggataaggcatattttgaggaatgctgccataagatcattacaacaagagagtggacaaaggcagagctcaggaagcttggattttccttccaggattccagatccaactttatctttgccacacatgaaagctgtccggccaaagagcttttcgcagcactgagggagaaacatatctatgtaagatatttcccgaaggacaggatcgacaatcatctccgtatcaccatcggtaccgatgaggagatgaaaaagctggtagaattcctgacggaatatctgcagaaataacaattaaggaggtactatggaagtactggtacaatggttttcacaccaccttgcacagtttatctctcccgagggagctgtgttcatcatttctatgatcccgatactggagcttcgaggcggccttctggcagcttctttgctgaagatatcggctgcgaaggcactgccgatctgtatcgtgggaaatattattccgattccgtttatcctgctttttatccggcagatttttaaatggatgaaaaaaacaaagacgttcagaggtctgatcacaaagctggaaaacagagctatgggaaagagtgaccagatcaagagatatgaatttcttggacttttgctgtttgtgggaatccctcttccgggcacaggagcctggacaggtgcactgatcgcctctcttcttgaggtggatatcaaaaaatcctccattgcgatcctgtgcggactttttatggcaagtgccattatgtatattgtttcttatggaattgtaggaaatgtagtgcattgatcgatcacagagaaggaatggctttttgatcgagatcggattgaaaataaagaaatcccttaccggatctgtaaaatgatatgtgttctgtattccggaaacatatcagagatcggtaagggattttttatgtgtttttacatatcaggcagaggtataccgagaagatccttacataagtctgcgcttcagcatgtccgcgtttaaagcgtatttcagagctgtatccctggtgatacggccttttttatataattccagaaggctctggtccatagaacgcatctgctcctgaccggatgtggagatcacgccttcgatctggtgtactttattgtcgcggatcatattgcggatggcaggagtcaggcgcatgatctcgaaaacaggaatgttgcgtccgtccacatccgggatcagttgctgggagatcacagcctgaaggaccatggaaagctggagggcaatctgatgctgctgggatggctcaaacacgtccatgatgcgttcgatggtgttggctgctcccagagtatgcaggctggaaaggacaagatgaccggtttccgcagcggtcatggcagtctggatggtttcatgatcacgcatctctccaagaaggatcacatccgggctctggcgtagtgtggcacgaagagaagtcagatagctttcggtgtcggtacagatctcgcgctggctgacgatacagcgatcatggcggtggagatattccagaggatcctccagagtgatgatatggccttcccgggtatggttgattcggtcgatcagacaggccatggtggtggatttaccgcttccggcagaaccggtaacaaggaccatgccacgggtatagtcggagatgttcatcacatcctcgggaatggaaagctctgcaggatccggtagccggaaggcgatcacgcggatcacggcagctagggaaccacgctgcttgtaggcattgacacgaaatctggaaacaccgggaatggaaaaagaaaagtcatcatcaccggtttccataagacgggatatatcgcggttttccgcaaggccgtaaatggtgcggagtaaattttctgtctgatcaggcatcagcctgtcaccacggtccaaaagatgaccgtcgatcttttctgccagggggcggcctgcgatgataaagatatcagagacacgccggttggcagcttctgctaaaaattcaggaatagaggtatccataggtttattctcctttaaatacattctggtggttgtcaggttgccaggatccggtaagctctgtgttccattgcaggatctgataagcggaagagcttttttcctgcgggtaaaaaatctcaagcactacagaaagctgttgtgtctcggaaattccaacggagaaggaaagggtgtggctgtgggaatcccagctgagatcgttccttgtgtccgcaagcttttgtatcatggaaaaatatctggtctcatcggaagctttttccctgtattgctccagatcatcacggatttctgaaacggtttccgtggcgcttgcgcagccggtgtaataattttcggtctgttccatagaatgtctggctgtgttaagactggatctggagcttccaagagtaagcagagcaagtacacagagacacagcacagagaagataagaaacagggaaggaatgccgacagttacaaaaaacgtatgcttctgtttcaatgtacagcctcccttctgtagtcatcgacaggaaaacgcagggtgatccggtaaagctcactgcagttggaaagctgccggaaagaaagctcgccggatttttctgaagaagaaatatctgtttccaggatcatttcacaggcggcttctccagaagagcagctctgccagttacggtcataataccagatcaggttggtgttctttttgataccccccggaagcagggagaggaactgttcatcggttccgtcagtgccttccagtatctcgcccacggaggttgtgagagcctggatctggttccactgttctgcctggagccggtttttccgtgctgccgcgaagatctggatgcaggcagctgaggaaagtgacagaaacaaaagggcaaggatcatttccatcagaaaaaggctggtaccggaattatgtcttgattctttcatgatgcctcctttttgccagtgcgatgaagcaggaattccgagcagactcccgtggtactttccagggaaaagtggtaaaaaccattttccatttccgaaaaccggaaatcggaaagctgtgagatgacggttcctgcatcggaactggcctgagagctttttgcagtgaaaagctccatcagactgtcattcttcaggtaaatatacgtgatatattcttttcctttgatatcgtcccggaaacaaagggcaggaatatcatccagggaaccggaaaagatctcatcgccgcggtcgtgctgccggaatttggtagtcagataagttgctgcggtcccaagctcggaatcggagtcagtctgtttcacagtctgctggtaaatccgggcggaaaatagcagcatcagtataaggaacagaacaaaaacaccaaaaagaagaagcgaaaaaagagaagaaacggaatgtccggtgttcttccggtgattcatgaggcattcgctcctttcgcactgccggacagagcgatcacgctgatagacggcaggagattggaaccgttaggaacatactctactacgaatttggttttgtcataagtgatatgataatccgagagaagctgggacaggctttcgggatatgtgcctgtgagggcataggtgcggatggccccgtttttcagtgcctgttccagaacatcttgttctttgcgtacggcctggtcggaggtgctgctgacacctgccacaaacaaggtgcaggataaaaccagaagcagcgccggaaagagaagaaaaaatgctctgagaaattttgttctgcggctttcaaaaagttccatgcggtcaccaccttacattgcaaaatctgagaggatccccagaagcggcatcatgacggataaaaggaccagccccacaagaagagacagcaggatcacgatggtaggctccacaatggagattgcctgtgagatcagatctatggatctttcggtgtactgccgggaaagcctgcggaaggtttcgtcactggaaccggaatagaaggatatcgtgatgagacggccttccatgccgccgaacagaccggattctgtaagagccctggaaaaagtttctccgctatccaggatagaggaagccttccggagtctttcgagtatcaccggctgtgagatcagatcctttgtaagctccaggctggtttcaggggaaagtccgctccgaagccccagggaaaggccctgggccagacgactgtaatccatggcaaccgggatctcacggaaaaacgggagatggatgaccatttttcgcagcaggctgtggcctttttccgtaagactgaaaaacaggatgcagccaatgagggctgcggcgaggatcagaaaaacagaggaataccggctgatcacgttgcctgcattcagaagtccccgggaaaccccgttcatttccattcccatctggttaaatacctgttgaaataccggcaggacttttatcagaaggaccaagatcacaacagccatcatgccaagcatgagcagcgggtaagtgactgcagaccgtatctgccctgagatttcttcctcctgttcatagtgggaactgagactttccatgatctcatccaggcagccggtttcctcaccggtccggacataggcggtcatggatgtgggaaagatcccggattcgtcaagagcccgggaaagagaaccgttttcttccacagaacggatcaggggtgtgaggatctgccggtctgcatcggtcttgctttcgtcacagaggatgtgaagtccttccgctgtggatatgccggaatgcagaagcattcccatctgcccgcagaaactggataattcccgggctgtcagtttgtttttcataataaggtctcctttagtgggtcagcgcgtgaactgtaccgtataattgctttcatcaccgatatattcctggatcgcttcatcaccatcactgttggcgtcaaaggtgggatccatcagcttccaggtgtcgccgtcaaaagatactgcctttgtcacccagcctctgccacggatataaacatcgatccatgcatgttttacatcaccggaatagccgatctgaagcttgcagggaatgtcctggctgcggagcattgcagtagtcagtgcagcgtaatcaaaacagatccccgtgccggtgcttaaagtatcatctacatcaggaagataaccggcttcgacagaatcagctttgtcataatcgtaggaaatatgactggtaacatatgtatagaaggttttcaggatgtcgatatcggtcatgtcttctttgacaagagaggctgccagtttgcaggttttacttttggaagaaaagtccacgtactggtttggatacagaaacggaagaaactcattctgaagctttattgtgagcgtttccgtgtaaagggcggcatactggtttccatcaacctgctgatagcaggtgatgagatactcaccggagccttcggaaaaaggaagtaccgtctgttcatcaggttccagaaaataggaatagaccacaccggagggagcagtaagctgaatgttcatgcgggaatcatcggaatcggattctgcagtcagatacccctgatcctgattggaaatatccaggatcagaggggaactgcccagtgtttttttgccgggggcctccggggtgaggactctggccggagaatataccggaggttcttcatcggaggaaggagaatttccacagcctgccagcaggattccgaaaagcagccatacaaaaaagagacggactggtaaaaattttgacattgtttccgttctcctgttatatcatgctttctttttgaacagtatagcagattccgtgaaaaaaagacaggagtagggctcaaaatgcagtggaaaatgttgacatttcagggaaaaaaacatatactatgcatataaaggcaaacctgttgaaagacggggacgcaaagccatgggtctaaggtccgaaggatgactatgacagccggttgccgcattaaattccgatttaatgacgtattcagataacatctatgaacaagaatctgtgtgttaatgcggccgtttatttcgttagaataagcggcttttttgatgcctaaaatccggtttaggttggaaactgaaacgtcggctttcagaaaggtgtgaatgatatgaaaagaacagatatccataaaatttttacaggcaggaaaaaagctttagcaggatgccttgcagttgttattgtactggcaggtggctttaatgtctggcagtcgtcacaggttccggaatttccggattttacagatccggtagtggagactaccatcacagaggacgacactccacttgcttcaaaaccgaaggtgactaccaaaacgacttcaaataccaagacaaccagaaaaaaagttaggctgaaaaaagcggcgaccaagacttataccaagaagcttccgactaccaataagaagagtacgaccacaaagaaaacaaacagaaatacaaccgtaaaaacattaaagacagttaagactgcaacaacacagaaatacacaaagaaatcaaaaacagccgttcagacacggaaagtaactacaaccattcagacgaccacaacagtcatggcggcttcagctactgccggcaaagcgaatgcagcttccacaaaaaaagtagaaagcatcaacatggacagcaaatattcagtaagcaatattgcttccattgcaccgaagatggacagcagggtgctcaaagcctacaagaagcttggatttactgtaacgatcgatccgtctgttaactacggaggctgctttaacgcacattcaagaagcatcatccttcgttttgagaatgagacaatctaccatgaactgggacatttccttgcttttgttgcgggaaacgtagacagaacaagtgattttgccgcagtttataacagcgaaaaatccaaatttacaggtatcaacagaagctatgcaacgcagaacagttcagaatattttgcagaatcagtgcttgagtatgtaacaagtccgtcaacacttaagagacagagaccaaaaacgtatgcagcgatcgtggcggctctgaataaaattaccgatgaacgtatccagagggtcatggatatatacggaccgttctggagctaaaaaagaagcatacaggaacgttggatctgtccgggaagagatctcccgggcagatttttttctttttgtgagaaaagtataaaaaaaatgtcgataaatatttcttgcaatagactctataaggtgtgtataatgaaacataagctgaaaacacgctttcattcaaaaaaagtgcagccatgtcaggttgtatctgattccataaacaacaaatatataatttatcagatttaagaatagaggatttaatatgagagaaaagtatgaatcattatctctggcggtgctgaaggatctggcaaaggcgagagggatgaagggaatttctactctgagaaaaccggcactgatcgagcggatgctggaggaggacgccaaagagtccgacagaggaaatcccgaagaagtacacaaaagtacaccggcagaaaatactgtaaaagaaaaaagctatgattcggaaaaaacagaatatcgtacccgtccggcaggggaaggacttcaggagcagcggaaggaatatcgtagtgataagaatgagcaggaacacagaagcacaaatatccgcagagagtacaaccgtgaatataaccgggaagctacaagggagaacgggaatgtcccgtcagaatccacccagctggacagtggtgaaaaggctaacgggatcctagaggtccttccggatggatatggctttatccgatgtgagaattatatgccgggtgagaacgacatttatgtttctccttcccagatccgccgctttaatttaaagacaggtgatatcatccagggaaatatccgtatcaagacccagggagagaagttcagtgcccttctctacgtatcttccattaacggttttcatccgagtgagggacagagacggtataattttgaagatatgacaccgatctttccgaatgagagacttgtcatggagcgtgcaggcggtacaacggccatgcgtatcgtggatctgatcagtcctatcggaaagggtcagcgaggaatgatcgtatctccgccaaaggcaggtaagacaacccttctgaaagatgttgctaagtctatcctcaggaataacagagatatgcatctgatcattcttctgatcgatgagcgtcctgaggaggttaccgatatcagagaggcgatccagggaccgaatgtggaagtgatctattctacatttgatgaacttccggaacatcataagagagtttccgagatggttgtggagcgtgcgcgccgtcttgtagagcataaacaggatgtgatcattcttctggattcgatcacacgacttgccagagcctataatctgatcatcccgccaagcggaagaaccttatccggtggtcttgacccggcggctctccatatgcccaaaagattttttggcgcagcccgtaatatgcgcgagggcggaagcctgacgattctggcaactgcacttgtggataccggaagcaagatggacgatgttatttatgaggagttcaagggaaccggtaatatggagcttgtcctggatcgtaaattacaggagaaacgggtattcccggccattgatatccagaaatccggaaccagaagagaggatctgcttctcagcaaggatgaacaggaagcggtttatattatgcgaaaagctctcaacggaatgaaagcggatgaggcagtagaacagatcctgaatacctttgccagaaccaggaacaatgcagaactggtacagactgtaaagaaacagaaatttttataaagtccttgcattttacggaaagctatgttatacttagcaagctgtttaaaatggaattcgtcaattgaatacgaataatattaaatatatagagaggtgaaaatcatgagagaaggaatccatccgaactactatcaggcaactgtaacctgcaactgcggaaacactttcgtaacaggttctactaaagaggacatccatgttgagatctgttccaaatgccatccgttctacacaggacagcagaaggctacacaggctcgtggacgtatcgataagttcaacaagaaatacggcctgaataagtaattattgcgaatacaggaaatgagaaggttgaggttgggaaatctcaacctttctttaactgaaaaatttttaatttgcacaggagagaatgaatgagatcatcgaatatcggcggacaggcggtcatggaaggcatcatgatgcgccacaaggacaaatattctatcgcagtgcgccgcccggaccaggagatcgagctgaaggtagaggattataaatgtatcttcggaaatcacgcatttctgaagaaaccgatcatccgtggtgtggtaagctttgtggattctcttgtggtaggcacgaaatgcctgatgtattctgcggagatcgcaggagacgaggaagatgaggaaacagccaggaagaatgagcagcttacagaagaagagcgttctgcaaagaaagccaaagaggataagcagttcaagtggcttctttacattacggtagctacctccatggtggtttctgtggctgcttttatgtttcttccgtatgtactggccagtctgatccgagggttaggtgcttcggaatttctggtcaccatagtggaagcctttgtgaagctggcactgtttatgggatatatgttcctgatctccagaatgaaggatatccagaggacatttatgtatcacggtgcggagcacaaatgtatcaactgtgtggagcatggtctgcctctgacggtagagaatgtgttaaagagctccaggcttcataagcgctgtggaacaagctttctgtttctggtcatgctggtaagtattatgctgcattttgtgtttgtggcggtgccgttttactgggtgagactgctgggaagacttctcatggtgccggtagttgcggggatttcctttgagatcatccagtgggcaggaagaacagacagtaaatttgcgaacattatgagtaaaccaggtcttgccatgcagaaattcaccacaaaggagcctacagcagatatggcagaggtagccatcaaagcagttgaggctgtttttgactggcgcgcctatctgaaagaggaatttgacctggacatcccatatgagacagaggagacagaaaatgcagactcttgagtcccttctgaaaaaaggtacaacaatactgaaagataacggattggaagaagccgggctggatgcctggctccttctggaatttaagaccggaaagaatcgggcatattattttgcgcatggagatgaaccggtgtctgatgagaccgcagcagagtatcttacgctgatcgacaggcgggcaggacatattcctgtacagcagctgactcatcaggctttttttatgggctatgagttttatgtaaatgaaaacgtgctgatcccgagacaggatacggagactctggtggaagaggcattgaaacaccttggggatgtggaaaaaccggagatcctggatatgtgtaccggctccggctgcatcctgcttagccttcttctggaacggcaggatgcctgtgggaccggtgtggatgtttcaccggaagcactggaagtggcaaaaaagaatgcaggtattctaaaggtggagaaccgggcggattttgtggaaagcgatctgttctcggcaccgtatttttgtgaaaaaggtggaaaagatagtgggaaatatgatatccttatttcaaacccgccttatatcgcaacagaagaaattgaaacactgatggaagaagtccgccttcatgatccgaggaaggcccttgacggaatggaagacgggctttatttttacagaaagatcacagcagaggccggaaggtacctgaaaccaggcggatggcttctgtatgagatcggctgcacccagggggaggcggtcagtacaatgatgaaagcagccggttttaccggggttcagatcgtaaaggatctgccgggtcttgaccgtgtggtgcttggacagaaacaggaggaaatacatgtttgataaactggatgatctgctggtacgttttgaagagcttctcaatgagctgggagaaccgggagtaaccgacgatccggcacattttcagaagctgatgaaggagcagagcgacctgcagccaatcgttgacgcatataaagaatataagaaaaacaaggaaaccatcgaggacagtctttccatgctggagagcgagaaggacgaagagatgcgtgaaatgctgaaggaagagctttccgatgcaaaaaagagagtggaggagctggagcatgagctgaagatccttcttcttccgaaggaccctaacgacagcaagaacgttatcgttgagatccgtggaggtgcaggcggtgatgaggcagcactttttgcagcagagatttatcgtatgtatgtgaaatacgcggagtcccgccgctggaaaaccgagatgctcagcctcaatgagaacggcatcggcggctttaaggaggttaccttcatgatcaagggtgagggtgcatattccagactgaaatacgaaagcggtgttcaccgtgtacagcgagtaccggagacagagtccggcggaaggatccatacctctacctgtacggtagcgatcatgccggaggcggaagaaattgatttccatctggatctcaatgagtgtaaattcgatgtgttccgtgcatccggaaacggtggtcagtgtgtcaacaccacagactccgcagtacgtcttactcatatccctacaggaatcgtgatttcctgccaggatgagaagtctcagcttaagaacaaggataaagcacttcgtgtgctccgttcccgtctgtatgagatggagcttgccaagcagcatgacgctgaggcagaggcaaggagaagccagatcggtacaggtgaccgctccgagaagatccgtacctacaacttccctcagggacgtgtaacagaccacaggatcaagcttacccttcatcgtcttgagaatatccttaacggagatctggatgagatcattgacagtctgatcgcagcagaccaggcagtaaagctgacaaagctgaatgaacaggagtaagcgctgattacagctacagagttcaaaaaattataataaatcaggaggaaacgaaaatgaaaaagacagcattggtgatcatggcagccggtatcggcagtcgttttggaaaaggaatcaagcagcttgcaccggtaggcccgaaaggcgagatcattatggactattccatccatgatgcacttgaggcaggattcaacaaggtcgtatttatcatccgcaaagaccttgaagatgaattcaaaaaagtgatcggagaccgtatctccaacattacagaagttgcttatgcattccaggagatcgacgatcttccgggcaattttacaaaaccggcagaccgtaccaagccatggggaaccggacacgctgtactggcagcaaagaaagtcctttccgagccattcgctgtgatcaatgcagatgactactacggaaaagaagcctacataaaggtgcatgactacctggtacaggatcatccgcaggatggcccgatgcacatctgcatggcaggtttccgccttggaaatacattaagtgacaacggaagcgtcacaagaggagtgtgccatattgaggacggcaagcttgtgggcgttacagagacacataacatcttcaagacagcagacggcgcagagacaagaaatgacgatggtacagcagaaacactggatacaaagaaccttgtttccatgaatatgtggggactgacaccggaatttatggagatccttgagaaaggcttcgttgagttccttggtgggatcaaagagggagacatcaaaaaagagtatcttcttcctgagcttatcgaccagctgatccattccggaaaagcagcggtagatgttcttgagacaaaggacgagtggttcggtgttacttatcaggaggataaggcatctgtacaggctgcattcaaaaaacttacagatgacggcgtttatccggaaggactgtatcagtaataaaggagaacattatgggtaaatatttcggaacagatggttttcgtggtgaagcaaatgtaaaacttacagcagatcatgcatttcgcgtgggacgttatctcggctggtattacggcagagatcacaaggcgaagatcgtgatcggcaaggatacaagaagaagcagttacatgtttgagtatgcccttgcggcaggacttaccgcatccggagcagatgcctatctgcttcatgtgaccacaactccaagtgtatcctatgtggtacgtacagaagattttgactgcggtatcatgatttccgcaagccataatccgtttaatgataatggaatcaaggtccttaatgagaacggacagaagatttccgcagatattgaagcacgtatcgaggcatatctggacggcgagatcgaggagcttccgctggcaaccggagaagatatcggctgtactgtggattttgcatccggaagaaaccgttatatcggacatctgatctctatcccatgccatgatttcaaaaatatcaaggttgggctggattgctccaacggaagctcatccgccattgccaagagcgtttttgacgcacttcgtgcaaaaacctatgtgatcaacaatgagccaaacggaaccaacatcaaccgtggctgcggttccacacacattgaagttctgagacagttcgtggtagataaaggcttggatatcggttttgcatacgatggtgatgcagaccgctgtatcgccgtagaccaccgcggaaacatcattgacggtgataagatcatgtatgtgtgcggcaaatatttaagagagaaaggccagctcaacggaaatacagttgtaacaaccgttatgtccaatcttggtctttacaagtctctggagcgtgaaggcatcgactatgagcagactgcagttggtgacaaatacgttgccgagaacatgatggaaaacaattacagtatcggtggtgaacagtccggacatatcatctttagccgctattccgctaccggtgacgggatcctgacttctcttatgatcatggaggcatgtgtagatcagaaggctacactctgcgaccttgcaaaggagatgaaggtttatccgcagcttctccggaatgtgcgtgtttccgacaagaaaacagcactggagaacgaaaaggtaaaagcagccattgaggcagccgcagaggcacttggtgatgacggacgtatcctggtacgtgagagtggtacagagccgctgatccgtgttatggtagaagcgggaacggatgatctctgccataaatatgtagatagtgttgttgatgtgatggaagccgaagggcttgttgtagaataaggaattccatgaaaaaaacaaagaccgtattgattcttgcagccgttacaggagccttgcttctgggcggctgtggcagtgaaaaaacaaaaatatatgaacaggccggaaaggatctttcccagggaagctacaagtatgccctggaggagtaccagagctcgatccagaacggagtgaagctggcacagtcctatcgcggggcaggtatcgcaagcctgcgtcttggcaaatatgaggatgcggtgaatagcttcacggaagctctgaactgcgataaagtaagcaaaagccttcgtaaggatatcctgtcctaccgggctactgcagagctgaagtctggaaaatacgaggatgccatggcagactgccagacacttggagaagatttttccatggatgcaggcagttatttcctcaccggaaaggttgcccttgccatggattcctacgaagaagccgcatctaacttcaaacaggcctatggagaagattccacctatgatatggcgatcgagatctatgaggcatatctggacaaggatatggaagcggacggaaccagatatctggaagctgctctttcttctgaggccaaggatgcccaggaccactgtgacagaggccgtgtctactactatatggaagactacagcaacgcaaaaaaagagcttctggaagcaaccaagaaggataatacggaagcattgcttcttctgggaatggtatatctggcccaggatgatgtggaaaatgcccaggcaatgtacaagcagtatatttccgcagtgggtgattccgccaagggctataatggtctggcactgtgcgatatccgaagcggagattatgattccgctcttgataacatcacaaaaggccttccgacagctaccacagacgagatgcagagtcttctgttcaatgagatcgtagcctatgaaaaaaagctggattttgctactgcactgaccaaggtccaggaatatattgagatgttccctgaagattccgctgcaaaaaaagagcgggctttcctgaaaaccagaacgtcttcggagggctgatatggaatattttgaggaaatacaggacagggttatcctgatcggtgtccaggcagatcggggggatgacatggaggaatccctggatgagcttggagaacttgcggctacggcaggtgcggcggttgcaggcaggatcattcagaatcgtgaggccgtacatccgggcacctatatcggaaaaggcaagatcgaagaggtaaaaggtcttctctatgccctggatgccaatggtgtgatctgtgacgatgagctttctcctgcccagatgaataatctggagcgggagctggagtgcaaggttatggatcgtaccctgctgatccttgacatttttgcgaagcgtgccgtcacaagtgaaggcaagatccaggtagagcttgcacagcttcgttaccggtctgcacgtcttgtgggactacgttcttctctttcgcgacttggaggaggaatcggaaccagaggccctggtgagaaaaagctggagacagaccgtcgtctgatccggaacaggatttccgcactgaagcaggagctttcccaggtggaaaagcacagagagctgatccgttccagaagagctgtgggaaatctgaagacagcagccattgtcggttataccaatgcaggaaagtcaacgcttctgaatacactgacaggcgcctcggtgctttcggaggataagctgtttgccacactggatccgactacccgtcttctgacgctggatgacggacagcagcttcttcttacggataccgtaggctttatccgcaagcttccgcacaatctggtggaagccttcaagagtactctggaggaagccaaatatgcggattatatcattcatgtggtagatgcatccaatcctcaggcggaggtgcagatgcatatcgtatatgaaaccctgaaagagcttggtgccctgggaaaaaagacgatcacactttttaacaagcaggaccgtgtttccggggagagctttcgggatctccgagcagaccatacgctgaagatttccgcacggacaggagaggggcttgaggaatttaagcagcttctttctgagatactggcagaaggacagatttatatggaacggctttttccttattcggaggccggtcagatccagctgatccgtgagtatggacagcttctttcggaagagtataccgaaggagggattgctgtaaaagcaagagttccgcgggaaatctatccgaaagtcacataatgttaaaatatctactcagtaccatatatagtaccgtgaacaaaacgggcactatatatggtgctttttatgttgacgcaaagaggcgtgtctgatacaataagcctacagcgctttgaacacagatcgtgaaacggagtgtgttcgtaagcaggcaagtgaggcggaatgaaatatccgcttataaataaatgcatgagggaggcattttcttatgtttcaggtagtaaaaagagacggtgaattagacgaatttaaaatggggaagatcaccgcggcaattgataaggcatttgatgccaaaggtaagaattacagttcggatatgatcgatcttctgggacttcgtgttacagcggattttcagaataagatcgagaacaaccggatttctgttgaggatatccaggacagtgtggagaacgtactgatccaggccggatattctgatgttgccaaggcgtatatcctttatcgtaagcagcgtgagaagatccgcaatatgaaatccaccatccttgactataaagagatcgtaaacagctatgtaaaggttgaggactggcgtgtaaaggagaactcaacggttacttattctgtaggaggtctgatcttaagcaactccggagcagttaccgcaaactactggctgtctgagatctacgacaacgagatcgcagatgcacacagaaatgcagatatccatatccatgatctgtccatgctgaccggttactgtgcaggctggtccctgaagcagctgatccgagagggacttggtggtattgagggtaagatcacttctgcacctgcaaagcatttaagtgtactctgcaaccagatggtgaatttcctgggtatcatgcagaacgagtgggcgggcgcacaggcattttcatcctttgatacttatctggcaccttttgtaaaggcagacaacctttcctatccggaggttaagaaatgcattgagtcctttgtatatggcgtaaatactccaagccgctggggcactcaggcaccattttccaacattacactggactggaccgttccagacgaccttgcagagcttccggctatcgtaggcggcaaggacatggatttcaaatacaaagactgtaagaaagaaatggatatggtcaataaggcatttatcgagaccatgatcgagggagatgccaacggacgtggattccagtatccgatcccgacctattccatcacaaaggaattcgactggtctgataccgagaacaaccgtcttctctttgagatgacttccaagtacggtactccgtatttttccaattatatcaacagtgatatgaagccaagcgacatccgcagcatgtgctgccgcctccgcttggatctccgtgagctccgcaaaaagagtggtggattctttggctccggtgagagcacaggctctgtaggcgttgttaccatcaatatgccgcgtatcgcatatctttccagaacgccgaaggaattttatcagcgcctggaccacatgatggatatctccgcaagatctcttcatatcaagagagatgtgatcagtaggcttctggatgagggactgtatccgtacacgaagagatatcttggaagctttgacaatcatttttccaccatcggtcttgtgggaatgaacgaagcgggcttaaatgcctgctggctgaaaaaagacatgacagatccggaaacccagaagtttacaaaagaggttctggagcatatgagaagccgtctttcagactatcaggagcagtatccgggagagcttttcaatctggaggcaacaccggcagagtccactgcataccgtcttgccaaacacgacagaagccgttatccggatatcaaaacagcaggaaaagagggcgacactccgtattacacaaacagctctcatctgccggttgattacactgcggatatttttgacgcactggatattcaggacgatctgcagactctgtatacttcaggaaccgtattccatgcattccttggggagaagcttccggactggaaggcagcggcagctctggtacgtaagattgcagagaattatcgcctgccctattacactatctcaccgacctattccgtatgtcaggagcacggctacatcagcggcgagcatttcacctgcccgaaatgtggaaagaaggctgaggtttacagccgtatcacaggatattaccgccctgtacagaactggaatgatggtaagacccaggagtacaagaaccgtaccctctatgatattacccattcccagctgaaaaaggtccataccagtgtgatgaccatgaagggtgacgaggtggagatccagcctgtggaatctcataaatatctttttacgactagcacttgtccgaactgccgtatggcaaagaaaatgctggaaggcgaagaactggagatcatcgatgccgagcagaatcccgagcttgtcaagcagtatgggatccgtcaggcgcctacacttgtgatcactgacgggtcacaggttaagaagtatgtaaatgcttctaacattcagaagtatgtagatgaagagctggattgagctcttcggggcaattgtaaattgtaattaaaatggctggacgtatgtctgtttggatgtgcgtctggtctttttttatataattttttattttttgtcgtttgtttttatgtttttttgggggattttcgttttgggggaaagatggttgacatttcatgtcgggatggtatacttatacatgggtttaatgattgaaagtgttacactttaatgtataaatatatgtatatcgctgtgataccgcgtggggaatccgggaattgtttcccggcggaaatttgcgagggggaaagcactcaaagttgcgaagcccgtttttccccctcgcgctccccctttccgggcacgctttttttaacgtacgttgtggtgtgtgatacgttttgtatagggcgatggattcgactgtatcgggaattcaaggctgagccgatggatgagggcggacgagaaagcggcccgcatagcgggcctgttccttgatatgagatttatattctgtgatatttaactgaatcaagtaagtcccctgcagagttgcgaaaagcaataagcagtgggtgaggacttgcttgtatcaggagaagtgcaggctctttctgataaactgcggagcagttattcagttatgagcaagtagcgaagcggattgcgaatatccgcttgacctgaatcaagaaagcatatcagttacttatatcggcacaacttgcaatatccaacatcgtagaatccatcgccccgtcagaaaagtaacacattccacaacgcagaacagcggcgtggccgggaggggaggagcgcgaggaggggacgatggccttcgcaactatgaatgcttcccctcctcgcacctgccgcatgcgaaatgctccccctggaaaggaaatccacagccgcatgcgaaatgctccccctggaaaggaaatccacagccgcatgcgaaatgccccctcctggaaaggaaatccacagccgcatgcgaaatgcccctcctggaaaggaaatccacagccgcatgcgaaatgcccctcctggaaaggaaatccacagctgcatgcgaaatgcccctcctggaaaggaaaaaccgcatgcgaaatgctccctcccggaaagggattcacttccaattaatttcatgctagaataaaaaaagaataataagaaaaacaataacaagaaaaaataatcaggaaaagaggaaatcacatcatggtaaaacagaatatcgtcttcgtagaaaacactccgggaagtcttcagaaagtcacaaagatccttgctgagaatcagatcgacatctacggcttcggctgtttcgatgcaccggagttcgcaaacttccgtatggtatgtgatgatccggaaaaagcagaccagatcatggcagaaaacggatatatgacccgtattactcaggctatcctggtagatcttcaggatgagatcggcggccttgacaagcttctcagcgtcatgggcgacagcaacgtaaaccttcattacatttacacctttttccacagaggtttgaaagttccggtagcgatcatgcactgtgaggatctccttgttgcagagagcgttcttcgtaacaatggattcaaggttctggatcgtctggtagatccggatggagttgaggaagcgtaaggatatattccggaaaaaatgacaaacaggaatgacgtattcacgtattgaagttttgacagggcaatgctacaataaaagagcgtgtcaggaaacaggaaaaacgtttccgggcacgctcttatttacatgtacaacgagctgtggcgagattctgatgagtgctgtacagatcggagaagtaggcacagctacgtttataacggaatgtacatacaatggaggaaatcgatgaaaagagaaagtttcagaaaaggtatgaaagatggagttcccatcgctcttggatattttgcggtatcctttacctttggcatgatggctgttgccggcggcttgagtatctggcaggcagttctgatctccctgaccaacctgacatcggccggtcagtttgcgggactggacattatttttgcgggaggctccatgtgggagatggcaatgacccagctgatcatcaacctgagatattgcctgatgtcattttccctgtcccagaaattccggcgtgaggagtccggcatcctgaaatacatcgctgcttttggtatcaccgatgaaattttcgggatcagtgcggcccaggagggaaaggtcagcgtattttataattacggagccatgtgcgtggcaattcccggatggactcttggaactctggcaggaggaatctccggaagccttttgccggattttatgcttagtgcgttgagcgttgccatttacggaatgttcctggccatcatcatcccgccgtccaaaaagagcagaccggttcttggggtggttgtggcatccatggcagtcagtactgtttttgcggtgacaccggtgttaaaacaggtatcatccggatttatgatcattatcacaacacttctggtagcaggcctggcagcttatttctgcccgctggaagagaaaggggaagccgttcatgagtcataatgtatgtctttatatcctggtgatggcaattgtcacctatctcatccgtatgctgccccttgctcttgcaaaaaacgagatcagaagcccgtttatcaagtcctttctgtattatgtgccatatgcctgtctggcagccatgaccttcccggccatcctgaaggccacagacagcatcatctccggtgcagcaggtttcctggtagcacttattgctgcatataaggaaaaaagcctgatcacagtagccctgctggcatgtgcggcggtgtttatcgtggagagggttctggtatttatttgaagaggggatatgcggaaatataatacgcaggagggagcttcgaaaagctccctcctttttcatttattcacctaaaaatccaagatcgatctctccgtcaaacaccgtagttgcaggtcctgtcatatatacaaggttttcatctctttcccaggagatgtttaagtctccgccaagaagctgtacagtaaccggtttgttgccgtcaaccttgtcattgaggatggaagctaccgtaactgcgcaggcgcctgtgccgcaggcaagggtttctccggagccacgctcccatacacgcatctttacggtgtggcggtcgattacctgaacaaactcagtgttgactctgtccgggaagcatacgtgattttcaaaggacgggccgatcttttccaggtcaaggctgtccacatcgtctacgtagatgatggcatgaggattacccatggaaactgcggtcatgtgatattcttttccgtcgacggtgatgggagcgtcgatcacctgttcggtttcggcaaccaccgggatctcttttgcagtgaggatcggggagcccatgttgacttttaccatggaggccttgccgtcgcggatagtaagatctacatatttgataccgcttcttgtggcgatgcttaaagaagttttgtccacaatgccgtggtcgtagacatatttggcaacgcagcggataccgtttccgcacatggcgccctgagagccgtccaggttgtacatatccatctcgcagtctgcaatctcagacgggcggatcaggatcagaccatcggaaccaatgccaaaatgacggtcgctgacaaattttgccactgcggccggatccttaacagtctcctcaaaacagtttacatatacataatcgtttccaatgccgtgcattttcgtgaatttcataatagtagcctcctcttgtttctgaatattatacttgttttttctgttggagcacaagacccacatgaaaaaaacacgcaggttttttccatttgttgcctttaatagtatagtatattggacaattgttatcgaaaagtgaattttccctgtgaaattcccataaattacaggtggattttcggatttatgggttttatatgcttgcattttgtcagaaacatggtatcataaaacaaagtaatatgcatggagatgtataattatgctgtacattacggattgtgctgttacaagcagagagacagttaacgtaaagtacatagaattcaggaggaagaaaaaatgaagagaaaatttatggcacttgcacttgcagcagctatgacagtttctatgacatccgctgtttttgcagcagatgagatcaagagcgcagatgatctggagggtaagaagatcggtgttcagcttggaacaaccggtgatgcaaacgctacagaggttaaagacgcaacagtagagagatacaacaaaggtaatgacgctgttatggctctgaaacagggtaagattgactgcgtagtgatcgacagcgagcctgccaagaaatttgttgagaaaaacgatgatcttgagatcgttgaggatatttttgataaagaggagtatgcaatctgtctttccaaagataatgcagaccttaccaaagagtttaacgaggctctgaaggctctgaaggatgacggaactctggattccatcagagataactatatcggtgatgatgcaggtaagacaccatatgagactcctaaggatgcagatcactccaagggaactcttaccatggcaacaaacgcaaccttccagccatacgaatactatgacggagataagatcgtaggtattgatgttgatatcgctcaggctgtctgcgacaagcttggatatgagctgaaggtcgaggatatggagtttgatgcgatcgtaaattctgttaaatccggaaaagctgattttggtgctgcaggaatgacagtaacagaggatcgtaaaaagagcgttgatttcactgatccgtacacaactgcagagcaggttgttattgtaaagaaataattttgcacagagaaatcagaggattctgaacggataagctgagaaacagatattcgttgcagggttcagtagcgaatgatcaggttccggatatccgggtatgttttccggatttcggaacctgtagttttggaaagggtggaaattttgagtcttattgaacagtttcagtttaactttctggacgacaatcgctggcagttcattttgtccggtctgaaaaataccatcatcattactttttttgctgtacttcttggtatttttctgggatttgtcattgctattgtccgttctacacatgataagacaggtaagcttaagatccttaatgtgatctgtcgtgtttatctgactgtgatccgcggtacaccaacgatggtacagctgctgatcgtattttatgttatttttgcaaccatagatccgggtaagatagttgttgccattatcgcctttggtatgaactctgctgcatacgtggctgagatcgtccgttccggcatcatgtctattgatcagggacagtttgaggcaggacggagcctgggtcttaactatacacagactatgatcaagatcattcttccgcaggcggtcaagaatatcctgccggcccttggaaacgagctgatcgtacttttgaaggagacatccatcagtggttatatcggacttatggatctgacccgtggcggagacattatccgaagccagacctacagtgcactgttcccgctgctggtagtagctgcgatctatcttgtgatcgtttgttttcttacctatctggtaggaagacttgaaaggaggctgagaaccaatgagcgtaagtaatgaagtgcttctggatgtacagggacttgaaaaggcctatggcggcaatcaggttctcaacgggatcaccacacagatccgcagaggtgaagtagtagccattatcggaccatccggctgtggtaaatctacattcctccgttccctgaatctccttgaggagccgaccgggggaaaaatcctctttgagggaaccgacatcacagattccaaggtggatatcaaccgtcatcgtcagaagatcggaatggtattccagcagttcaatctgtttcctcataagacagtaaaagagaacatcatgctcgcaccggtgacactgaatcttatgagtaaggaagaggctgaaaaaacggcactggagcttctggagcgagtaggtcttccggataaggcagattcctatccggacatgctttccggcggtcagaagcagcgtatcgccattgcaagatctcttgccatgaacccggacgtgatgctgtttgatgagcctacatctgctcttgatccggagatggtaggagaggtcctggaactgatgcaggagcttgcaagatccggcatgaccatggttgtggtaactcatgagatgggctttgcccgcgaggtggcaaccagagtcctcttcattgatgaaggaaagatccaggaagaaaattctcctaaggaattctttgcaaatccaaagaataagagacttcgagagtttctttcaaagacattataaatataagaatattaaaaacggatgctttatcctcctgtggaaatgctgcaggagataaagcatccgttttttgtagtgctagttgcaaaaaatcctttttctttccgctgctcagtggatttcttcaccggcagttttctgtgcggcttttatttcgttgtaacagtatttgatgatagattttctggttatgatcccgatgaaggagccctggtcatctaccaccggtacgaagttctgattaatggcgcgatccaggagatcttccatattggaatctgcatggactggtttataggtggcgcgacgtgggatcgccatgatcgggattccttctgtttccttgatgtcgtgaatatctgcacggcgcatgccccagaggagatctccctctgagatagtgccaagatatttgccgtccatggtgaggataggaatgcaggagtacttgcggtgctccattttttcgagggtctggcgaagagtttcatcctcaaagatgtaggctacttcgcttttgggaatcagaaaaaacagaatgttcacgttattacctcatttccgcaaaaattataaataaatctgtaggctgttttagagaagctgaagtccgtgtgtctctgcagcatctgtgatctccttcggccagagagagacatgtacttctccgatgtgtgctttacgaaggaagaacatacagatcctagactgtccgataccaccaccgatggtgtacggaagctctttgttcaggattgctttctggaatggaagctctcttcggtcatcacagcctgcttcggtgagctggcggtcaagtgcgtcctcgtcaacacggattcccattgaggaaagctcaagggcaatgtcaagtaccggatagtatacgaggatatcaccgttcagttcccagtcatcatagtccggggcacgtccgtcgtggcgctcgccgttggtgagggttttgccgactttcataaggaagacagcacccttttcacgggtgatccgatattcacgttccttcggtgtgcagtccggatacatgtcaagaagctcctgagttgtgataaaaaagatatcctttggaaggatctcctcgatgtagtcatactgtacagccatgtatttctcagttttacgaaggacactgtaaatggtgcgtacggtttccttgagagtttcaatggaacgctcttctttggagatgatcttttcccagtcccactggtctacgtaaacagagtggatattgtccagatcttcatctcggcggatggctaccatatctgtgtaaagaccttctccgtgagaaaatccgtattttttcagtgcgtagcgtttccatttggcaagggagtgtacgatttcggcgttgcttccttcgatagccttgatatcaaagcttaccggacgctctacaccattaaggttgtcgttaaggccggattccggtgctacaaatgttggagcggatactcgaagaaggttcagcttctgtgagagtgtctgctggaagaaatcttttactgttttgatcgcaatctgtgtatcatggaggttcaggtctgcatgataggttgcggggattgtgattgtattcattatcggctcctcctgatgatttttaggcttattgctctgtggggtattataacagaaaatgggtggagtggcaatataatgagaggggaagtcttttggggtatcgtagaaaaatactgggtattaaatgcctggtgtgatatactgaaaaaagaatgcttatgtttacgatggaaatataaatatccgttttaacggatagaatggagggagcttatggcaggtcaaaggtgtcaggtttgtgggggtaaggttgtaaatggcaggtgttcattatgtgggatgccttacagaaatgatgaggtgttatatcatctgaatgagccccgggagatacattataaacatgcttccgccaaagtgcgggatatgatgcggcagtatggacaggatgctgatcaaacaacacaacataacggaaacgtaaaccggaatacgaacgcaaaccggaatacgaatgcaagccgcaataccgatttgaatcggaatctaaccggaagccggaatacaggtgcagcagccggacgtaagactgcagcggcagttaataccaggaataaaacaacggtgggcagaaatcgtgcagaagttttagatcagggaaaaaaacagcaaaaaaaagatcagaaaagcagcggggcaggctggatcatatggtttatagtgacactggccatgctgcttccgaaattatgggattttattgcagactggatcggaacgaatttgtgagaatatttctgcagtgagatcaggcagtgctaagtgtctgtattttcgtgtatacagaaatatcccttttcttttctcctcagctgtgttatactcatgcctagcacaacatatagatgaaaaacaatatatagaggatataggtactatatatagtatttgcatagcgacttatatatagcacagggagggatgagcaatgttatatgtgatcaagaaagacgggacaagagaggagtttaatccgcagaagatcgtggctgccgtgaacaaatccgcagagcgtattctttatactttttcagacgaggagaaggattttatctgccgttttgcccaggagcatgcggattcccttggaaagaatgagatcgagatccaggagatgcacaacatcgtggagggggctctggagcgtgtgaatccggcagttgccaagagctaccgtgattatcggaattacaagctggattttatccatatgatggatgatgtctataccaagagtcaggcgatccgttatatcggtgataaaagtaatgccaatacagacagcgcccttgttgccacgaaacgaagcctgatctttaatgagctgaacaaggaactctatcggaagttttttatgaaccgtaatgagcttcaggcatgtaaggacggctacatttatattcatgaccagtctgcacgtctggataccatgaattgctgtctgttcgatgtggcagctgttttaagtggcggttttgagatgggtaatgtctggtataacgagccgaagactctggatacagcctttgatgttatgggggatatcattctcagtacagcagcacagcagtatggtggctttacagtgccggaggttgataagatcctggcaccgtatgcaaagaagagctatgataaatatatttccgaatttatgaaatactcggacgagagctggagtggccgtgaggagagagctattgagtatgctcttgataaggtccgcagggattatgaccagggctggcagggaattgagtacaagctgaataccgtcggttcttccagaggtgattatccgtttgttacggtgacacttggtctcggaaccgagcagtttgagaagatgtgtacgatttcccttcttgaggtccatcagggaggacagggtaaggccggacacaagaaaccggtacttttcccgaagatcgtattcctttatgacaaagagatccatggtccaggaaagtgctgtgaggatatttttgaggctggtgtggagtgttcctccaaaaccatgtatccggactggctgtctatgtccggcgcaggctatatttccagtatgtataggaaatacaagaaggtcatcagcccgatgggatgccgtgctttcttaagtccgtggtatgagcgtggcggtatggagccggcggatgagaatgatacgcctgtttttgtgggacgttttaacattggtgcggtaagtcttcatcttccgatgatccttgcaaaggccagagcggagagcagagatttctatgaggttctggatttctatctggaaatgatccgtaacctgcatatccgcacttacgaatatctgggacagatgcgtgcatccaccaacccgcttgcatactgtgaaggcggtttctacggcggacatctgaaaccgaatgaaaagattggaaagatcctgaagcctatgacagcttccttcggtatcacagcgttaaatgagcttcaggaactttacaatggcaaatccattgccgaggatggggcgtttgctctggaggtcctgaaatatatcaatgataaggtaaatcagtacaagaaggaagatggttatctttatgcgatctacggaacaccggcagagagtctttgtggcctgcaggtagagcagttccgtaagatgtatggaatcattgagggcgtttctgacagaccatatgtgagcaacagcttccactgccatgtaacagaggatgtaactccgatcgagaaacaggatctggagggacgtttctgggaactctgcaatggaggtaagattcagtatgtacgttatccgatcggctacaataaggaagctatccgtacactgatccgcagagccatggatctgggatattatgagggagtgaacctttctcttgcatactgtgacgattgtggtcatgaggaactggagatggatgtatgccctgtctgcggttccagaaatctgaccaagatcgaccgtatgaacggatatctttcctacagccgtgtccatggagatactcgcctgaatgaggcgaagatggctgagatcgctgagcgaaaatctatgtaaatgctggctgtccgatcaactgtggaacagtgatcggatgtggagccagacagtataaaaatatcccgcagagctgccggtaagaccagcagccgtctgcgggatatttttatgtaaagtgaagttttatagttcactttgtattctgagtccgtaaaatgatcatttaatgatagttccggtcttctcacggtagccgtcttttgcatgggccatgtctgtgatgatggtacggcgtccggttcccttctccacgaaggaaacacctgcttcgatcttaggaagcatggagcctgccgcaaactgtttgccggcaatatatttcttggcatcttctgtggaaatagtatccagataagattcgtgatccgtattatggtcaaggcttactttctcgacgcttgtaaggatcatcagagtgtcagcgttcagttcttctgcaagaagtcctgctgccaggtctttctcgatgatggcgctggcaccattcagctgagttccctgctcaagaaccgggattccgccaccgcctgcggcaatgacgatctgctctgctgcagagaggacctttacggtttcaatctctacgatcttctgtggcttcggtgctgcaaggatacgtctgtactggccctcgcccacctttgtgacaaagtttcctttttcttcttcagcctcggcctcttctgcgttaagaacacgtccaatgatcttctccggctctgcaaatgcttcatcgtatggatcgatgacaacctgtgtcagaactgtactgaccggtttgtagatccctctggagataagctcagcacggatggcgttctgaaggtcatagccgatataaccctggctcatggcggaacatacggacattggtgcaaatgtataatcaggatgtgccttaccgaattcattcattgcggtgtggatcatccctacctgcggaccgttgctgtgggagatcactacgcgggttccctcctctaccagatctgcgattaccttcgctgcgagttttgtagctgttttttgctctggaagtgtggtgccaagtgcccggtggcctaatgcaactactacggttttttcgctcataggaaatacctcgtttctcttaaaaattggaatgaaatcagttactgtattcagtaacgagtacatcgaaaacgatgcacgaatattatattttattataaaagacctatgtgggaaatgcaatagaaaatcgagtgttttccgagacaggaaaaaccgcctgatccagtcagacggtttgattcctactattttttgaggggggagatagagagtggtttttcatctatccaacacctattatatagagaaaatatgtttaaaatatgtcgttaatctaaaagaaatggaaaatttataaagaaagtttaaacaaactttataatttttatatccggttgcgcatggtctgaaaatgtgatacattgaaaaagtcttgatcctgcattctgcgggatctgttcacgcatcgtttcgatgcagaaatccattttattttatcgaaaaaaatattgatcatgcaccatttgccggggagggatgcctttgtctgtggaaaagtaagcttctgtaaaaaaaacatgtgtataagaaatgccagatcaggcagaaatgaggaagagccatgaaaaacagaatatggaaacagatgaagaaagccggaattgtgacagtgctggcaggagccatgctgggaggaacaatagaaccgaagctgactctgggagcagattttttgccgggacaggcaccgtttatcgatcagagtgtgttctggaaagacatagaatccggacaggcggagcttggaatccggattcgcggcctgaatgaatggctgtccgggagaaggttttcggaggataaggagaaaaatgagaagtgggacgatgaacttcagaagattgaagatccatcggtggagcaggaaaaggagtcagaacaggagctaccagaggatgacttgcagcaggaagaagagccagagcaggagctgccggaggatgattggcagcaggaaaaggagccagagcaggagctgccggaggatgacttgcagcaggaagaagagccagaacaggaacttccaaaggatgaggatgacttgcagcaggaagagaaggcagaacaggaattgccggtggataaggttgtggaaggaatcggaatagaaatggaggaaggatatgagcacgtggagcagctggcatccggggaaacagtacagccggaggatgaagagcaggagaaaacgggtccgctcacaccggaaggaacgtcgaccggaggggaaaatgtagggaatgaagaggaaggtgagtctgaggagacgcaaaagctgacgctggtcacgtatatttcggagtattttgttccggaaacggattctgtcccgaaaaatatggctgcacagcagatttctgtaaggagccagagcggtgaagctacagagatcacaaagctggaaagcgtgctgaacgtggagcagaacgggcaggatgagatttttttccgtatcccgctgatcctgcggcaggaataccgttttccggcagagaaaagcagttatcctgtgactcaggagggaccgcttcagaaggactgtaccggtgcgggaacctttctcatgacagaagaaaacggggaagagctggtgatcgcagagggaatctcgcctatgctggacgtggaggctgctgaggctgatatggaattgtcggtaattggacagaatgaaaaaatgaaagcagggcagaccatccgttatcaggtggagatagccaataccggaaagctggatcttgcagatatccgtctgaccagcagcctttcctgccctaagatccggcagatgtgggaagatgcagaaggccttctaacagaagggaccgtggcggaatttgcggaattaaaagccggagagagcaggagcttttatgtacaggcgccccttctggatgaacaggaaaaagatctggagcaccaggtggaagcagaggccagggtgaaggacagaccggatgaggtgatccggaagaacgcctccactataaatggtctggaggcactgaaggcggatctttctgtaaagaaaactgcagacaaagaaaccgctacaccgggtgagactgtgacctatcagatctgtatcgtgaataccggtgaaaaaacgcttcattcggttgtgggaacggagcgctttcaggcagcagggatccatgcacagtttctggagcaggaaggtgtaacgctcaacagcagccgtacaaaggcaatgatccaacagatcccgccgggagaggcagtttctcttcaggctgtggtgaagatcccgggaaaaacagcggatcagaagctttttaaccaggtgacggtcacaagccaggaaaccggagagcgattgatggaggcctccgcttctgtcatggtaaaaggagaggtggctattacgccggaagaagggctgcctttgcagggagatgaccagggtccggcttccggtcagatacagatggcaagaactgcgtccacacatccgaagaccggagatgataccaggagggatttgtggacgcttctggcagtgacagctttggtgactgtgctgggcggcatctggctccggaaaaaatatgcggatatttatggaaaaagctgatgttactgagaacggagtgaacagtaacaagctgatattttacaaggcggccgtacctcaaagaaacgttgaaaacaggggggaggtgtgctattctatatggtatgtacagaaaataagaacagtatatttcccgcctccggtgtgctgcccgtcagaccggaaaaagggaagatggaggagaaaaatgaatcttttatccttattggaacatcttgaatacaaatgccttcagggaagtacagagcaggaggtttcttctgttgtatatgattcccgcaaagtagaagaagggagcctttttatctgcatcagaggtgcggtcgtggatggacataaatttatacctgatgttgtggcaaagggtgcgaagacactcatcgtggaagaagcggtggaggcaccggaggatgtgacagtgatccaggtagaggatacccgttacgccatggcctttatttcagcagcatggttcggacatccggcagaaaagctcaaaaccatcggtatcaccggaaccaaaggaaaaacaactacaacctatatggtgaaatcgatccttgagaatgccggatataaggttggtctgatcggaaccatcgaggctgttatcggggagaagcatatcccggcagccaacacgacaccggaatcctatatggtacagaaatattttcatgatatggtagaagcaggctgcgatgcggtcgttatggaggtttcctcacagggactgatgcttcacagaacccagggatttgtgtttgattttggaattttcacaaatattgaaccagatcatatcggaccgaatgagcacaaggactttgatgattatctgcactgcaaatccatgcttctcagacagtgtaaggttggtatcgtaaatcgtgacgatgaacactttgaccgcattatcgaaggccacacctgtaaacttgaaacctatggattttccgaaaaagcagatctccgtgcagagggcgccagactcgttggaagaaagggctatctgggaatttcctatcatgttaagggacttatggattttcctgtggagatcgatattccaggtaagttcagcatttacaattctctgactgccattgccatctgccgccattttaaggtatccgaggagaatatcatcaaagctctgaaggtggccagggtcaaaggccgtattgagatgatcaaggtatctgacgaattcacactgatgatcgattacgcacataatgccatggcgctggagagccttctcggaacactgaaggaatatgatccgcacagactggtatgcctgtttggctgtggcggaaaccgttccaagctgcgccgttatgaaatgggtgaggtttcaggaaagatggcagatctgaccatcattacttcagataatccgcgagatgaggatccacaggccatcatcgatgatatcaagatcggaatggcaaaaacagatggaaaatatgtagagatcccggatcgtaaagaggcgatcgcctacgcgatccatcacggtgagccgggagatatcatcgtccttgccggaaagggccatgaggattatcaggagatcaagggtaagaaatatcccatggatgagcgtgtactgatccgggagatcctggaagaagatcagaaagcgtaaatggatgatctatgcagatgtgatcattgatatttctcatgaaaagctggaccgggattttcagtatcgtgtacctgaggagctggtgcaggcaataaaacccggagttgtggtcacagtgcccttcggaaagggaaatacccttcggaaaggctatgtgaccggaatctccggaacggcaaaatatgatgcgtcaaagctcaaggagatccggggagtgtccacagacagtgagacaacagaatcccggctgatcgcacttgcggcctggatgaaggagacctatggctccaccatgatccaggcactgaaaacagttctgcctgtaaaagacaaggtccgtgcaaaagagaaaagactgatcctttttacagggaaaaaggaagaggggcaggcacttcttggcaagctggaaggcagccgctttaaagcacgtgagcggttccttcgggcaatcctggaggccgggagcctggattatacctatgcctccaaagagcttggagccggcacttccgttcttgatttttttgagaaaaaaggtctgataactattgaaagtcaggaaatgtatcgcattcccgaggggctcggcctggtgaaggagaacatggaactgagtctgaaccaggaacagcttttggcggcagagcagatttttcgggaatggcaggagccggacccaaggcctgcacttcttttcggagtgaccggaagcggaaagacccaggtttatatgcgcctgatccagaaggtactggaggagggaaaacaggcgatcgtgctgatccctgagatcgcgcttacttatcagacagtcaggcgcttttatgccatgttcggagataaggtttcggttctgaactccagactttcccagggagaacgttatgatcagttcaaaagagcaaaacgtggtgagatccaggtgatggtaggacccagatccgcactgttcacaccgttttcagatctgggactgatcgttatcgacgaagagcatgaacccacctacaaaagtgagaatacgccaaggtaccatgcacgtgagactgccattgagagggcacgaatggaacatgcccgtgtggtcatgggatcagccactccgtcattggaagcctacagtcatgcctgtgacggagaatatcttctggtaaagttaaacgcacgttatgaggaaaggcctcttccacaggtatcaatcgtggatcttcgggaagaattaaagaaagggaaccgctcggtactgagtctggagctgaagagggatctggagcaggtccttgaaagaagagaacaggccatgctgtttctgaaccggagaggatatgcgggctttgtttcctgcagagcctgcggtcacgttatgaaatgtccccactgtgatgtatctctaagtgaacacaatggcaatcgtctgatctgtcattattgcggctatgagactgtgaaaccggaaatctgtccgtcctgtggttcaccgcacattggcggatttaaggcaggaacccagcagatcgagaaggtcattgaaaaagaattcccgaaagccagggtacttcgaatggattttgataccacaaggaccaaggacagctatgagaagatcctggcttcttttgcaaagcatgaggcagatattctggtggggacccagatgatcgtcaagggacatgattttccgaatgtgactctggtaggagtgattgcagcagatctttcgctgaatatggatgactatcactgcggggagcgtacattccagcttctgactcaggcagttggacgttccggcagagggaatcggccggggcaggcggtgatccagacatatcagccggagcattacagtatccaggctgcggctattcaagattataagaaattttataaagaagaaatggggtatcggatgcttctggactatccgccggcagcccatatgatgactgtttttggcgcctgccaggatgaagaacttctgaaaaatgccatgtattatatagaagtttttatccgcagggtaagtccgaaggaagagcttcacatgatcggacctgcagctgcatcggtaggtaaggtaaaggatgtttatcgtcaggtgatccatctgaagcacagggatatctgctttctcacagcagtcagagagaagctggagaaatatatagagataaattccggattccggaaaatatacattcaatttgatatgaattaaaggagaagaaaaatggcacttagaacaatccgtgtacagggggattctgtactgacaaaaaaatcccggacagtagacaaaatgacaccgaggatcggggaactgatcacagatatgctggataccatgtatgatgcaatgggtgttggcctcgctgcaccacaggtaggaattctgaaacgtatcgttgtcatcgatgtaggtgagggcccgatcgtgctgatcaatccggagatccttgagacaagcggcgagcagaccggtgacgagggatgcctgagcgttccgggaatggcaggacaggtaacacgtccgaactatgtgaaggtaaaagcacttgatgtaaatatgaacgaacagatctacgagggagagggccttctggcaagagcgttctgtcatgagatcgaccatctggatggaaaaatgtatacagaacttgtggagggagaacttcacaaggtaacttatgatgaagaagactaaaggcggtatactatgaagattatttatatgggaactccggactttgcggtggcgcctcttgtagcactggcagagaacggatatgaagtggaggctgtgatcacacagccggacaaaccgaagggcagaggcaaaactatgatgcctactcctgtaaaagaagaagcactgaaacacgggatcccggtactgcagccggtgaaggtaagagatcctgaatttgtggaagaactgaaaaatcttgcaccggacatcatcattgttgcggcattcgggcagatcattccaaagagcatcctggatatgccgagattcggatgtatcaatatccatgcgtctctgcttcctaaatatcgtggagctgcaccgatccagcaggcggtgatcgacggtgaaaaagaatccggcgttactattatgcagatgggaaccggtctggataccggtgatatgatttccaggatcgtggttccgcttgccaaagatgagacaggtggaagcttgtttgataagctcgcacaggcaggtgcagagcttctggtacagactttaccgtccatttttgacggaactgcaacccgcgagaaacagccggaggagagtccaacaccatatgctgccatgatctccaaaaaaatggggcttctggatttcagcaaaaatgcggaagaactggagcgtctggtaagaggccttgatccatggccaagcgcttttacctttatcaatggaaaaacattgaaggtctggaagagctctgttctggaaaaacaggcacaggaagcaccgggaactgtgatagccgctgacaaaggaggaatccaggtagcatgcggccagaaggtactcgtgctccatgaagtgcagctggaaggcaaaaaacgcatggaagcggatgcgttccttcggggatatcagttgaaaccaggagacatgttcagagattccagggagtgatgagttatgtacggatatggttattacggatggggaatggaccccacgattcttttgctcgtgatcggaatgcttctttctcttgcggcatccgcgaagctgcgcagtacctttgcagtctataaaaaggtccggagtcattcaggtatcaccggtgcggaagctgcacagaggatcctgagagcggctgggatcacagacgtacaggtggttccgatccgcggaagtcttacggatcactatgatccgagaacgaaaacggtttccctttcagaagatatttatggaagaaattctctggcggctgtgggggtggcagcacatgaatgtggccatgcgatccaggatgcgatcaattatgcaccactgaatatccgttcagccattgtacctgccgcaaatattggttcccagctttcatggccgctgtttatcgcaggactgatcttttccattgatccgctggtaactctgggaattgttttgttttcactggcagtactgtttcagctggtgacacttccggttgagatcaatgcgtcttccagagcgcttaaaatgctggaaagtacaggtatcttaggtgcagatgaaaaaaagggtgcaagaaaagtacttacagcggcagcgcttacctatgtagcagctctggcggcatctattctgcagcttctgagactgattatccttgcaggaggtagagatcgtgattagcagcggagtaaataccagagaactgatccttgagatcctgttacagatcgaggaggagggtgagcacagccatattgcgatccggaatgcgctttccaaatatcagtttcttccgaaacaggaacgtagctttattacaagagtatgtgagggaaccctggaatacaggatctatattgattatgtcatcgattctttttccaaggtttctgtaaacaagatgaaaccgcagatccgtgagatcctgagaagtgcggtatatcagctgaaatttatggacagtgttccggacagtgcagtatgcaatgaagcggtaaagctggcacagcgaaaaggcttttataatctaaagccctttgtcaacggggtgctccgtacgatcgcaagagagatcggtgatctggagcttccttccagggaagaaaacgaagtccgttatctttctgtgaaatattccatgccggaatatctggtagaaaaatggaaagcagcctacggagtgaagactacggagaagatcctggaggattttctgacagaaagaccgatcacagtacggtgccgtactcataaggcgtctctgagagagatcgtcaccagtttgaagtctcagggagtgacagtagaacaggctccttatcttccctatgcactgaagatttctgattacaatcatattttgacacttgagaccttccttcagggaaagatcctggtgcaggatgtaagctctatgcttgtagcggaagctgcaagtccgaaaaaaggcgaccatatcatcgacatgtgcgctgcaccaggtgggaaaagcatccatgcggcagacaaaatgggggattacggaaatgtggatgccagagatgtaagtcagtataaggcagatcttatcaaagaaaacatccacaggaccggagtgatcaatgtggaagccagagttcaggatgcaacggtatatgatccggattccgaacaggctgcggatattgtgatcgcggatgtaccgtgctccggttatggagttatcggcaagaaaccggaaatcaaataccgggcaactccgcagaaacaggaagagatcgtaatgctccagagaatgatcctggataaggctgcaaagtatgtgaaaccggatggaacgctgatcttcagcacatgtaccattgcccgggaagaaaacgaagaaaatgtattatggtttttaaagaattatccgtaccggctggaaagcctggatccgtatattccggaggaactgcactgtaaatccacgaagcttggctatctgcagcttctgccgggaatacataagacagatggattctttattgccagattcagaaggaaataacagaaaatgacagatgtaaaatccatgaccatggaggaattgaaggaattcatgacaaagatcggtgaaaagcctttccgggcgaaacagatctatgcatggcttcaccagcagctggttacctcctgggatgaaatgacaaatctttccaaaagcctcagggaaaagctttcggcttatccgatcacagcactgacccaggcagatgtaaggatctcaaaaattgacggaaccagaaaatatctgttccagctggaagatggaaatgtgatcgagagtgttctcatgcggtatcaccacggaaattctgtgtgcatttcttctcaggtgggctgccgtatgggatgcagattctgtgcatctaccatcggaggactgaccagatgcctgaaaccgtccgagatgctggatcagatttaccgtatccaggcagataccggtgaacgtgtggccaatgtagttgtgatgggaaccggtgagccgatggataattatgacaatcttgtccgttttgtccggatccttaccgacgaaaacggtcttgggatcagtcagagaaatgtgacggtttctacctgtgggatcgtgccgaagatgtatgatctggctgaagaaaagcttcagatcactctggcactttcccttcatgctccaaatgatgaaaaacgacaggaactgatgccgatcgcgaataagtattccatggatgaggttctggatgcctgcagaaattattttgacaaaacaggccgaaggatcacctttgagtacagtcttgtagctggcgtcaacgacagtgaagaagatgcgagacagctggcaggccgtataaaaggcatcaattgccatgtaaatctgattccggtcaatcccatcaaggaacgctcctatgtgaggtctactcgacaggctgtggagaatttcaaaataaaacttgaaaaatacggaattaatgttactattagaagggaaatgggcagcgatatcgacggtgcctgtggacagctaagaaaaagttacatggaaaaaacagaaagcgagaagtgacatgaggatatactcagctactgatgtagggcagaagcggaagatgaatcaggattacgtgtttgcatctgaaggtccggttggaaatctgcctaatcttttcacagtcgcggacggaatgggcggacataacgccggtgactatgcatcctcacatgcagtacggatccttgtggatgaaatccgtgaagatgcggattacaatcctgtgaaggttattcgtcatgcgattgaagctgcgaatacggagatcagaaaccgtgcgcaggaagacgaaaacctccggggcatgggaaccactatggtggtggcgactattgtagatcagtatgcctatgtagccaatgtgggtgacagccgtttatatgtgatccaggacgggatccgtcaggtcaccagagatcattccctggtacaggaaatggtgagaatgggcgagatcagcgaagcggaagcacggaatcatccggataagaacatcattacaagggcacttggcgcagagaaaacggtggatgtggatttctttgatctgaaacttgaaaaaggatgtacgatcctgatgtgttcagacggtctcagcaatatggttgaagatgagaagatccaggagatcatatccgatccggaagcagatattgatcagaagggcagtgcgctccttcgggaagcaaatcagaatggtggtaaggataatattgcagtcgtactggtagagccattcacgaatgaggtggaagcatgttgaagacgggaatgatcatagccgagcgctatgagatcgtaggaaaaatcggaactggcggaatggcagatgtctataaggctatggaccataagctgaaccgttttgttgccgtgaaggtcctgaaaccggagtttcgggaagacaccacgtttataaagaaattcagaagtgaggcccaggcggcagctggtcttacacatccgaatatcgtcaatgtatttgacgtaggagatgacggcggtgtttattacattgttatggaactgatcgagggtatcactctgaaggaatacatctccaagaagggaaagctttccattaaagaggctacaagtatcgcaatccaggtttctatgggtctggaggcggcacacagccatggtatcgttcacagagatgtgaaaccccagaatatcattatctccacagatggtaaagtaaaggtgacagactttggaattgccagagctgcatcttccaatacgatcagctccaatgtaatgggatctgtacattacagctcacctgagcaggtgagaggcggatacagcgatgagaagagcgatatctattctcttggaatcacactgtatgagatggtcacaggaagagttccttttgacggagataccactgtggcgatcgctatcaagcatctgcaggaagagatggttccgccaagtgtttatacaccggaccttccgtacagtctggagcagatcattctgaaatgtacacagaaaagtgtagatcgtcgttacagccgtatggaggatgtgatcgcagacctgaagcattctctgatcgatccccagggtgattttgtaaggcttactacagttgacaacgatgccaagacggttgtgatctcagaagaagagcttggtgagatcaaacatacaccgaagcagatcacaaaaccggagatcaccgcacttgaggaagaaaaatacgacgataacgattacgatgatgcagaggaagaatacagaccgagatccgagcatagatccggaaagaaaaagaagcatcatggttccggaagaggcctgacgattgcggcactgatcggaggtgcagtccttctgatcgttcttgtggtagtgcttggacgtgccgcaggactgtttggaaccggcagcagcggagctgcagacagcagcaaggcagaagcgaagcaggaatcagcagctgacggtctggcaaccgttcctgatcttgtaggcaagacagaggaagaggctaaaacacttgcaaacgatgcacatctgggtgtccagatggccggtgaggaggcatccgatcaggaaaaaggcaggatctcccgtcagaagacagctgcgggaacacaggttgaagccaatacaactgtgaaatactgggtaagcaccggaacagcacaggttacgatcccagatctggatggacgtacaggaatcgatgcacagcagactctggaagatcttggacttcaggtaaatgtccagaaagaatacagcgacacagatgacaacggatatgcactggtagatccgggatatgtttacaatgtcgagccggcagcaggtacttctgtgcaggcaggttcttctgtaacactgacagtcagtcgaggggttgattatggcgataatgctgaggttccgagtgttgtaggaatgaccaaggatgatgcgcttactactttaggtaaatttattgatatccagataacagaacagcagagtacagaagctgcaggtacagttatcgcacaggatccggaagcctatgcggcagcagacccggatcagccgatcagcattaccatcagctccggtgacaaggctccatccacagacagcgcagcatctgcagatagtacagcatctacagacagcacagcatctgcggacagcacagtatccacaactacatctacagcagatgtcaatgcaaacacaggctggaaatgtacacagacactggatactccgtccggctacaatggaggcgcgatccgtctggaattgatccaggacgtaaacggtgagcctaaggcatccaccatcattgatggacagaatatcagcttcccgtatcagcttgatatctcaggtgctgagggcgttacctcaggaaccatctatctctatgaagaggtagacggggattatcagcagcttggaacctacacggttacattcaagaaagctgagtgatcatgcagggaaagataatcaaaggtattgccggattctactacgtatatgcagaagacggtaatacatatgaatgcagagccaagggaattttccgtaaggataaattcaagcctctggtaggtgacaatgtggacattacagttctggatgaaaaggaactggagggaagtgtgacggagatccacaagcggaagaattctctgatccgtccggctgtggccaatgtagatcaggcactggtgatatttgccatggataatccgaagccgaacttcatgcttctggatcgtttcctcattatgatggagagggaaggtgttccggcagtcatctgttttaacaaaaaagatctggcaacaacggaagaactggaatttctctatgaaacataccagagctgcggctatcaggtgatcctgtcaagtgccctgaagggagaaggactcgacgagatcgaagaagtgcttcagggcaggacaactgtggttgccggcccatccggcgtgggaaaatcttctcttacaaattccctccaggaagaagtggagatggaaaccggtgagatcagccgtaagctgaaacggggaaaacatactacgcgccatgcacagatcataccggtggcacaggatacattccttgtggatacgccgggattttcctccttatatattgaaaatatggaggagcaggaactgaaggattactttccggagttccgaagatatgaaggacagtgccgctttcaggggtgccgtcacatacatgaaccgggctgcgctgttaaggaagcccttgagaacaatgagatcagcagactccgatatgaagattatctggagctgcaccaggaattaaaagagaaaaggagatactgagtcatggaataccgattgtgcccgtcgatcttatcagcagattttaacagactgggagaacagatcaaaattctggaaaaggaaggcgttgaatatctgcatattgatgttatggatggagattttgttcccagcatttcttttggaatgccggtgatcaaatcgatccggaaagaatccaacatgtttttcgacgtacatttgatggtaacagaaccggaaagatatatccgcgattttgtagaatgcggagcagattccattactgtacatgcggaggcatgtgaggatctggagcgtacactggagcagatcagggcagcaggggtaaaggcggcagtttcgatcaagccatccacaccggtaaatgacatcagccatcttcttgaagatgtggatatggtgctgataatgactgttcagccaggatttggcggacagaaatacatggacgaatgcacggagaagattcaggagcttcgtgagcttattgatgaagaagagctggatgttgatatccaggtagatggtggtatcaatgatgatacactggagacggttatgcgtgccggtgcaaatctcatggtcgcaggttcctgggtatttaagggcgatgtggcagccaatgtaagacacattacagaaaaaatccacaatatcaaaaaagagctggactgaaaatgatcgatacaataataatcagcgggggcaatatccagaatggttttgccctcgattttttaaaaaaaagaatagaagaaaaccgaggagagaaaatcactcttgttgctgcagataaggggatggaatggttcatgaaaaaccgggaatttattccggatcttgcaattggggattttgacagtctttccgaagaaggccaaaaatatatggaaagcctgaagggaccggagatcatcaggctgaagccagagaaggatgattcggatacacagtctgcggtaaaccagatgatccgcaagggtgcaaaggatatcctgatcctgggagctaccggcacaaggctggatcatgtgctggcgaatctgggactgctttccatgggtaaggaacagggcgttcgtgttgcgatcgcagatcagtggaattatatcacacttgcagaaagcggaaccatactgcacagagaggagcagtttggaaaatatgtttcattctttactgtgggaggtgatgtgacaggcctcactctgagaggatttaagtatccgctgaacggatatcatctgacagtagaagacagtggcctgaccgtcagcaatgagatttcggaagaaaccgcagagatcctgtatgaaagcgggcagcttctgatgatcatgtccagggactgacagtaacaataaatgcctcacagttgcgatttcaggctgtgtatggtaatatgggacagggatggcctgaaaaacggaaaggcctgtttaaagagtatctgaaaaatactgtaaataaatatatcgaaaggacgtatatagagagatgaaattaggaatcgtaggtcttcctaacgtaggaaaaagtacattattcaattcactgacaaaagccggagcagaatccgcaaactatccgttctgtactatcgaccccaatgtgggtgttgtaaccgttccggatgagagactgaatcttctcggagatttttataaatcaaaaaaagtaacaccggcagtgatcgaattcgtcgatattgcaggtcttgtaaaaggcgcatctaagggagagggacttggaaaccagttccttgcaaatatccgtgaggtagatgctatcgttcacgtggtacgctgctttgaggattccaatgttgttcatgtagatggaagcattgatccgctccgcgatatcgagactattaatctggagcttgttttctctgatcttgagatcctcgagagaagaattgccaaggttaccaagactgcacgtatggataaggaagctgccaaagagcttgcattccttgaaaaagtaaaggcgcatctggaagagggacagcttgccattactctggaaacagagaacgaagatgaggatgcatggcttgcaacctataatcttcttactgcaaaaccggtgatctatgcggctaacgttgcagaggatgatatcgcagatgatggggcgaacaatcagtatgtacaggcagtacgtgaatacgctgccaaacagaacagcgaggtatttgtgatctgtgcgcagatcgaggaggagatctccgaactggatgaggatgagagaaagatgttccttgaggatctgggactgacagaatccggtctggagaagctggtgcgcgcaagctatcaccttcttggccttatgagcttcctgacagcaggagaggatgagacaagagcatggaccatcaagatcggaaccaaggcaccgcaggcagcaggtaagatccacacagactttgaacgtggatttatcaaagcagaggttgtgaattatcaggatcttctggattgcggttcctatgcaggtgccagagagaagggccttgtacgtatggaaggaaaagagtacgttgtacaggacggagatgtgatcttattcagatttaacgtgtgatcaccaacgtctgtgaaataccggctgtaagctgaaaaattataacaggtgattttatggatatgtcaattcggtttcccggattagatctggttttggatcatgtgccgagatcctttgagatctttggctttgagatcacgatctatggcgtcctgatcgcgataggaatgcttctgggaatcttttttgtggtactggaagccagaagaaatcatgaagatccggatgcatatctggatctggccatcataacgctgctttccggtgtggcaggggcgaggttgctttatgcggctttttcctggagcctttataaaaatgatccgggacagcttctgaatatacggtccggaggacttatgttttatggcggacttctgggcggtgtgctgggtggtgcggtctactgcaggatccgaaagaaatccttctggcagatggcagatcttgcctgcatgggacttctgatcgggcagataataggaaagtggggaagcttttttaacagagaatctttcggggaatatgcagacaacattttttccatgcagctgccgctgactgcggtacgggcaggagaggtcaccacggctatgcgtgaaaagcttcaaaccgtggacggtggtacctggattttggtacagcccttgtttttctatgaaagtctctggtgtctgcttgtgcttttggtgcttatgatgctgcttcgcaaaaaagtattccagggagagatatttctgagatatctggcgagctatggtctgggaagagcagtgatccagtggttccgcacagataaaatactgtttccgggaaccggcgtggatgtttcactggtgatctcggtaatactttttgttttttgcaccgtggtagttgcagtgaaacgcgtgatgtccagaaagcgggcaaaagtacggatgagaaggatcgagaaagatcagcaggcagagaaagaagcggaacagcaacgggaaaatgtagcagagaatctggaaacagagactgtacagggagaaaaaaatggatcagaacgagatacagaagaaagaggaagctcttcggaaagcgtcacttttgcagcagctgcaggaggaacggaagaagctggacagccagatcaggagcaggagcgatcttctgaagaatctggaggccagccaaagagttgaccgtattctggaattatattacggaaactgagatcaaacagatataggatacagatgcttttgtctgatggatcagaatataggataggataccggcatttggctgataagagcagcagaaaactgccctgcaggaaaacgtcttctacgacgtttccggcagggcagtttttgtgctgtgcagtaggaatatatcagtacatctttcggaaatccagaggagttgtgcctgtgactttacggaacatggcgataaagtggctggcatcggaaaatccggaagcaccggcaacatcctggatcttcatatccggtctggaaagcagaagctcacgtgcgcggctgatgcggtacatggtaacgtactcgtaaaccgagcagcccataaaacggcggaacagacgggaaagatactgcggagagacaaaaacgctccggctcagctgcgctgcagtgatatcctgctgataaccggtttcgatttcttttattaccgggatcacatatctctggtagagaggattatcctgtatcttcggagaagctgcacagtctgtaaaattcataagaaaattatagcagtcggaagaaagagatttcatatccggtgtgggctgatgatatttacgcaaggtagaagaaatcattttccggatactggctccttgttccttttcgataaggatcacttcctggttgtctgtcatggaaggaatgctgcctgccagtgttcctgtgaaggtggcaaacatcgtggtccaggaagtagactccctgtgataggaatgagggacaccgggggcgatgaggatgccctcgttggctccgagagtataaaattttccacggacttcaatgcgtccggtacccttttcagtctggaggtaatgataatacggatatccgtccggacggaagatattaacctgattccagtggttcccaagagattcaaacatgaagggagcactgaccggagtgtttctgaaatagatcgacatgatattcacctgtttctaaatgttatatattttggcgaaacatattataccataatccggtggattatactataatgatcatagcataaaaaacgaaggatccggcagaaaaaacagaatctgccgggcaggaggaaaaaatgaaaaaatttgatcattctctgttaaaagatccccggtatttcagcgacggaagaatggacgcccactcagatcatacatattatcgctgtgaagaagagagagaagatgggaaaacttctttccgtcacagtctgaatggtctctggaagttccattatgcacggaattatgcatctgctatcccaggctttgaggaagaagcatattcctgtaaggattgggaggacatttatgtgccggcacatatccagatggaaggatatgatgcaccgcagtatgccaatgtccagtatccgtgggaaggccatgaagaacttcatccgggacagatcccggaacgttttaacccggtggcaagctatgtgagatatttccatgtgccggagagcatgaaaggaaaaagagtatttgtttcattccagggagcagagagcggcctggctctgtggctcaatggaaaatttgtgggatacagtgaagattcttttactccgtcagaattcgagcttacggaatatctgaaggacggcgagaacaagctggcggcacaggtgtttaaatggacagccagcagctggtgcgaggatcaggatttttaccgtttttccggaatttacagagatgtttatctgtttacggtaccggatgtccatgtatatgatctcaggatccgtgccattccggatgaaactctcaaaaaagccgagcttgagatcgtgaccagtacctggggaaaaggaaaaatgaagcttacactttccagaaagggagagatccttttgcaggaggaaagatctctgaacggagaggatacctgtacctgggagattcaggatccccttctctggagtgcagaagagccgaatctctatgatctggagctggagatcagtgatgaaagcggaaagctccaggagatcatcccggaggaagtcggtttccgccgttttgaaatgaaggatggtatcatgacccttaacggaaaacgtatcgtattcaagggtgtgaaccgccatgagttcagctctgttacaggaagacatgtgtcccgggaggaactgctcaaagacatcgtgaccatgaaacagaacaacatcaatgcgatccgtacctgtcattatccggatgcatctccgatctaccgtctctgtgatgaatatggtatttacatgatcgcagaaaacaatctggaatctcacggaacctgggatatagcagaatttaccggagatcacacggatatcgttccgcacaacaaaccggaatggctgggcatgatgctggaccgtgtaaattccatgtatcagcgtgacaagaaccacccggcgatcctgatctggtcctgtggaaatgaatcctttggtggaaaagatatctttgagatgtctgagttctaccacaagaatgatcctacaagactggtacattatgagggggttttccatgaccgcagctacaatgccaccagtgacatggaaagccagatgtatccttccgtagaagcgatccgggagttccttgcaaaggatgacagcaagccgtttatttgctgtgagtatacccatgcaatgggaaattcctgcggcgcaatgcataaatatacagatcttacagatacagaaccgaaatatcagggtggctttatctgggattacattgatcagtctatttacaaaaaagaccgttacggtaaagaattccaggcatacggcggagacttcggtgaacgtcctacagattataatttcagtggaaacggtatcgcatacggcggagacagagatgcttcaccaaagatgcaggaggtaaaattcaactaccagaatatcactgcgcaggtaagtgaggattctgttaagatcatcaacaaaaatctttttgtaaatacggacacattccgatgtgaagtaactcttgcaaagaacggtcatgttctccgcacagagacactggatacagcggtggagcctttaagccaacagacctacagacttccatttggaaaacagcagcgcccgggcgaatatacggtaaccgtagccttccttctcagagaaaaaacactttgggcagaggcaggacatgaggttgctttcggccagtatgtttatcaggtggaaggaacaccggaagctcctgcgtgtggcgtggagcttgtgagaagccttcataacatcggtgtccgtggggaaaatttcgaagtgctgttctccgttctcaatggtggtctggtttcgtataaatatgcaggaagagaaatgatcgaagcgattccgaagcccaacttctggagagcacctacagataatgattgcggaagtctgatgcagatgcgctatgcacagtggaagatcgccagcatgtacgcaagtcataaggattaccgaaaaggcatgtatggtccggccaatgctccggagacaacggttcacgaaaacagcgtggaggttgcttttacctacatactgccaactacgcctgccagtgaatgccgccttgcctatgaggtaaccggagatggaagagtaaagacaacgctgacctatgatcctgtaaaagagctgggcgatatgccggagttcggagtactctttaaattcaatgcggattatgatcatgttcagtggtacggcctgggaccggcagagacttatgcagaccggaagcatggcgcaaagctcggcatttatgagaatctcgtgacagacaatatggcacgctatcttgtgccgcaggaatgcggaaacaaagaggaagtacgctgggcaaagatcacagacagaaagggcagaggaatgctttttgagatggataaagaaaacggcccgatgatgttctcggcacttccatatactcctcatgaaatggaaaatgccatgcatccctatgagcttcctgcaatccattataccgttgtccgtgccgcaaaggcgcagatgggtgttggaggagatgacagctggggtgcccgcacccatccggaataccttctggataccaatggaaagatgaaattttcctttgcgttcaaaggcctttaaaatgtcataaaataacagaacataaagtcagaaaaaagcttccggcgactgtccggaagctttttcatttcataataatgcacagaaaataaacaggttgaaaaaaaacctgtggatatttcatgaaatgaaaaaaaacttggatatgcacttgttttttcatggtaaatagtttagaatgattacataagtggtagaaagtggtgaatagtggtagcgaatggggatgagtggcagaacacaccatttgcaccctggaagcacgaaggggagaatcgtgtttcacgagagtaggtgggtttcatgttcatgggcgagtataatcatacgatcgacgcgaaggggcgtctgatcatcccttccaggttcagggaactcttaggggaagagttcgtactgacaagagggttggatggttgcctttctatttatccgatggatgaatgggttgcttttgaagagaaactccgagcattaccacttacaaataaagacgcaagaaccttttcacgtttctttgtagccggagctacaacatgtcagctggataagcagggaagaatcctggtgccgcagacgctgcgccagttcgctggtctggataaggatgtggtgcttacgggtaatctgaaccggatcgaggtttggagcaaagagaagtggagcgagaactgcaattatgatgatatggacagcattgcggaaagcatgcagaacataggaatcgtcatttgagcataacgcaggtagaaatcccacaggagacggatatggaatttaagcacaaatctgtattactcaatgagaccattgacggcttaagggtaaagtcggatggaatctatgtggatggcactttaggaggagcgggacacgccacagaggtgtgtaagaaactttctgccaaggggagatttattggcatagatcaagaccaggatgcgataattgctgcgagtgaacggctgtcagcctttaatcaggtgacaatcattcgcagcaattattgttacatggcagatgagctgagatcccgtggcattgagaaggtggacgggatcctgctggatttgggagtgtcatcttatcagctggataatgaagagagaggtttttcctatcggtacgattctcctctggacatgcgaatggacagaagacagagccgtacagccggtgatatagtcaacggttatgaggaacgggagctgtatcggattatccgcgattacggcgaagataaatttgcaaaaaatatagcgaaacacattgtggctgccagagagcaggcaccgattcggacaaccggagaactgacagagatcatacggggtgcgatccccatgaaaatacaagctacaggaggacatccggccaagaggactttccaggcaatacgtattgagctcaaccgggagcttgacgtgctccgggattccctggacggcatgatcgatctcctggatgacggaggaaggatctgtatcattacattccattctctggaagacaggatcgttaagaccattttccgaaaaaatgaaaatccctgtacctgcccgccggattttccggtctgcgtatgcggaaagaaatccaagggtaaggtgatcacaaggaaaccgatcttaccgggaaaagaggaaatggaagagaatccgaggtccaaaagtgcgaagcttcgtatttttgaacggaaaatgtagttgagagatggaaggtaggcaaatggcgaagacaggaagagggactacagccagaagaaatcgaaataccgtcaggaacagcagagaaatgtatgttcagggaaatgcggtaaaacggctgcaggaagttcctcagaggactgatctgcccgagatacaggaaaggcgacggctggctcagaaaagaaaacagaaatccgcagtacctgtgacaccggcaaaacaggtggtaagcagacaggcacagcggaaccgggaaaaggcaatggccatgaacaaggggttcgttctgtttcttacggcagtttccatcgcggtactttttacctgtatcaattatcttcaggtaaaatccgaaatcacggcgagtatgaaaaatgttgcaaatctggaatctgagcttgcacagctgaaagaagataacgatgcatattacagtcaggtcacttctgcagtggatatcagcgagatcaagaaaaaagctatcggcgagcttggaatgaaatatccttcggaggatcagatacagacctataccacggaaggaaacagttatgtgagacagtatcaggatgtggacacacacaagtaacagaagtacagtttttaagcaggtgatcgattgagtacaagaaggcgcaggccggtaaaaaaaataaattacagtatgaagaaaaagctggcagtactattttccttagtattgctggctttagtcggtttggtggcaagaattacctatatcaatgccaccagcggaagcaaatatcgaaagcaggtgctgagtcaggctcagcagaaatatgaaaatcagacacttccggcaaaaagaggagatatctatgaccggaacgggaatatcctggcaaccagcaacaaggtctataatgtggtccttgactgtctggaggtcaataaggatcaggattccgtggagcctaccataaaggctcttgtggaagtcctgggattggatgaagatgagatgcggaagcttctcaccgacagcagtacaaaaaaaagtcagtatcagatcgtaaagaaacagatctccatggacgacaaaaaagccttcgaaaaatacgaagatccgggagacgacagtgaactgactgccacgcagctgaaagaacgttccaggatcacaggtgtatggtttgaggaagattatctcagatcttatccgtttaatgagactgcctgtgataccgttggatttacactttccagagatgtggcggatgccggactggaaggatattacaatgcgacacttaccggcgtggatggaagacagtacggatacatcaacaacaattccgacgtagaacagacgatcatcgaaccgacggatggcaaaagcattgagacctcgctggatctgggacttcagcagatcgtggaaaaatacgtaaatacctttgaagaaaagatgggagccaaaaatgtgggcgtgatcatcgaggatccgaaaacaggagagatcctggcaatggacggcggtgaccgttatgacctgaataacccgagagatctttcaaatgtgtattcccagagtgagatcgctgccatgaacgatgaggaaaccgtggaagcgctgaacggaatgtggagtaatttctgtgtgacagatgcctacgagcctggatcggttgtaaagcctatcgttatgggctccgcacttgaaatgggagcgatttccgagagcgataattttgtctgtgacggcggacagtcttttggagcggaaggtgcgactacttttatcaaatgtgcggtatggccggatgctcacgggacagaagctctttccgatgtcattgccaattcctgcaacgatggtatgatgcagatcgcagcaaagatgggaaaagataatttccttaagacacagagcgttttcaatttcggaacaagaaccggtatcgatcttcccaatgagggaagcggtgtgatccataccagcgataccatgggagaaacggagcttgcatgctctgctttcggacagggctatacactgaccatgatacaggagatcaatgcaatgtgttctgtgatcaatggaggatactactatcagcctcatctggtgacgaagatcaaggacagcagcggcggaatcgtaaaaacgatctctccgacactgatgaagcagacgatttctgagaagatatctgcagatatccgctcttacatggctgccagcgtagaccatggtaccagccgtacatccaaggtgcagggctacagctccggtggtaaaaccggtactgccgagaagcttccgcgaggcaatggcaagtatctggtatcctttatcggatttgcaccggtagatgatccggcgcttgtgatctatgtagttgtggatgagccgaaggtagatgatcaggcaagcagtacgtacgcacagtacattgcacagggaatcctttccgaagcacttccgtatctgaatgtacagccggatgaggcagaggatggagaagttccgactacagagctgtgggaactttttaagggaatcagcgattctgcaacaggaaccggcgcagacgggcagaaggaggccatttccgatgagaatgtaccaagtccgccggaagatgagtcggaggacagtgataccgaagataataacgatatgcagagcgaaggtcttaccaacgaggaggccggcctggaatagataaaaagaataccctctcaggggaacgtcatatattacagtgacgacctctgagagggatttttttatgatccggaccatggtttatcacaggaaaaaaatatggatggtttttctgatctgcataatgcttcttctgggacttgtgggaagactctggtatcttatgaacgttcgggcagaatattattcaaaaaaggcggaggatcttcatgagagggaacgtgacataaaagcagcccggggaaagatcctggacatcaggggaaatattctggcagataaccggacagtctgcacagtatcggtgatacacagccagatcaaagatcctgaaaaagtgatccgtgtactgtccggagcattgtctgtaaaagaagaggaaatccgaaaaaaagttgaaaaaatttcttctattgaaagaatacagacaaacgtggaaaaaagcattggagacaggatccgggaatatgaccttgagggagtgaaggtagatgaggattatcggagatattatccttatggatctctcgcttcaaaagtactgggatttaccggaggtgataatcaggggatcattggtcttgaagtgaaatacgatgagatcctgaaaggagagcccgggaagatcctcacagttacggatgcacgtggtgtggagatcgacggaaccggagaacggaggaaggaaccggtgtcaggaaatactctgcgtaccagtctggatgttaatatccaggaatatgtgcagcaggcagcaggtaaagtcatggaagaaaaacaggcggagagagtttccatactgcttatgaaccctcagaacggagaaatctatgcctgtgtcaatgtgcctgaatttgatctgaacgatccgtttactctgaatacagaagaaacagcagcagagggagaaaagaagcaggatcttctgaaccggatgtggagaaacccctgcctgaatgatacctatgaaccaggctcgacttttaagatcatcactatggcagcagggctggaggaaagagtggtgtcaacagaggatcgttttttctgtccgggctataaggtggtggaggaccggcggatccactgtgcaaagagaacaggacatggtgcgcagagttttgtagaaggtgcccagaactcctgcaacccggtatttattgaggtgggcctgcggcttggagcagaccgttattacaaatattttaaacagttcggacttttgaaaaaaacaggaatagatcttccgggagaggcaggaacgatcatgcataaccccaaaaatatgggagaggtggagcttgccacggtatcctttggccagtcgtttcagatcacaccgatccagcttgcaacaaccgtcagtgggatcatcaatggcggaaaccggatcacacctcattttgggatcagcgtggaaagtgcggacggaacaaaggtgcggacactggaatatccggtggaaagcgggatcgtgtccggtgagacttcccggacagtacgtacgatcctggaaactgtagtttcagaaggctccggaaaaaatgccgggatccaggggttttccattgggggaaaaacagctacctctcagacactgcccagaggctccggcagatatatttcttcattcctggggtttgccccggcagaggatccgaaggtcctggctctttgtatcatctatgcaccccagggtatgtattatggtgggatcattgccgcaccggtggtacgcagtatttttgaaaatgtacttccctatcttgggatcgagaggacagttacggaaactccatccggggaaaaccgggcagatggggttgattaatgaggataaaagccttatactgttgaagaagtataaaaaaacgaaagaattagaggtgtgaggatggagtttcatgttgtgatccctgtgctgatctcatttgcgatcagccttgtattaggaccgattgttatcccttttttaagaagacttaaaatgggacagacagagagagagctgggtgtgcagtcccacctgaaaaagaacggtacccctactatgggtggggtgatctttctcattgcaacaactgtaacatcactgttttatatcagagattatccgatgatcatcccggtacttttcctgacactgggatttggactgatcggatttctggatgattatctgaaggtagttctgaagcgttctgacggacttctgccatggcagaaaatggcactgcagatcgttgtgacagctgtatttgctttttatcttgtaaattattccaacgtatccctgactatgaagatcccgttctggagcggacattatctgaacctgggatggtttgcagttccggtactgttctttgcggtgatcggtacagtaaacggagtcaattttacggatggacttgacggactggcttccagtgttaccctgatcgtggcagtattctttacggtggtttcccttggaatgaacagtggtgtggaaccgatcacctgtgcagttgtgggcagtctgatgggatttcttctgtttaatgtatatcctgccaaggtatttatgggagacaccggttctctggcattgggtggctttgtggctggtgtggcttatgccatgcagatgccgctgtttatcatcctggtcggactgatctaccttgtggaggtattgtctgttatgctccaggtatcctatttcaaggcaacacacggaaaaagaatcttcaagatggcgcctatccaccatcattttgagctttgtgggtggtccgagacacgagttgttgcagtgttctctgttgtaactgctattatgtgcctgatcgctctcctggcattataaggaggaacagaaaaatggatttaaaaggaaaaaaagttctcgttttcggagccggaaaaagcggcattggagcagctgatctgcttggaagtgcaggagcacagccggtgatctatgacggaaacacagatcttgataaagaggcagttttacataaaacaaacggaaaatacaccccggagatctgggccggagattttccggagagagcgctggacagtcttgatcttgtagtgctaagtccgggagttcccacagacctgccgctggtaaagagcttctatgaaaagggccttccggtatggagcgaggtggagcttgcctaccgtacaggcaagggagaggttcttgcgatcacaggaaccaacggtaagacaacaacaacagcactcctcggaaagatcatgggagatgcccgtgaatctgtatttgttgtaggaaatatcggaactgcatatacatccaaatcattggagatgagagaggattccgtaactgttgcggagatcagcagcttccagctggagactattgaccagttccgcccgaaggtaagtgcgatcctcaacatcacagaggatcatctgaaccggcaccataccatggaggaatacatccgtgtaaaagaactgatcaccaaaaatcagggaccggaagatgtatgtgttctgaattacgaggatgaagtccttcgtaaattcggtgaaaatatcgttccgaaggtggtatatttctcaagtcttcgcaaactggatcagggaatctatctggacggagaccagatcattctcaaaacagaaaaagaagagataccgatcgtaaaaaccggagagcttaagatcctgggacgtcataatcacgagaatgtaatggcagcagcagccatggcatattatgcgggtgtttctgtggagagtatccgcaagagtgtctgtgagtttgtggcagttccacacaggatcgagtatgtgacagagaaaaacggtgttgcatattacaacgattccaagggaaccaatccggatgcggccatcaaggggattcaggcaatgaaccgtccgactcttctgatcggcggtggctatgacaagaaatccagctatgatgagtggatagaatccttcgacggaaaagtccgttatcttgttctcatcggtcagacgaaagagaagatcaaagcagcagcagaacgtcttggatttacagatatcatcctctgcgaggatctgaaggaagctgtccaggtctgtgcggaaaaagccaatcccggagatgcagttctgctttcaccggcatgtgcgagctggggacagtttgataattatgagcagcgcggtgacatgttcaaggaatacgtgaaagcactgtaataatccgaaaaatacatacataagctgaaataaagaccactgtggaggccatgcatgaaggcaggacagaaacagaccggaaagacagataccgttctctgggtactggttctgattctggtggtattgggactcggggcgcttttttcggcaagtgaatataatggcagagtacgtttccacgactctgcctattattttaagaagcagctctttgccacggcactggggctgcttgttatgtatctggcatcacgggtagattaccggctgtctgtaaagctggcgccggctgcctatattttttcgctttttctgtctgctgcagtcctgcttttcggacaggagatcaatggatcgaagaggtggctgaacctggggccgctttcctttcagccgtcggagttttccaaggtggcagtgatattgtttctggtgtggcagatcagcaatacaaaaagcaaaacaaccggattctggtttatctgcaggactatgatgacgttgcttccggtagcaggtctggtgggctccaataacttaagcacagcggtgatcattctggggatcggtgtgctgctgatctttgtggccaatcccaggtatctgcagtttctcgcacttggaggtgcggggataggatttattgcggtttttcttgccgcggagagttatcgtctggaacgcctggcaatctggcgggatccggaaaaatatgaaaaaggatttcagaccatacagggcctgtatgcgatcggaagcggaggaatcttcggcaaggggttcgggaacagtctgcagaagctgggatttgtcccggaagcccagaatgatatgatattttctattgtgtgtgaggaaacggggatactgggagcctttctgacactttttctgtttggtattctgatctggaggctttgtattctggcattaaactgccgggatctgcagggaacgctgctgtgcgccgggatcatggcacatatggcgatccaggtagtcctgaatgttgcagtagtaacgaatacgattcccaacaccgggatcactctgccctttgtaagctatggcggaacttctgttgtttttcttctgggggaaatggggctggccttaagtgtcagcagtcacagacatggaaggatcacatagaataacaagtaagaggcccttttaggagtggaatacttgaatgagttcgatgagatcatcgtgaccggaggcaggccgctacatggaagcgtccggatccaggggtcaaaaaatgcggcacttccggttatggcagcagcactcttaagcaccgggaccagtgtactgcggggatgcccgagaatcagtgatgtgtatttgatggaaaagatcctgaaatatctgggggcagaaacctggtgggaaggtcaagatctttatctggactgcagccatgcggacggcaccatgataccggagtgttattccggaaaaatgcgttcttccgtgatcttaatgggagcaatgctggggcggagcaaaaaggcacagacaggatatcccggaggctgtgtgatcgggaagcggccggtggatcttcatatccaggttttgcgccgccttggggcagctgtggtggaaaacggtgggatgatccgggcatcctgtggaaaactccgaggtgcagagatgttttttcaaaaaagaagtgtaggcgctacagagcagggcattctggcagcggtccttgcagaggggaaaacagtccttaacggctgcgcctgtgaaccggaaatttattggctttgccattatcttaccggaatgggggcaaagatccggattcgtgaaaatggctgtatctgtattgaaggggtggagaagcttgaagctggcgatggctgcattccaccagaccgtattgtcgccggaacctatctcatggcagcggcggcaactagaggagagatcatcctggaaaatccgcctctggaggaaatggatggaatcctggacgtatatcggaaaatgggtggacaatgccgcagggtaggtggtaaactaatagtcaacggaaaaaatacaggttttcccctggagcttctggaaacagaagtttatccgggatttcctacagacctgcagtctcctgcgatggcggtactggccacgattccgggagtgagcaggatccgcgagaagatttttgaagacagatataaaacagcttcatggctctgtaaaatgggagcacagatccagatccgggatggagttgctgtgatatacggagggcagcccctgaccggttgtactgtggaagcagaggaacttcgcggtggtgcggcacttgtgatcgcagcacttgccgcgcaggggattaccaggatccggggctgttgtttcatagaaagaggctatgaacatatctgtgaggatctgaccgcactgggcggtctgctgataaaggacagaggaactttatgaaaacatcaaaaaaaaagccactgaaagcagttggcggacttcttgtcctgctgctggcaggaattattttcttttttacgtattatcaggtagatgaagtgcaggtgatgggcagcaaccattattctgaaaaacaaatcaggaagatggtgcttagggggccgctggcatccaattctgttcttgcaccgcttctttatactaagcagaacacaaaggatgttccctttatagaaggctataccgtaacaaggctgaaccggcacaccatctgtgtcagtgtgaaggagaaggatatcgttggctgtatcccttatctggacagttatatttattttgacagaaacggtatttttgtggaaggatccacggaacgtaacgaaaaaatcccgttttttgacgggatcaaagtcaaaaaagtgatccagaacgagaaactccccatcaaggatgaaacggtgatgaacacggcagttgctctttctactatttttgcaaaaaatgataaggttccggatcacattgaatttgaagacgacggacagatcagtcttgtttacggggatatcacagttaaacttggaaaggatgaatatctggaagacaaaatgaccagagttctggctatccttccgatgatttccgaaaaaaaaggaattctccatgcagaaaatgtaaatgataattccaagaacattaccctggagcaggaacaggatgagagccagacttccgcagaaaactggactggaggctatgatgaggaaggaaattacaccggagaaggcgaatacgacgaaaatggcaactatgtaggaccgaaaccgcagacggatctggagtatgcgcaggaaaactgggtaggtggctatgatgaagagggagattacacaggcagtggtgagtacgatgccaacatgacctatgtaggcgaagcccccacagaagaaaccatggcagaaaaaggaaactggaagggcggttaccgggaagacggaggctatgacggagtcagtgaatatgaccgtgatggcaattatgtaggcactctggaggattatcaggcttcggcagaaagctccggagacggaacagactccgaagatccagatgctcagagtacggataccgaagatacagaaaatgaagaagactcttcagacagcagtacggacagcaccgaggaagaggctgattacagcagtgatcaggaagaaggcgctgaggattatgatgaaaattcgtacagcgattacagtgatgagtccgattatgagtaaagataaaaaagctttcttaatatatagtaccagtatttggacattttgccagagattgttttgtaaatgtttcggttaatagaaacagtgccgaaatttagtgaaaaaagtataaaaaaacaaaattaatggttgattaattaccgaaaaaaatatatgatataactatgtgtatatgtagcttggaatagattattacactgaatcggatatcaggtagaaataaaggaggaagtacattgttagagataatgacgaatgaggctgagtcttctgcgaaaattattgtaattggagtaggcggcgcaggtaataatgcggtaaacagaatggtggaagaggccattggcggagttgagtttgtaggtgttaataccgataaacaggctctgacactgtgtaaagctccgactgtacttcagattggtgagaaaattacgaaaggtctcggcgccggtgcacagccggaggttggacagaaggcagctgaggagagcattgaggaagttaagaagatcatcgagggagcggacatggttttcgttacctgtggtatgggaggcggaaccggaaccggagctgctcctgtgatcgccggtgcggcaaaagagatgggtatcctgactgtcggtgttgttaccaagcctttccgttttgaagcaaagacccgtatgaacaatgcacttgcgggaatcgaaaatctgaagaaagcagttgacactttgattgtcatccccaatgacaaattacttgagatcgttgacagaagaacaaccatgccggaagcactgcgtaaggctgatgaggttcttcagcaggcagtacagggtattacagacctgatcaatctgccggctctgatcaaccttgactttgcagatgtgcagacagtcatgacagacaagggaatcgctcatatcggtatcggtgaggcaagaggtgatgacaaggctatggaggctgtacagcaggcggtatcttctccgcttcttgagacaaccatcaagggcgctactcatgtgatcatcaacatttccggagatatttctcttatggatgccaacgatgctgcaagctatgtacaggagcttacaggtgaggatgcaaacatcatctttggtgctatgtatgatgattctgttgcagattatgcgagaattacagttattgctacaggtcttacagacaataaccttcagaacacaccatttggaaacagagcttccaattctgtattcggaaacaccaaaaaaacaagccagtcacagccaggcggtatgaaccttaacatgccaagcttcagcctgccgactatgaattccacacagtttggaacaaaggctcctacaagcactgttcagaaaaaggacatccagatcccggattttcttaagaacagataataaatgaacaggataagatccggcagagactccatctggaacgctgccggatctttttgactttctgatcaaaagaaacaggaatgtctgctctgtatggaaacaggatttctgttcaggatatcagcattcgcagctgaaagtatcacattttgtatcacagcagcgatgtgcattgtcaccggatacattgatggaagctgcggtgcatttgcagtgctcattgtaggtgcagttgtgtgctttgcagtcgatgttaatggtctcgcacccacagccgggatctgtggaattttttacagcgcactcttcctggtcacggaagctttcacaggcggtgtcgtccgcataacgagcatctgcaccttcgacactgatggatcccctggagcagagagaatttttgttatagcagcagttgtgtgcggagcatttaagacttgtcataaaagtgtcctcctgataattatgattttaccggaaaccgttagcctgccggaatgcgcatcctgtctgatcgtcagcactgcggtaaggcttgacagattccgatgttgcatagtatgtccggaagaagaaaaatttatactcaaaaaataaatacataataatataaaaaacagttgacaaatagcagacaccatggtattctcttaaagtacgtagcgaaaagaaagcagagttcactctcacctcagcgctgaagataagcgactcaggtcaatattacacagtactgcgaacggaccaaccatcagtgcgcaggtgtaattatttgaagtgtggacatctgtctgcgctttttttgtgcggcttaagctacattaatgagaaagaaaaaaataattctatcatgttcatggaggtgtacaacaattagcggtttaatgattaacgaacagatcagagacagagaggtacgcttgattggtccggacggagctcagcttggaatcgtgtccgccagagaagcgatggcgaaagcgcaggaggcaggacttgaccttgtaaagattgccccacaggcgaaaccgccggtatgcaagatcatcgattacggtaaataccgttacgagcttgcaagaaaagaaaaagaggccagaaaaaagcagaaaaccatcgatgtcaaagaagtgcgtctttccccgaacattgatacgaatgatttgaagacgaaggtaaatgcagcaagaaagttccttagcaagggcgacagagttaaggttacacttcgtttccgcggaagagagatggcacatatgtccagcagtaggcatgtgcttgatgacttcgcagatcttctgtccgatatagcgactgtagagaaggctccgaaggtagaaggcagaagcatgactatgtttctgactgagaaacggtagatatctcagtcttcacggcaacagccgggcagaacgggatgctatataaaatttagaagtaccaaatcaaggaggaattcataatgccaaaaattaaaacttgcagagcagcagcaaagcgctttaaaaaaacaggtacaggaaaattagtaagaaataaagcctacaagagccatatccttacaaagaaatctcagaagagaaagagaaatctgagaaaatctactgttgttgattctactaatgtaaagagcatgaagaaagtattaccatatttataagatagagaagacgaacaggaggagaattaagaaatggcaagaattaaaggcggattaaacgcaaagaaaagacataaccgtacattaaaactggcaaaaggctacagaggagcccgttccaaacagtatagagtagcaaaacagtctgtaatgagagctcttacaagctcctatgcaggaagaaaacagaagaaacgtcagttcagacagctctggatcgctcgtatcaacgcagcagcaagaatgaacggactttcctacagcaaaatgatgcacggccttaaggttgcaaacatcgacatcaacagaaagatgcttgcagagatggctgttaacgatgcagcaggcttcacagctcttgctgagatcgctaagaaagcaatcgcataagtaaagtattaagagacgaaggagtccagggaatttttccctggatttttttgtaaaaaaattcagacaatttgccgaaaaacgacacaagctgtacagcggacaagtgtccgcgttgtgcaatcagacgaaaaacaacagataactaaatttgcccttgaaataaaaaatatgcgatgctataattttaccattaaacattagtaacgcgacaaagcgcaggaggagagattattatgaagaattggaagaaagtaatcggcgttgcatcagcagcagcgatgacagcagcgatgatgatgcctacatcagtttttgcagcagatgagacatttaagatcggtgtgatcggaccgatgacaggtgattacgcacagtacggtaccaacgtatacaacgcagccaagatcgcagctgatgagatcaacgagaacggtggattcaacggatataaagtagagattcttgacgcaggtgatgaccagggagatccggagaaggctgttaacgcatacaatgacctgatcgataaaggaatgcagatgctctgtggaactgtaacatccggttcctgtatcgcagtaggagctgaggcagctgaggatacattcctcttcacaccatccgcaacagcacttgactgtatcacagcaggaacaaacgagttccgtatgtgctttacagacccggcacagggaaccaaatctgctcagtacatttccgagcacaaacttgcaacgaaagtagcagtactttatgattccgctgctgactacaactccggtgtacatgacgcattcgttgcagcagctgctgatgacggacttgaagtagttgcagatgaggcttacacaacagacagcaacacagactattctgtacagcttgcaaagatcaagaagagcggcgctgagcttcttttccttccgaactactattccgacaatgcgctgatccttcagcaggcatctgaggcaggacttgacattaaattctttggtgtagatggcatggatggtatcctcaatgtagagaacttcgataaatcccttgcagagggtgttatgcttctgacaccattctccgcaacagctacagatgagaagagccagaacttcgtaaaagcatacggcgatgctcacaacggtgagatcccgaaccagtttgcggcagatacatatgatgtactttacgcaatgcagcttgcagctgacgatgcaaagatcacaccagatatggaaaatgcagacatcagtgcagcaatgagcgcatccatggcaaacatcgagcttgacggacttaccggaaaagcaaaatggaccgaggatggcgagtgtgataaagagccgaaagcattcgagatcaaagacggtgcttatgtagagatgaaataagtaatttctgttaacgttaggggtcaggggacggtcacctttagtgggaaccgtcccctttttcccttatcaataaacaattaaaagaggtgcgttatgagttttatatcttatttaaaagacggcatcagtcttggcagtatctatgcgatcatcgcacttggatataccatggtttatggtattgccaagatgctgaacttcgcacacggagatgttatcatggtgggagcttatatcatccttacctgtatcacaagaggcggcatgtcaccgatccttgctgtgatcctttccgttgtgatctgtacactgcttggtgttgtcattgagaaggtagcttacagtccacttagaaaagcttcctcaaacctggccgttcttatcacggctatcggtgtcagttatctgcttcagaacctggcacttctgatcttcggcgcagatgccaagagtttcgtagctgttatcaaagttccgtccatcacactgtttgacggtgagcttaccatcaagggaatcaccatcgtaaccatccttgcatgtatcatcatcatggtgggactttccctctttgtaaaaaagacaaaacctggccgtgccatgcaggcggtttccgaggacagagatgcggcacagctgatgggagttaacgtcaatgcgacaatttccctcacatttgccatcggttccggacttgcagcgatcgcaggccttctgctctgtcagacttatccgacactgactccgtacacaggagccatgcctggtatcaaagctttcgtagctgctgtattcggtggaatcggttcgattccgggagctatggtcggcggtatccttctgggaatcatcgagatcttcggaaaagcttatatttcttcccaggttgcagatgcgatcgtatttgcagtcctgatcgtcgtgcttcttgtaaaacctaccggactgttcggcaagaacatccaggagaaagtgtaaggtggccgatatgaagaatatgaaaaacaaaacaacaaaaaataacatgatcaactatggaattgtcattgtgctttttgtgatcgtacaggcactttcctcaactggaaatctttccagacttcttatgggacttcttgttcccctttgtgtttataccattgcatcagtttccctgaacctggtagtcggtttttccggtgagttgagccttggacatgcgggcttcatgtgcgtgggagctttttccagtgccctgttttcacaggttgctgcagattctatcccgcaggttccgcgctttatccttgcgatccttgtaggtgcggcagttgcagcactgttcggtgtgatcatcggtattccggtacttcgtctccgcggtgactacctggctattgttacactggcttttggtgagatcatcaagaacctgatcaatgtactttacattggcgtggatgacaaaggacttcacgttgcaacaagtgcagccggtcttcatctggaagccggcggaaagcagattctcaaaggtgcccttggtatttcgggaacagcaactctttataaagatatcaagaattactttttcctgatcggcgtgatcctgcttcttctcacattgtttattgtacagaaccttgtaaactccagaagcggacgtgctattatgtcaaccagggacaaccgtattgcagcggagtctgtaggaatcaatatcaccagatacaaactgcttgcatttacaatttccgcagcccttgcaggagttgcaggtgtgctgtatgcacataacctttctcttcttaaggtttctgtattcgattacaatatgtccatcctggtactggtatatgtggtacttggcgggatcggaaatatcagaggatcgatcatcgcaaccattatcctttatgcactgcctgagcttctccgcggatttgcaaactaccgtatgctgatctatgccatcgtactgatcatcatgatgctctttaactgggcaccggcagcaagagactggagagcacgcatggtagagaaattcaaaggcaaaaaagagaaaaaggaggtggcctgatcatggcaatgctggaagtaaataatctgtctatccagttcggcggtcttcgtgctgttgacggctttaatatgaccattgagaagggacagctctatggactgatcggacctaacggtgccggtaagacaacggtattcaaccttctcacaggtgtatacaaaccaacagagggaatcatcagactggacggccaggacatcaccggaaaaagcaccattgagatcaacaaggccggaatcgcaagaaccttccagaatatccgtcttttcaaggatatgccggttcttgacaatgtaaaagtaggacttcacaatcatcatccatattccacactgaccgggatcttaagactgccgaaatattacaaggtagaaaaagagatgaacgaacgtgccatggagatcctgaaggtctttgacctggataaggaagcagacactctggcaggcaacctgccttatggtaaacagcgtaagctagagatcgccagagcccttgccacagatccgaagcttcttcttctagatgagccggcagccggcatgaacccaaatgagacgcaggagctgatggataccatccgttttgtgcgggagcattttgatatgacagtccttctgatcgagcatgacatgaaactggtcggtggtatctgtgaggaactgacggttctgaatttcggtcaggtactgatccagggtgagacatctgcagtactgaaagacccgactgttatcactgcatatctgggagagtaaggaggaacgagacaatggcaatgttggaagtaaaggacctccaggtctactatggtgtgatccaggctctgaagggaatttcttttcatgtaaatcagggagaggttattgcgctgatcggtgccaatggtgccggaaagacaaccacacttcagacacttaccggaattctttctccgaagtccggaagcattgtgtttgagggaaaagacctcacaagaacaccggcccataagatcgtagagatgggtatggcacacgttccggagggaagacgtgtatttgcggatatgtccgtttatgagaatcttcttcttggagcttacacaagaaaagacaaggcagagatcgcagagagccttgctggtgtatacaagagatttccgcgtctggaagaacgtaaaggacagcgtgccggaacactttccggtggtgagcagcagatgcttgccatgggacgtgcactgatgagcagaccaaggatcattttgatggatgagccgtccatgggtctgtcgccgatttttgtaaatgagatttttgacattatccgcgaggtaagtgagagcggaactacagtgcttctggttgagcagaatgcgaagaaggctctttccattgcggacagagcgtacgttctggaaacaggaagcattactatggatggaaaggcagaggatcttctgaatgacgaggccgttcagaaggcatatcttggagagtagggggaaagacatggataatttcgtaattaccattgcaagacagtatggaagcggtggacgtaccatcggagaggagcttgcaaagaaattagggatttcttactatgacaaggatatcatccgcatggcatctgaggagagcggcattcatgagcagctttttggaagggcagatgaaaatgtcagcacaaagcagagattttttgcaaagtccggaatctacaagggtgagctgatcccgcctcagagcaaggattttacatccgatgagaacctgtttaattatcaggcaaaggtgattcggcagctggcagaaaaagagtcctgtgtgatcatcggacgttgtgcaaatatgatcctgaaggattattccaatgttcttcgtgtgtttgtttacggagactgggatttccgtatccgtgaggcaagtaagaagctcagcggaactacaaaggatattgagaaatttatgcagaaggatgacaaacgcaaagaagatttctgcaaacgtttcatgggtgttgactgggcagacatgacgaaatataatctgtgcctggataacggtacccttggttatgagaaatgtgtggaggagatcgagagtgcacttgagatcctgaaaaaataagacatatatcagagaatattccccgggaaagaaaagccaaaagtcttttcccggggattttttcatatattgtggaaaagtatatttgatccggcgggaaatatggataagcgaaaaaaatatttctgtgtagtggcaatggtattgatcctgctcagcggatatggaaaaatctcagacagtgcatttcggatgcgggtgaccagaatgatcgccggtgaggggatgctccagctggtggcggcgcagtacggacaaaaagcagcagaaccggtggctgagacagtatctgacagaaacgaaaaagaggatcgtccacgtgtggctcttacctttgatgatggaccgcatgcaacatatacacctctgcttctggatggcctgcggaagcgtgggatccatgccacattttttcttatgggaaaaaatatccggggaaatgaggagatcgtaacgcagatgcagagagacggtcatctcatcggtaatcacacgtatgatcacgtgcagcttgataagcttcccggtgatcaggcatgtcagcagatcataaagacgaataatgagatctacgagatcaccggagaatatcccatgtatcttcgcccgccctacggtgcctggccgaaggatctggagctctgtgtgaccatgctgccggtattttgggatgtggataccctggactggaaatcaaaaaatgtccgttctgtggaaaatatcgttcagcgggaagtgaaggatggctccattattctgatgcatgacagcttttctacctccgtggaagcggccctggagatcgcggatatgcttacggaagaaggatatgacctggtaactgcagatcagctgctggtgatgtaactgtgatttgccgaaaaggcagaaacgattgcttttttatgtgcaaacaggtaaaattataaaaataaggaatctgtccgtatgccggaaacaaatgaaacgatcgttgccggatacaaatctatgaaaagaatacggatcgtgaatatccgctttttacagaaaatacaggagtgaaagccatggatttatttgaatacgcaaagtcaaaaacgctggatcaggagtcacctcttgcatccaggctgcgtccgcgaacactggatgaggtggtgggacagcagcacatcgtaggaaaagataaattgctgtatcgtgccataaaggcggataagctgacatctgttattttttacggccctccgggaaccggaaagaccaccctggcaaaagttatcgccaataccacaagcgccagctttacccagatcaatgcaactgtagcagggaagaaagatatggaagcagttgtaaagcaggcacaggacgatctcggcatgtatggaaaaaagaccattctgttcattgatgagatccaccgtttcaacaagggacagcaggattatcttcttccctttgtggaggacgggaccatcattcttatcggggccacaacagagaatccatattttgaggtaaacggagcgcttctttcaagatcgatcatctttgaattgaagtccctggagataccggagataaaggaactgatcctgcgtgcggttaacgatccggaacgtggaatgggaagctatggggcggtgatcgaggaggatgctctggaatttctggcagatatggcaggaggagacgccagaagcgccttaaacgccatagaactgggaatcctcaccacacctcgtgatacagacggtaagatccatctgacccttgaggtggcttctgagtgtatccagaagcgtgtggtgcgctacgataagaacggggacaatcattatgatatcatttctgcctttatcaagagcatgcgaggctccgacccggatgcggcagtctattatctggcaaaaatgctctatgcaggagaagatgtgaaatttatcgcaagaaggatcatgatccttgcttccgaagatatcggaaacgcagatccccaggccctctgcgtggcaacggcagcagcacaggcagtggaacgtgtgggaatgccggagtcccagatcattctttcccaggcagttacatacatggcctgtgcacccaagagcaattctgcagtaaatgccatacaggaagccatgcgctgcgtgaaggcgaagaagacaaccgttccggtgcatctgcaggatgcccattatggtggccacgaaagtctgggtcatggtatcggatataaatatgcccatgattatccgaatcactatgtaaaacagcagtatctgccatcagaaatcgaaggagaacatttttacgagctcagtgatatgggatatgaaaagaaactgaaagagcatatgaagaagatccacgaagaagcgaaataaatgaatataagtaaaacggaggagcctctcagagaagctcctccattattttgtcataaacattctggtatttataaggccagctttcacatacagactgtgcagcagcaagatttggcacattgatgctgagatcaacgatgctgacgccgctttcgatgatccgcagacgtaccgagtagctgccctctttggtgggatagtaatctgcaggagtcaggagatgttcttcaatcttgcagtggagggaattgagatattcttccacttctttcttgatgtcagaggaaagttctttggaaaaatatttcagagtgttttttccctcggaggtcagtcgatagtaactgcggttggactgtgaagacatttccaccagatctgcctccacaagttcggaaactgcctgctggagctgaaaataattggtgtatttccggtccaggataaaatcggtgatctgggaatttgtgagatccccatcggaattctgcagcatatataaaataataagcttataggttgtaaaaggtgatgccataagaatcctcctttttactggctgcgggaaagggcttcgagagcttttccctgaaaacttgctctttctttcatccggtgatgaagaaggtttaaaacttctcttttgcggctggcccataaaggtgcgatcagcagatccttcggtccgtcgccggtgacccggtggatcacgatatccggtctgagatgttccagacagtcaatgacaaggttcagatactcgtcccgttcataagtgcggaaaagaccggcttcatgatcagcggcaagatctgtaccacgcagtacatgaagaagctgcagcttgatcccctggatatccatggcgttcagataagccattgtttccaggatatccttccggctttcgccgggaagccccaggatggtgtggacgatcacttcgatgccgcctgcgcggagattttttactgcggtatcaaaacaggacagtggatagccgcgccgtatatatctggcggtatcttcatggatagtctggagtcccagctccacccacaccggtttgatctggttcagggaatcaagaagctccagtacatcatctcccagacagtccggtctggtaccaatggacagtgccacgatatccggatgggagatggcttctgtgaagatcttacgcaggtgttccacaggagcgtatgtgtttgtatatgcctgaaaataggcgatatatttatggatcgggcgtttggaagagagacttttgatctgtgtgttgatctgctctgtaatggaaagagcggcgtttgctgcaaaatctccgcttccgccctggctgcagaagatgcagccttttttgcccagggtgccgtcacggttgggacaggacatgccgccatttaatgcaacccggtagaccttttcgccgtaccgttcccggagcatatagtccagagagtgataaggcttgtcgttccagcgcttcattatgcctctttcggttcgtttttctcttcgccgttttcttcgttttcatctttcggtatatagttatcgaagatctttacaaagatctttgatttccagtaggccagcgtggaaaatcccatcagaataaaaagcatgatcaggatggatgtaacctgtgcgtagctcacataagcaaaaagccacatcagtaggagtggagacgcagagatcacaagcatcaaaagtgtcagcggaagatggcggacggacatcaggaatgcatttacaaaggtattcttgacggaattaaaaaatttggaaaggatcggataaatgtacagaaggatcatcgcatagatcagtgcaaatgcaatgaacagactgaaaagtcctttgtacatagctccgcttccggctctggcgatccgaagatcgataaacagaacagcagcggtgaggagcatgatgatattgatgatggttgcctgtttgaagttctgtttgaatgagcggaaaaagctgcgggcaatataagattcttcgtctcttgccatcttcagtgtgacatagtagagagctgttatggaggcgcctgcggtaacaatcggaatacagcagaggatgcacagaaaattcagaagaagcaggtctgctacgcgtcccatgaacacgaagaatttgttgtccatgttgaaaaaacgattcatttgataagtctccttttcttttggatattattttaagtatacccaatcacagcagaaaaagcaaatcccaaatgttttccgaggtagtggaaatgggaaaatcatgtgtccgccatagaaagacaaaatagcaaaatagtttattaaatttccctaaaaggcttgcttatcacgatttagagtgttaaaatatcagtattgtattagacgaaaattatgtattttaaaggagcgtaacaatgagcaaaaaaatcaggacggaggctgtggatcatctttttgaagcgatcctgtgcctgaaggacaaggaagagtgttatacattttttgaggatgtgtgcaccatcaatgagctgctttctttatctcagcgcttcgaggtagccaagatgcttactgataagcgtacataccttgatatttccgagaaaacaggagcttccacagctacgatcagccgtgtgaaccgttccctgaactatggaaatgatggttatgagatggtatttgcacgtatgaagaaggataacggggagcagggcggcgaagcagaataaggcttacgtccataccgtgatgataacggataatgctgtaacgaaaaagagacaggcgattgtacgtctgtctcttttttttcggtgcgcccggcgacgcacgtttatgaccggatatgagctccggatattatttgtctttttttgagaaatccgtatcttttgaggaattcatgtggtcgatcatgttttcgatgatcatttttttcatgtatacgtcgaagctaagaagacagataaaggaaaactggtgaaggaattccttatcctccgggtcggcgtcctcaaaaatttctccggcacttttgaaacggcgcataagatccttttccaggtaacggatctgtgactgctccatactgaaaacctcctggtagatgtaagtcatgtccttttctgtaacggacttgaagtatttctcggtgatcggtcccagaagggtctggatatcactgatggagaggatattcttaaaatagtagataaagatcagcatcagcagatgctcccgggaataccgctttttttccggcgggggaaggagcttgttctttgcgtaattgttgatcatggtcttggtcaggatcttatcatcatcatgacgcttggtggaagcgagattatcttccataaaggttgtgacctgatccatgtaaagagcaatattgggaatttcatcgggttttatataatcaagctcagcaatttttgcaaaaatgctgttcatcatttctttttcgttttctgtcatcgcattatcacctctgctccctattatatagttttaaatactacttgtaaagaaactttttttcagagaggtgggtttaccggaaagtaaagtcatgatagtatataaagatactgttcatatggaaaaagaaatggagatcaaaatgagtatacacgatgctttggacacattgaatcctatgcagcgggaagctgccgtacatacagagggaccacttctgatcctcgcaggagccggttccggaaaaacaagagtgctgacccacaggatcgcctatttaatggaagaaaagggtgtaaacccatggaatatcctggcgatcacctttaccaacaaggccgccagtgagatgcgggaacgtgtgaataaaattgcgggaatgggtgcggagagcgtatgggtctccaccttccattccgcctgcgtgaggatcctgcgcagacatattgaggtgctgggctttggcagtaattttaccatctatgatgccgacgaccagaaaacagtcatgaaggaaatcttccggaagtttgatatcaataccaagatctacaaggaacgcgctgttcttgctgagatttcccatgccaaggatgaactgatcacaccggaagagatggagctgaatgcgggtggcgatccggatgcacggaagattgccggtatgtataaggaatatcagtctatcctccggggaaacaatgcactggattttgatgacctgatcgtgaagactgtggagctttttcagcataatccggatatcctggactattatcaggaacgttttaaatatattatggtggatgagtatcaggataccaatactgcccagtttaaatttgtaagtcttcttgctgagaaatacaagaatctctgtgtggttggtgatgatgaccagtccatctatcgttttcgtggagcaaatatcgggaatatcttaggatttgagaaggtttttcctgaggctaaggtggtgcgcctggaacagaattaccgttctacccagaatatcctcaatgcagccaatgaggtgatcgtcaacaacacagagcgtaaggaaaaacgcctctggacagagaacgaagagggcgataaagtacatttccgtcagttcaacaacggatttgaggaagcggagtatgttgcaggagaaatcatccaggggcgccgcaacgggaaattccagtacaaggattgtgcagtactttatcggaccaatgcccagtcccgtctctttgaggagaaattccttctggcaaatgttccttataagattgtcggcggcgtgaacttttatgcccgcaaagagatcaaggatctgttaagctatctgaagaccattgacaatgccagtgatgatctggccgtgcgcaggatcttaaatgtgccaaaaagaggaatcggactcaccagcatcggccgggtccaggactatgcggatatgatgaacctgagcttttacgatgcgctccgcgtggtggaggaagtaccgtccattggcagggcagcaggaaagatcaatgattttgtatcctttatccagggactgaaaagtaaggcagaggcctatacagtccgtgaaaccctggaagaggtcattgagcttaccggttatgtgaaggaactggaggcagagaaaacggaggaggcccaggcgaggatcgaaaatatcgatgagctgatctccaagacagaatccttccaggaagccatggaggaggccggacagccggcaacactttctgcatttctggaggagatcgcactggtggcagatatcgattctgttgatccggatcaggattatgtgctgctgatgacccttcacagtgccaagggactggaattcccaaatgtatttatcgtgggaatggaggacggtgtttttccgggatatgcttccatctggtccggtgatccgtcggatatcgaggaggagcgaaggctctgttatgtggggatcacccgtgccatgaaggaactgactttaacctgtgcaaaacagcggatgatccgtggggagactcagtataaccgtgtgtcacgttttgtaagggaggttccacgggagctggtagatcttggacataccattcaggagaaaaagcccagggtagatgatatcgtatctccgaaaagcgcctatgcccagatgaaaatgaatttccaggcaaagagcaccctgcagaaaaaagatttcacagtgaagaaggcggacagcctggactatggtgagggagacacggtccgtcatgtgaaattcggagtcggtatcgtaaaaaatatcgcagacggcggcagagactacgaagtgacggtagactttgataaagtcggcgtgaaaaaaatgttcgcaggttttgccaagctgaaaaagatctgagagggatctctccgggcagactatttctgcaaaaaactgtaaaaatccggcctcaaggttgtaattggaaaaccggtatgttagaatcagtatcagcgtaattgaattgctgtgaagtgaacagtatcaccggcacatatgctgccggatactgtgagagggaatcgggtaaaaagcctgagcggttgcggccactgtatacagaagaagggatttcacatgccattgcagaaacttatgtgagaaggcgaaatcccgatgtcagagagattctggagaaaattctgatacatcattcatgatcggctaaaagatgaatggtgtatcagtttttattttgcggagttttttctgagtctgtaagtcaggaaacctgcttgacagtatgtaagtgggagcttccgtacaaagtgttccgtgcagattttatgaagccccatcttttcggttacccataggcaacaggagataaaacaggcgaaaagagaggaaatgaaatgaaaaacaagtatgtatccacaagaatcatggcaatggtaatggcagcggcaatgaccgtatcagcagctccggctgtttatgccgcagagagagcagactccgagaccatcaaggaagacaaccagccggcagcagaagacagtacagagtctgcagacaccgaagattcttccgcagaggcaaccaagacagaatatcctctgaccatcacaacctatgattacgatggaaacgaaatcgaaaccacttatgaaaaagcaccggaaaaagtccttgctgtatatcagggaagcattgagactatgctcgcacttggtctggaagaccacctggtagctaccgcaggtcttgataatgaagttccggaagatctcaaagaagcattctcaaaaacaaattatcttgacgaatttaccccatcccttgaaactgtaacaatgctggagccggacatgatcttatcctggagctctcttttctctgataagaatctgggaaatgtaacagactggatcgacaaaggctgcaacacctactacaacaccaatactcgtccggacggcgacagaacactggaaaatgaattcacagatatcttaaatatcggaaagatcttcgatgtacaggacaaagcacaggctatcgttgatgatgcaaaagcagtgatcgacaaaactcttactgcaactgcagatgtaaaagacaaaccaagcgtaatggtattggagcctcttggagatgacatcacaaactatggcgtaaagagccttggcggagatatggtaacacagttaggcgcaactcttgcaaacccggatgcttccaccgttggaaaagaggatatcatcgcagccaaccctgacgtgatctttgtggtttacatgccatatgcaggagatgatccggaaactgttaagaacagccagcttgcagtgatccaggatgatgagtccctgaagagccttgacgcagtaaagaacggacgtgtttacccgatcatgctcagtgagatgtatgcaagtgcaacacgtacccaggacggaatcgaaacttttgcaaagggattatatccggacgtaaatcttgactgatcggagaaaatgcagtgaaagaaacagcttcacagagaaaaaaagataaggtgctcagaacatccatgtatgtggcagttctcatcggacttgcaggatttcttattttttccatacttgcagccatcacttttggaaatgcggatctgtcactgaaggatgtatacagcgttatcgcttataaattgtttcatataaaaagtctgtccgcctatgcggaaggcgcagttcatgatgttgtgtggctgatccggctgcccagagtccttctggctctggcagttggaatggctctttccgtgtgcggcgtggtgatgcaggctatcgtgcagaacccgctggcagacccgtatgtgctgggtatctcatctggtgcatctctgggtgccacactggccatcatgcttggaatcggaagctttcttggcggaaactctgtgggaattactgctttcattggtgcgatgatcacttcttttgcggtgatcgccattgcaaacatgggtggaaaggcaacttccgcaaaactgatccttgcgggaatggcggtcagcgcagtctgttctgctttttccaattttgtcatttatattaccaatgacaaaaatgcggcaacagaagttatgaagtggagcatgggaagtcttgccggagcaagctggaccagagtgggtgtaatgcttccggtcacgctggtgtgcgtggctgttttctggacgcagtaccggaacctgaatctgatgcttctgggagatgacgtatccattacccttggaacagatctgcacagactgcggactttttatctgatcgttgcttctgttatgatcggatttgccgtgtactgtgccggtgtgatcggatttgtgggactggtgatccctcatgtggtccggatcctttttggaacagatcacagaaaactgctccccttaagtgcgcttcttggtgcatcgtttctgatctggtgcgatgtggcatgtcgtgtgatccttaaaaattccgagatgcccatcggtgtgctggtatccattatcggtgctccctgctttatttatctgcttgtgcggaaatcctatagattcggaggtgcccggtaatgaagatcaccacagaaaatattcaggttggctttcacgccagacagatcctgaagggaatctccatggaatcccaggataaggaactggtaggaatcatcggaccaaacggaagcggaaaatccaccttgctgaaatgcatttaccgtattctgaaaccagacgcaggagccgtgtatctggacggcgaggagcttcattccatgagtgttcgaagctctgcgaaaaaaatggccgtggtggcacagcacaattattataattttgattttacggtccgcgaggtggttcttatggggcgtgcgcctcataaaaagactctggaacgggacaatgcaaaagattaccagatcgtggatgaagcgctgaaaaccgtacagatggaggcgtttgcagaccgtaccttttccactctttccggaggagagcagcagagggtgatcctggcaagagcacttgcccagcagacctctgcactgattctggatgagcctaccaatcatctggacattacccaccagatcatgctgatggagctggtgaaaaaacttaatgtaaccgtgatctccgctattcacgatctgaatattgcagcagcatactgtgataagatctatgtactgaaggacggagttctggaaggttacggaacgccggaagaagtcctgaccccggagctgatccgcaggatctataaagtagaagcggagatcgtttacgacagctgcggaaagatgcatattttgtttttatgattctggctgtgaggcgggatgcatagagggaaaaagatgaaaaagatcgggattttgacatgccttaattccaatgatgtgtgtaccagggcaggatgtctgtctgcatttcgggaaagaagagattttttttccggctatccggaagatacgattctggcagctgtgatgacatgcaacggatgcaaagaaaccaatgcaaaagaacctgctgaagatgaggggattttggaaaaggcagatcggctggtcagtgaaaagatcagcgtcatccatgtcggggtatgccgtctgaatgaggaaaaaaaggaatgtccgcggataacacagatctgcggtctgatagaagaacgcgggatcaaagtgatccgaggaacccataaagaataagagaaaaccgccgtatctttccggaaatgccggaaatacggcgatttttttacagaatgtttctgcgaaaatttgtgtaagttctggtaaaaccagacatatggtggtataataagaacattaaaaaaggctcgggtgcagcgacctcaaaaaacgctgcgctgcagatttactgacagaaagtacagccgaacagaaagaaaggatggtgcagtgttatgaatttaaatacaacaaaacttgaagaactgctcgcaacactgaagaaaaaagaagaagagaaagataagaacacagtcctttgggtactggcgatcatcggtgctgttgcagctgttgccggtattgcgtttgcagtataccgtttcttcgctccggattatctggaagattttgaagaagattttgatgatgacttcgatgattatttcgaggatgaggaagagtaagaactttcactgcagaggctgttttgagcagatcagaatggctgtctgttatgtatgaatatgagaagcggataattgaagccccggcgcgataccggggcttgatttttgaagacggaccgtgaaacgctgcactagttataaaacagaaagaggatttatgaaaaaaggtgaaatttacgaaggtattatagaaaaagtggaatttccaaacaaaggttttgtttgggtcgatgaccagaaagtaattgtaaaaaacggaattccgggacagaaagtccggtttatgatcaataagaaacgttccggccgggcggaaggacgtcttctggaggtcctggagaaatctcccctggagacaagagaacctgcctgtcaggagtttccggcatgtggcggctgcatgtatcagaccatgagctatgaggcacagaaggaaatgaaggaatgtcaggtgagggaacttctggatggggcagtaagagagagcctggctaagatcgggaagaacggtgatgggacagaagaagctgaggctgcagatcgtttatatcactgggatgggatctacggcagtcctattgagttcgggtaccgcaataagatggagttttcctttggggatgagtataaggatgggccgctgtcccttgggcttcacaagaagggaagcacttacgatatcctgaatacggatgactgtaagcttgtccatccggatatgacgaagatccttgtctgtgtgcgggagtttttcctggagcgtaatgccagcttctataaaaagctgcagcatgtggggtatcttcgacatcttcttcttcgaagaggcgtcacaagtggtgagatcctggtccatgtggtaaccaccacccaggaagaatatgatctggagcctctgaaagatcagcttcttgcacttccgctggaagggaagatcgtggggatcatgcacattttaaatgattctttatccgacgtggtacagagcgacgagacgaagatcctttatggaaaggattatttctatgaagaacttcttggactgaaatttaagatcagcaccttttcctttttccagccaaattccctggctgcagagatcctgtattccaaggtgcgggaatatgtaggagataccagagataaggtagtgtttgacctttacagcggaaccggcactattgcccagcttgcggcgtccgttgccagcgaggtgattggcgtggagatcgtggaagacgcggtaaaagctgccagagaaaacgctgcacttaacggcattgataactgccgttttattgccggggatgtgctgaaggttctggacgaggtgccggagaaaccggatatgatcatccttgatccgcccagagatggcgttcaccccaaagcccttccaaagatcctggcttacggtgtagaccagatcgtatacatttcctgcaaggttacaagtcttgtgagagacctcccggcattttatgaggcaggatatgagatgacccacgcctgtgcagtggatcagttctgccagggagttcatgtggagactgtgtgtctcttgagcaaccggaaccggatgacacgatagagatcgacttagacttaggtgagctggatgcaaccagtgcagagacgaaggcaacctatcaggaaatcaaagattatgtgctgaaggaatttggcttgaaggtttcaaatttatatatttctcaaatcaaaaggaaat

SEQ ID NO: 195 - DNA, 14891 bp, Unknown
  gut microbiota DNA sequence
gaaatatgtgtccgataaagaggatattaagattgcaaactataaggacagaacaggaatcaaagcggacttaagaccgtacgaggcgtttatgatgaggatccggtaattcctgagctgttgtatatgtagtagtaaagtggaagaaaagtctccgctttacagagagcaggtatgagtatttgtgcgtatctgtactgccaaaggatatccgggtgcagtgcagatacgctttttgcctgtggggaaaagacaaacaggaggaaattatggaaaaatatatcattgcagtggatatggacggaactcttctgaacagcgagaataagatctctgaaaggaacagaaatgttctgcagcgtctgatcgatgacggacattatgtggtgccggcaaccggaaggaccagagagctgatccctcaggagttttctgtgctccggggtgtgaaatggggaatcgtggaaaacggctgtgttgtctgggattacgataaaaatgagatgatctggcgaaaaaccatgccaaaaggaatggtaagtaaaatcctgaaggatgtggaaaacagtggcgcaaaaggctggatcgcagaggcttatgcaaatgggatcgcctattccgatgcggatgccagagattatgtggcatctgtagcggacaaagatctgctggagaaaacctttgtggattattttctcagcagacataaatatgttaaggatttttatcatcaggaagatattctggatcaggcagagaagatcaatatttattttgatgatatggagaacagcagggaacttcgcgagaaatggaaggatctggatgatgtggcagtgaccacttccatcagcggcaatgcggagtttaatgctgcaggtgtggacaagggtgtgggtcttgccatgctccgcacaaagcttggtattgaccggatgcatgtgatcgctttcggagataatgagaatgatctggaaatgctggagggtgcgggcattggtgttgccatgggcaactccaaacagtatgtaaaggatgccgccaatgaggtgaccggagataatgatcatgatggtgtggcggaatttctggagaggtttttcgggctgtaagctgtgggcgatcgtgatcgctgacataagagacagggaaatgtatttttctctgtctttttttattttcattttctgtgatataaggtatgataaacgaagaggatgaggggattaccggctttgaccggtagttcccagtgaaaattttttgaggagatcaggaggatattttttaatgaaaaatctgataccgaagcgtgtgatggagtatatcattatcacatttgctgttgttctgatggatgtggggatttatgtgtttaagtttccgaataatttttcctttggtggtgtttcgggtatggcggttgtgttttcgcattttattccgatgacgtctgcgcagatcaacctggtgatcaatctgattttgctggtgatcgggtttattgttcttggccgggattttggagtgaagacggcttatgttacggttgtttcttctttgcttctgaatgtgtttgagaaggtttttcctatggacagggcgctgacggggaatattatgctggagctttgctttgcgatcattttgccggcgctggctgcggcgctgctgttttttgagaatgcttcgggtggtggcacggatattgtggcgatgatcattaagaagtattctacgatgaatatttcgggtgcattgtttgcagtggattgtgtgatcgttgttgtttcgtttatggtgtttgatcttactacggggctttgttctgtgttggggcttatggctaagacgttgatgatcgataagtctattgagaggatgaagctgaataagtattttacgatcatttccagtaagccggatgagatctgtgagtttattatgaatgggttgggtcggagtgctacggtttatcatggggagggtgtttattcgcataaggataagaagattattctgacggttgttgatgtgagacaggcggtgcttctgcagaggtttattgatgaggtggatccgcaggcgtttttgatggttactaagagtagtgaggttgttgggaaggggtttatgagttatatttgatgcgatcgtatggggttgtatgctgatcgtagatgattgtgtatgattgtaaactgatggaaattaggagagcgttctttgcgggctggatgggctgcggggcgctcttttttgtggtggatggtggatggcggatgccggacgccggggagacgggtgccggtttgctccgggcttcgtcgggggctggcttctaggctgccggaattctgctaaaaccgtttttaaaaagtccgaactcgcggcttgctgccgctcagacagcggactttttaaaaacaacgcagatttccgccagccaagaatcagctcccctcctgcagagtcgtagccaaccggcacccgtctccccggctgttcggttccgggcgggaggtagtggtgggtgtgtggggcgactggcggaagtggggattgatgagggctggaggattgagtggattcccgggagttggatgagccatcagcgctgcgctggatggctgggaggaaaggctgagtttcctgtggtctgaaggtgagggatgagccatcgtcgctgcgctggatggctgggaggaagggctgagtttcttgtggaagccatcgtcgctgtgctggatgactgggagaaaggttgagtttcctgtggtgaaggtgatggctggggcatcgtcgctgtgttggatggctgattggtgtgtgaaggttttgtgaaagaggtttgacaggtgggggtttttatggtaggatacacacttgcgtaacaaatttaataaaaatgtaacaaaatggcgaatgaggagcgtggcgaagtggattgtgaatgtctgcctgaatgggtgggtgctgctgcgtggttttctgagaggagttttattgtttatgttttataagaaatttgctgctgttgttctgagtgctgttcttgtgggtgtggttccttctgttgtttttgcggatgtggatggtgtcagtgctgtgtctgatggagatgtggaggagctttctattgaggatgatttttcggatggtgcggattctatttctgcttttgccagtgctctggcggataagacggtttctgaggttcaggggtatcaggaggcgaaggctgaggctgaggtgatcgcgcaggagaggcttgaggccgaagcggctgctgaggctgcgcgtaaggcggaagaggagcggaaggctgctgaggaggcgcgtctggagatgcgacaggggattgtggattttgcgctgcagtttgtggggaatccttatgtttatggtggtacgagtctgactaacggggcggattgttcggggtttgtgatgtcagtgtttgcggagtttgggtatgagcttcctcgtgttgctgcagctcagtgtgcggcttctgagaagaagagtgttgcggatattgaggctggtgatctggttttttatggtgatggtggtattgatcatgtggctctttatattggtgatggcaagatcgttcacgccagtacagcggctacagggatcaaggtttccgactatgattaccgtgctccggctgcggttggttcgtttgtggcttaggatatagatataaatgatttactgatatgaaatataaactgtctgcggagattttttggccgggttggctgaaaaatagctgcgggcagtttttttgaagaaaaatagtgtataatttaaccgaaccaaggaagttccctgcggggttgcgaaaagcaataagcagtgggtggggactcggaaaaaattcagaaaggttgtggggttatgaatacgaaggaaatcagtggcaggcggcagatggagtttttgacggggtttgattttgtcagagaagcgggtactgctggggaagtgaaggcggcgaagatgatccgggatactttggacagcttcggagtgaagaatcggatggaggagtttgatttttggggttttcggatcaacagagcggtgcttaaggttgtggagccttatcagaaggagtatgtggtgaccgggtatggaagatgtggaaatactggggcagaaggtctgaaagcggattttttgtatgtggagaatggagatgctgtcagtctttcccgggcgaagggtaagatcgttatggtgaatggccgggtgagtggtgatgtgtatcagagactggtaagcgccggagctgttggttttatcagtgtggagggttctccgctggatgaaggagtggacagggttccctgtcagcgcagcctgccgatgatctttccgggggatgcagcagaagtgatagaaggattgtcggagtctgcagaggatattcacgagatgcaggaaaaatatagtggcaggattccgggagcgaatcttcattataaggatgcagtggagctggtgacggagggggcagctgtggtttgtctggctgtagaacaggaagtgacggcctgtacatcccgaaatgtagtggcgaggattgaaggtacggataagaaagatgagattttaacgcttacggcgcattatgattcggtaccggagggaccgggggcctatgataatatggccggagcggcgatcatcatggagctttgcagatattttcagcagtacagaccgcgcaggactatggagtttgtgtggtttggtgctgaggagaagggcttgctgggcagccgggattatatcagagttcatgagagtgagcttggagcgcatcgttttaatatgaatgtagatctggccgggcagctgatcggaggaaatgttctgggagtgacgggagaggcttctgtttgtgataagcttcttgagatcgctgacggagcagggatcggagcgtctgtgaagaatcagatctggggaagtgattccaattcttttgcatggaagggaattccggccatgactctgaaccgggatggttttggcatgcatacccgttatgatactattgatctgctgtctgcctggtcgctggagagaagtgcaatccttctgggatgtattgcagatgaactggggaatgcggaggttttcccatttgagagaaagatgccggagaaatttatcggagagctggatgaatatatgtgcagatagtaaaaatctgattttatctgctcataactggatatttgttatggaactgtggggacttgtctgtttcgagaagagtacagacaagtcctcataagttattcaatattttcaatgtttattgacctttataattccgcaagggaacatgtggctttgagtcagggggatatttgcagctttgtaagggatttccggaacaggggcaagtggatgttcgcaattgaatcatggaacttacttgatttggtcaaaatacgataaaacaataaaaaataatactaaataattgacagtaagataccgaactgttatactgaaatcacaggctttccagggatcaatgcgccggatattgttttgcggagtattgatttctggaacttttatcacagaaaaatcgggaatgaggagataggaccatgtttacagaagaacgacagaatgcaatagagaaatgtctccgcgaaaaaggaaaagtcagggtcaaagaattaagcgagatgtttcaggttacggaggactgtatccgcaaggatctcaagatccttgaaaatgcaggcagattaaagaggacttacggcggagcaatcctgtcacaggagtatcctctggagagaaacgtagtagacaggcgtatgtacaatcttgataagaagaaagtgatcgctgcgaaagcctttaagctgatcaaaaataatgaaacgatctttctggatgtttccactacaaatatagagctggcaaggcttatcgcttcgtcgggtatgcatgttgtggttgtcagcaatatgatcgatatcctgcagatccttgctgcgaatccgtccatcacggccataggcacagggggaactatgtaccgttcggtgaacggatttatgggagctgcggccattgaggtgatcaagcagtacagctttgaccgggcatttttgggaagctgtggcgtggatatgacagattttgcagttactacatccggagtggaggatggattgaccaagaaggcggcagtgcagagcagcagacataaatatgtggttatggagagagagaagttttattttaacgaatcttataaatatacacattttgatgatatcagcgggatcattaccgatgaatttccggatgataccattgtgaacatactgaggaataccggagtgaaattactctgagcagacggtaacaaagggggatttttacatgaaagactatattctggaaacctgtgtggattctgtggaatccgccatggcagcagccgagggtggtgcggacagattggagctttgcagcaatctgatcatcggggggacaactcccggtccatggctttttgaggaaataaggaagcgttcagatatccggatccatgcgctgatccgtccgcggtttggagatttctgttatacagatgcggaattttctatgataaggaatgccgtaaaggatttccgcaaaatgggagcggagggtgttgtggtaggtatcctgaaaccggatggcaccttgaatatggaacagatgcaagagctgatggatgcggcgggagatatgtctgttacgctgcacagggcttttgatgtgtgcgcagatccgatcgaggctatggaacaggcgatctcgctgggaatcgatacgattcttacctccggacagaagaatacctgccttcagggtgcggagcttctgaaggaactggaaaccaggagtcaggggcgtatcaccatccaggcggggagtggcgtcggtgcggaagtgatccgccagctttatccccttaccgggatcaaggcttatcatatgagcggcaaggttgtaacggacagtgcgatgcagtttcgcaaggaaggtgtcaatatgggacttccgacattcagtgaatatgagatatggcgtacagatattgaaaatgttcgtgctgcaaagaaagttctggaggaattataatggctgaggggaagatttttctgaaagaaaaccgtgatcggatcgaaaaaaaatatcgggagcaggtgatggggttaccgcaggtttttgcggagattgataaaaagcttgcggaatgcacagaagaagtggctctggcgtgcaaatatttatatgcgttcatgccatacagtgatatcggaaattacgcgtttgaagtatttctggattatgcggagaatggcgtatatttatggaaggaaaactccggggtggcagagctaccggaggaaatctttttgaattatgtgctgtttcatagagtaaatgaggaggagatcgcaccctgccgtacatttttccgcagggagatcggagagagaactgagggaatgagcttccgggaagctgccctggaggtgaactactggtgtgcacaggaggctacctatcattgtacagatgatcgtaccctgtctgcacttgccgtataccgcagaggaaacggaagatgcggagaggaatctgtatttaccgttaatgcactgagaagtgttggtgtacctgcccgtcaggtatatgcaccaaagtggtctcattgtgatgacaatcatgcctgggtggaaatctggtgcgatggaagctggtattttctgggagcctgtgagccggaggagatcctgaataagggatggtttaccaacgcttcctcaagggctatgatgatccattcaagagtttttgataccatgatcccggagggagaagtgatcggcaaagatggtatggtgactatgctcaacgagctgaaacgatatgcactgacaaaagagatcactgtgtccgtaaaggattcacatggaaaaccggcagaaggtgcagaagtttcttttgaggtgctgaattattcggaatatgccccgattgcagaactgaaaaccgacagtctgggaaaagtcagcctgacaacagggcttggaagtatccatatttctgcaaggatgtatgcagatggagaatggctgcatgcagaaaacagcatggatacaaaaacagaggattgttgtgagatctgtctgatgcccgtaggaaaggaaaagggtattttttatgaggagtggacggagatcgatatgatcgcacctcatgacgcacctgtaaataaagatatgccaacaccggagcagaaggaaagaggcagcagacgtctggcagaggcaaacgcttaccgggaacagaaggtaagaaacctgagcaatccggagtgtcggaaattcctggaagaagccggagattctccaataagaaaaaaactccttgaagtcctcacagagaaagacagaacagactgtatcagccaggttctggaggagcatctgaaatttgcattaccgtatgaaaaaaacatggatgcagatatttttgtaccatatgtactgaacccgagagttgacgatgaagttttgcagaaatacagaaaagagatccttgagcagctgtcggaagaagagaaaaatatgctgcaaaaggaaccggcaaagatctggaagtggatagaggataagatcatttccagcccggagaaagaacgcagcagtgtgatcaccacgccgtccggatgcctgaaaacgggaacaggaagccttctgtcaaagaaaatcctttttgtggcaatggcgagaacactgggaattccggcgcgcctgaaccctcatgaccgttctatggagtatatgaaaaacggaaaattcatcccggtatctgcagaaacggagaaaacctcatcgatccttctgaaggcaagtgaggatacacagtggaaatatttccagaactggagcatcgcaaaactggaagccggaaaatatatcacacggaagctggaagccgaaaatttcagagatcaggtgatgaagctgccattggaagcgggaaattacaggatccttacctcaaacagactgccaaatggaaatatatttgcagcggaatattattttgaggttcagatcggagaaatgaagagggtggagctggcatttcggaatgcaaacctggaagacatgctggagaatatttctataccggaatttactctcagaaaagaagatggaagcaccgtgaaggcgtcagaactgacggcagatgggaagcatatcctggcgtttctggaagaggagaaagaaccgacggagcatatcttaaatgagatgatggagcaggaagaagctttttccagatatgcgaagaggatcatttttgtagtaaaaagcaaaaaagcgctggagacccctaccctttcaagagcactgagcaagcttggaaatgtccagatcttatatgatgatttttcagagatcatcaatacactgggaagaagaatgtacgtagatccggataagcttccgctgatcattgtgacaaacggaagcctgaatgggatctatgcaaccagcggatacaatgtgggaaccggagatatgttgctgagactgctgtgacagatataacggatatatacagaagaaacacaggccgtatcatcgactgtgtcggtgacggtctgtgccctttgtaaaagctgtgaaattattgcagtggttcagatgctcagaatatgcgggcagatcggaatgaaaatgcctgttatgcttcccgaaattgccgtaataaaagttgctttgcattacttagcatcagaaaagagatcacgcacggaatcccggtaaatgcattccggcttcaggcgtatcgtccttggaaaatcactgtagtctccgttcattctgcgaagcagcagatcacaggcctgctctgccagaccggtcagcggctgacggacagcggtcagctgaggagaaagcagcatggacagttcaaaatcatcaaaggagacaacagacaggtcttccgggatccggatgccaaggctgtagatcgcttcataaataccgaggcatagtgtatagttcgcagaaaatacggcagtcggacgttccggaagattccataatttctgcattgcctgatatccaaagtcgtttgcgtaattttcagcgatgatataatcggggttaacaggaatatcgtagtcttccagtgcccggagatagcctttttttcgttcgcatgcggtataggatgcaggagaaccggtgacaagggcgatcttctgatgccccatttttatcagatgctccacgatctcataggctccggaggtacagctggtctgtacacagtctgtacggtggaaatggctgtgttcttccagctccacaacagggattttggcgtgttccacagcagaacagatgtcctggttcagactgaaagaggtaatgataaggccgtcgatcccagaacggagcatgtgagggacgaatttattgacatgatccttatatttgtcgccgctcataaatgtgagagaataaccgtgagcgcgcatggtgttttctattttgctcagaagaaaagcattatgcggagtattgggaggaccggataccagaccgatacggtaagtcttggaggaacgaagtccccgggccgtatttcgtggaacgtaattcagtttccggatcgcttcgtcgatctgctttttgttttgcggccgtacagttccgccgttgatatattttgaaatggtggccaatgccagaccggtttctctggcaatgtccttgatggttgcactcataaatcaatcctttccggatgctgtactgttgtgttcggacaggtcttttacggagcgccgcgggtggaatacaacatccagcatgtctatttttggaaaatccgtatagtctccatgaatcctttttaaaagtaattccacagcatgtttccccatgcttgtcagatcctgtgagacgcaggtcatagtcgcgctcatggtcttgaaaagcggatcatcatcaaagcacacaaaggaaatatcctgaggaacggaaatccgtgcctggctggcagcgcttaaaccacccattgcggagagatagcagttaaaaaaaacagcagtagggggatcggaagaagcaataagcttctggaaatgcaggttgctctgcatgatcgtttctgcagtggaaccaaaagaaacagggggaaaagaatcctgctgtttcagaaggccaatgccatttttctgatatacatccacaaagccctggatccgctgctcgatggtgtaggcgtccagatactgttccatgatccagacctttgtgtggcctttttccaaaaggtgctctgccagcagtgcaccgcctttgtaattatcagaaataacacagtctacaggaaaatgtctcatggaagcaggaatctgatcgagcagtacaaccggtatgccagcattctgtaaaagctggtacaggtcatcatgccagcaggatgggagcatgataactccgtcaaagtgctgggagataatatcctgtatcgtatcgatctccttctgatgctcaaaaaagaatgaacagacaataactgtatagccatgatccgtgaaatgcttgataatggagttgacaagctcgccccagaaataattaccaagatctgagatcaggataccgatggtatgtgtgtttttggcacggagaagctgggcattccggtttggggtatatccaagctcctgaattgccttttctataaggatacgattttcttcccgtatttttttgtggtttatatatttggagatcgttgcggtggacaggcctgtcgcacgggcgatatcattgattgtaacgttcatgtaaagcctccggttctgatgcatttacagataatatagtattttcatattatatcatgaaaaagaaaatgcctcaacacacaaggcattttttacacataaagtatcagaaaaaacgagtgtattgtacataaaattgataaaaatgaaacgtttaacaaaacctgatacgaaaaaatacacaaaaacaagacggaataattgtaaaaaataggaaaaatgatttttgccctatgattttacttgaaaagctgcttcggatgcggtaagatagtcttaacaaaaaacgaaacgttttacgtaacaagaaaatcagctatacgaaacaaggagaaggttatggcagacacaaagcagcagtggtataaagatgccaaatacggattattcatccattggggactttattccatccttgcaggagagtggaaagatccgaagaccggcgaggtcaccaagacagaccgtatcgcagagtggatcgagaacaatctcaacattgacaaggaagattacagaaagctgaaagatgagttccatccggacaaatttgacgcggacatgtttgtgaaaagagcgaaagagcagtggggtgttaaatatatcgttcttacttccaagcatcacgagggattcgcaatgtacgattccaaagtcagtgattttaatgtagtgaaggctgcaggaagagatatcttaagagagctttccgatgcttgtaagaaatatgacatgacaatgggtatctattattcacaggctcaggactgggatgatgacaatgcctataagaaggattacgaagacaagaacgaatggaagccggaattccgtacatacttcgatgagaaatgcaagccgcagttaaaagagcttcttgagaattacgataacatttccctgatctggtttgatactccgatgggaatgaccgcagacgaagctcaggaattaagagactgggttaagggcattaagcctgactgcatcatcagcggacgtatcggacaccagaagggcgattacatgaccaccggtgataactttatcccacgtcttccatacgacggtgactgggaagtaccggcaactgtaaatgatacatggggttacaataaatacgatacaaactggaagaatccggatgatatcctgaaccttcttctcaagatcgtcggcagaggcgggaattacctgctgaacgtagggccaatggcagacggaactgttccggaggcttgtgtcgaggtcatgaatgaggttggtaaatacgtaactgagaatgcagaagcaatttacggaaccaagaatgttggtatctatccgtatgagatcccaagcattgaatttaccaagaaaccacataagctttacgtacacgtacttgcaccgagatatcgtgttgagcttttgaacatcggtaatcagttaaagggcgcatatgtggtaagcacaggagaaaagcttccgtgccgcgcattaaagtgctgcgaaggaaactcgatgatagaggtagagcttccggagaagcttcagggggcaaagaactactgtgtatgcctggagcttgaggaagaagagccgatttttgaggcgatcatcgattgatcaatttatgaacatcaatgggaaaactatataataaaaaatcatattaagggaggatttattcatgaagaaacgaatgaaaaaagttgcaacactgtgtctcgccggtgtaacagcaatgtcaacagtaggcgtaacaggaagcgccgtatttgcaaaaggtgacacaaactacgatgtagacaatatggattttgaaaacgttgagcttcgtgtagcattcagatttaacaacggatctgatacagacggacaggctaaatggtattacaaagcacttgatgagttcaacaaagagaacgaaggaaagatccatgtaacagatgagagtatttctacggagtctgattatgaagagaagcttacaacagattttgcttccggtaatgtaccgaacgcattccttcagtatggcggaagccgtacaagagagtatgtagatgcaggatatatactggatctgacaccatactttgaacagtatccggaatggaaagagggagttcaggattttgcatgggagacaacacagtttgacggcattgaaggaacctatggtattccgtggtccgcttatcagctctgcctctactacaacaaagattaccttgatcaagttggcgtagatgttccggagtcctgggatgatcttgttgatgcctgcgcgaaattaaaagatgcaggaatccagccattcaactactctgacaaagataactatcacttcgagcatctgatgagtgctcttgctctgaaagcttacggaacaagcatcgcagatgatcttgcaagcgacaaagaagcttacaacggcgagaagatggttgcaatctatcagaagatgaaagatatgatcgatgcaggatactggggagacggaatcctcagcacagacttcaacacagagagaaatatgttcgaggcaggaaaagctgcatttacagttgacggaacatggaactgcggtaacttccagaatgactccgatacaactctcttcgatgctcagaagatcggtgttacaagaattccttatatcgacgaagcaaacaagactgtagagatgggcggcggttctgatacatactacatcactacattaaacaagagcgatgaggaaatcgcagcaactgttaaattcatcaaataccttacaagtgtagattccatcaacgaaatgtgcaaatccagcccgacaacatatgctgagaaggttacgatcgatacaggtaactatctgcttgatgatgtaaatgcgatcatggctgagaatacagagtctaaacttgagattccgacatatgatacaaacacagcagctatggatacaatccgtaattctcttcaggcatta

SEQ ID NO: 196 - DNA, 49980 bp, Unknown
  gut microbiota DNA sequence
cttctttttgtcctgtttatgggactttgggaaatatcctctgatcttggatggatcgattcctttatcttcagtagtccttccctgatcgcagagacctttctttccatgtgcaggaatcagtccctgtttgcacatattgccgtgacactggcagaaactcttgtcagtttcttttttgttgtgatcctgggtgtaggaaccgcagtacttctctggtgctcccgacggatcgcacggatcctggagccatgtctggtggtactgaacagtctcccgaaatctgctctggcccctcttctgatcgtatggcttggtgccaacgaacgtaccattgtagtcgccggcatgtctgtagccatcttcggctccgttatcaatctgtactccggtttctgccaggcagatccggaaaagctgaagctgatcgaaactctggggggacacaaaaaggaaaagcttctgaagatcgtcctgccctcctccgttcctcttatcctgagtgtgatgaaggtcaacatcgggctttgcctggtaggcgtgatcatcggagaatttatcggtgcccgaaaaggcctgggatacctgatcatttacggaagccagacattcagacttacatgggtcctgatggccattgtgatcctctgcatcattgccatgctgctgtattttgcactttatcttattgaaaaacaggtccggaagcattagctgtaaaaagggcgtgtaaaaatgatctctcattttttacacgccccttttgctcttataacctttgtttcaaagttttcccacggcaaaggccgtgcataataaaagccctggatctcatcgcagctcaggcttcgcaggatctccacctgttttgctttctccacgccctcggcaagaaccttcattccaaggctgtgtgccagcgaaatggtatgacggatcacctgctgcccacgaaaattctctatgtaatcgatcagacttttatccagcttcagagtatcgaatggcagctggttcaggcttgtcatagatgaatagccggagccaaaatcatccatatgcagctcgaatcctgcatccaccatcttctctatgagcttactgatccgatcattatacaacgcagcagtttctgtcaattcaatgggaacagaagaaaacggaatgccattttcttccacgatcttcacataacgacagatcatattatcgtaatggatactggcacgtgacagattcaccgaaataggaagtatctttttccctaatcttatacgttccccttggatgctgcataccttgcggaaaacatattcatcaaggcgcacgatcaggccgtccttctcaaaaagagggataaattctcccggcgaaaccatagttccttccgctctcttccagcgcaccagcgcctccgccccaacgatctcttctgtctccacactgtatttcggctgcaggtagactacgaattcttcattgcgtatagcctcctcgaaagcattctccatctgtccgttacggatatgtctctgtctcatctcatcatcataaaaagcgatctggtgctcatagtcatcccggatactcttcatggccagaaaagccctgtcacagatcagggtaaaaggcagtgtcttatccacattctcatagaccccatagttgaccaccagattaggaatcggtgctccactctcgaccctgtggataaatttctccatatctgccatacggatctctttctttccatatatgatggctacaaactggtctcctccatatctgcccaccgtcccgtaacgaacctgatttctatacgtatctcccagataggtaagaacctgatcaccggtcttctctccataggttccgttgatccatttaaagttctttatatctgccaccaccacatgaaaatcctgattcgtattaaagcgcatcagcgtctttgcatgatggaaaaaggcctgtctaatataaagccctgtaagatcatcatattccagagctgagagtaccatcacggactctctcagcttgatcacattgttgatcttactttttaatatacggacattatacggtttccgtacaaaatccactgctcccagttccagacatcgcacctcatcctccagccggttacttccggttatgatgatcacaggcacagaggtcagcatcacatcatcacggatcagctccagaaactgaaattcatcacataccggcacactcatatcaagaagaattgcagaaagggttttgtaattctcagacagacgcttcatcccctctgcttcattcatcgcagtgataacctcaaaactgccctccagatgttctgtaagcgctttccgatccgtctcgtcattcactacaataagaagttttcttccggatgctgttcctcctggttccagtatggcctccatctcactgtaccgtacatccatatcctcattggcaaaagcaaacaccacggtctgaaaatcctcagccgttcctactctggcacatttcacatagaaatattcaatcctcccgttgcttcggcgtacacgataatgtaccatcaactggggaatccttgtaagacgttggcatatcttctcaaaatccatcatctgatgcatccggatcctgtcctctgccgcaacactgctctcaatataaatatccatgatcttctcataggattcatccctgcgaagtccctcctccccataagctccactctgcccctggaagcggcatacctggaccttatgagtctctctgtcaacagagtagatattgataaaattttttccgagaacattaatgatccccataagaagcggattctccatcattccgctgctgatctcatcattcgtctctgtatccgaaaaaacaagggcatgtcctgtcccgccggattccagcggaatctccacagcatcaaccgaacgcaggatattccgtcccggttccagataattcttcggacctttgatcccgttaacgaccggacagatctcacagggagtttctctgtttctcagacagtgatagcatttctcgcccctcttcagctgcggatagatctcacgtgctgccaggttatagctgataatcttataatcctcatctatgacatacattcccgatgcatttttccccacgagcatcacctccggattcgtaaatttctcatagatccttcgtgacagttactgtctcaaaatccttaaatatttcttcattatatacgatttttctgataactgcaattatctttcgtattatttatttttcatattggttttattatatttcggttatcagcgcatctgaaaagatttccccctgagcggaaccccggcaagctccgcaagccttttgatcccggaatctgctatggataccgcactctccacatgattgaaatctgtggcactgtaatcaaacaggatatttccctgtgcttcaaactcctcgtcccgttcccagaaaaagaatctcataggcatacagtcaaaggccctgatctcatatcccacatcaccctggggcagttccctgccgtcaagcttctgaaacgcctccctcaattccttttcatggccggaaaatgtagcactgaacacatccgtctctccgatctgatacgccggcgcaaatggtcttgcattcctgagatctgcaaaagggacccacttatccataataaaagccccctctttcgcataccccagaagcgtataaatattcagcatctccgtagtatccggttctcgctgtccatccaggctccggatactgccgtcttccagactcaccccatatcttcttccgaaatgaatgatcgtgagaaacccgttttcttccttcagttccggcacccgtttatgcagatctgcctgatccatcttcaaaaagcgttgtgcccactcttcacatagttttacatagttggaaattctttcttctttcatcctgtcttctccctgtctgatatcgatatcctttctccgctgtattccggactttttttacagaatacactgctttcacattttccgcaagaatcttcgccgatgtatccgaaatccggctattttcagtgttactgttttttcagcatcccggaaccttcttaagcgtttctttttttcgacagatcatccatcaattttcccaaatccgtctaatttcccaatataaaaataacgtttttttgcacaaaaaactggattttcctttttgaaaggtgtataatattaacaaagtttattgtttttatggttaaagacacctggcagtaaacaagaaatgaaagtgaggattcgccatgaaacaaaacagtatgttagcaatgatcctggccggtggaagaggaagtcgtcttcacgagttgacgaataaagttgccaagccagccgttggttatggcggtaaataccgtatcgtagattttccgctcagtaactgtgccaacagcggcattgatgtcgtaggtgtactgacacagtatgaatcagttttactgaacagctatgtagcagccggtggccgctggggacttgatgccaaggacagcggagtttatgtacttcctccacgtgagaaggcggatgccggtctggatgtataccgtggaacagctgatgcgatctctcagaatattgatttcatcgactcacagaacccggaataccttctgatcctttccggtgaccatatctataagatgaattatgcaaagatgcttgatgaccatatccagcataaggcagatgcgactattgcagttatcgaggttcccatgaaggaagccagccgtttcggtatcatgaacaccggtgaagatgaccgcatcgtggaatttgaagagaaaccggaacacccgaagagcaatcttgcctccatgggtatctacatattcaactggaagcttctgcgcaagctcctgctggcagatatcaaaaatccggattccaatcacgatttcggtaaagacatcatccctacactccttgcacaggacaaagcactctacgcctacaagttcaaaggctactggaaggatgtaggaaccattgattccctctgggaagcaaacatggatcttctcagtccaaacagtgaactggatcttaacgatcctacctggaaaatctacactgaggatgctacctctcttccacagtatatctgtgataccgctgtgatcaacactgctttcattactcagggctgtgttgtagaaggtgagatcaccaactccgtacttttcacaggtgtcaaggtcggtcctggtgccaagatcatcgacagtgtcctgatgccgggtgttgttgttgaagcaggtgccgttgtccagcgtgctctcgttgcagacggagtcgtgatcggtaccaatgctcgtgtcggttccaaggacagtgagcacatcgaacttgtatcaaaacgtgtaaagggggctgagtaatatgtttaaagcatttggaatcgtgaattcctcagaaagaaatatccatgtggaggggcttcaggactaccgtgcgatcggcgccttttcatttctcggaagatatcgtgtcatcgacttcccgatctcaaatatgaccaacagcggaattgagtacattcaggtctatgtaaagaacaaaccccgttctcttgtagaacatctcggaaccggacgtcactacaacatcaactccaagagcggtaatctccaactcctcttttcagagcatttcggagtcaacgatatctataacaccgatatcgacaactactactccaatctggagtgcatcgaagcagttcattatccgtatgttgttatcgctccgaattacatgatctacaccaccgactattccaagctgatcgatgcccatatcgaatccggtgcagatgtgaccatgctttatcattccgttgataatgccaaggagaactatctgaactgccacatcctgaacctgaaccgtcagaagggtgttctctccattgagcacaaccacggcaatgcaaagaaccgcaacattttcatggatacctacgtaatgagcaaggagcttttcatcagcctcatccataaggcaaaagagatttcctctctttatacccttgcagacgtgatcaatgccggctgcagagacggtgagctggatgtgcgtggtatatctcatcgcggatattttgcatcgatcactgatttcaagagctatcacgatgcaaatatggatctgatcgactacaaaactgcaaccgatcttttccatgataactggccgatctatacacgcaccaacaactcctgtccgacccattattttgacacagccaatgtttccaactccgttatctccaacggctccatgatcgagggaactgtagagaattccattgtcggacgtggctgtaccatcaaaaagggcgctgttatcaagaactgtgtcgttcttgcagactgcaccatcggtgagaatgtccatatcgaaaatctggtcgtagacaagcatgccaagatcacacatgccaaggagatcatccgtcctgctgatgagcctggctacatcaaacgtaacgatacactgtaatattcatatataataaggcctccggttcctgtgttacaaaccggaggccttatttatctctgcactcagctaagcatatggatccatcatttcagaacagactggatccatttcaacgcattatccttattcttcacattacccggaaggcagatgcacaccggatcatatctcaggccaaatttctgagcaacactactgctgccgtcaagctccagatgctgatcatccacagcgcccagagactcaaacacctcatctccaaacgtttccctgagatctgcatacattccgctgtctttctcatgttcatagagttccttcggcatgatcaggacatcaacggtagcactctggatttccgtcacatatgcgatcctggcatagtaatcaaaatcctctcctgtctcgtccgtcatcagattctgcgccacactgacttctgcatatttatcctctgttcccagtgtcttcagaacatcctcttccaccttctcagagtcgtaattccctgcattcaccaccgcaatggaaagcaccgtcttcatctgtgcgtgccggtaaatattcactcccaggcagactccgccaatggcaagaagcacacacagcatatgtatcttataatacatccagatatactgaatcttcttccctgttcccattcccttcagtttctctctttcgatccggcggcgttccttcttcgtcagatcagtttcgttgggcatctccggattcagtacactctcatcgtgtccgtcactgccggcctccgctctgttttgtaaatccataaaaatctcctttttctttcatgtctcagtattttttaccctgaagcgggatattccagtcgctttccccgcatcctccgggtgggtgctgtgacttatcaataaaggatattttagcatattttggtacaaaatcacagcgcataaatatgaaaataccataaactcttctatttccggcagatcttcattccatatccatacattaccgccacagcagtcacaagaacacagaccatcaccggtctcatccacagatataaaagatttttctcaattccagctgccacagccacatccttcaggatatcagccacacagagatggaacagataaataaaaaatgcatatttctgaccgatggctaccggaagctcgggcactttccaattttttcccatgatcgcaatgagaaaaagaccaacagccataaatactgaccccagaaacaattccagtttgccaaaataccggtattccagcagacttgcaatcccgccgccagctaccatgccatacaaaagaaacactttttttccggcaaaccaggcttccagcttttcctgatgtctgtgtatcagatgtcccaacataaaaaacggaaatccggtaaacagatagttgcgaaactgcataacacggaaatgcttttccgggaacaggaagatcgaaaattcctccattccgaaatggatcagaagaagcaccggtatcagaacatatgcctgcttacaaatccgtaatcttgctgccagggcaaaaagaagataacaatagagcagtgccgggagaaaccacagatgccatttcacctgagagctgttattatatagaagaaactggcggatatgttcccccgaaaccagtgcttccagccattccttctggcttgccccgtcgatgtggttctggatcagctcccacagacagcagaccggaaatgccacaagcatcagcttcagaacatgccggatcttttttccggttcttataaattccgtatcatcgccacggaaacaaaaatatccggataccataaaaaacacaggtactgcaaatctggcaagtacattggctataattccggcatttcccggaaaatggacgtgaagaagcacaactgcataagcacagattgcttttaccacatccagagtacggtttcgcataaaaattactcctttttatatcgaacgcttatcccggaaatataattccggggtttccttttttcgaaacgatatactaacaaaccagcagaattttgtcaatgttgttttctcctgtacgttttactcttatgctgtttactcttgtacggcttccggatctgaattataattctcttatgacttcatgacaggatgtttgttatttcctcagaaaggatttatttatgaaaaaagacggctactattcctccggcgaatttgcacgcatggcacatgtaactctgcgtactgtccgctattatgataaacaggatatcctgaaaccctctctcgtcaccgaatccggcgcacgtttttatacagacgaagattttgcaaggcttcagcagatcctccttctgaaatatctgggcttttccctggatgacatccgtgaaatgaccatcggtgattccgattatcatttcatgctgaattctctgaatatccagcttcgtctggtccgtgaccgaatcgaacaaatgcagctggtggaaaaagcgatccaggataccgcacaggtgataaatgaacagcacaccattgactggagccagatgctgaacctgatccacctgaccggcatggaaaaaagcctcaagaatcagtatcagaatgccaccaacatttcctccaggatcaacctccacagcctgtactcccagaacaaacagggatggtttccctggatctttgaacagtgccggatctcacccggtcttcgtattctggagctgggctgcggagacggaacgttatggaccgacaacctttcccttctgccggaggatatctccatcacactttccgatatttccagcggtatgctccgcgatgccagacgagccatcggttcctcggatacccggtttgcattccgggcctttgactgcagaaaaatcccctgcaaggacgaaagctttgatctggtgatcgccaatcacgtgcttttttactgcgatgatattccctccgtcctgaaagaagttcgccgtgtcctcgctcccggtgggagatttctctgcagtgcttacggaaaggcacatatgcaggaggtcagccagctggtgcaggattttgatgaacggatcgtgctttccgcagaccggctttatgagcggttcggacgtgaaaacggccagagtatccttgcgccttttttcccaaaggctcagtggctttcttatgaagactgccttctggtccaggatgcggagccgctgatctcctacgtcctctcctgccacggcaaccagaatcagtatatattggaccgttacaaggaattccgggcctacaccgccagaaaaactgccaaaggattccgcattaccaaggatgccggcgtatttctttgtgaaaaatagccaaaaataaaaaatatgaaaaaagctcttgaaggtgaccttgcgtcaccttttataatacagttacagtaacaaagttatgtgcaggcacgacttatgctgcacatcatcacgcaaaggagaaaacatatgaaaggaattattttagccggaggctccggaacacgtctttacccgcttaccatggtgacctccaaacagcttctgccgatctttgacaaaccgatgatctactatcctatgtctgttcttatgaacgcaggcatccgtgatatcctgatcatctccacaccacaggataccccgagattcgaggagcttctcggtgacggccatcagttcggtgtcaaccttacttacgctgtacagccaagcccggacggacttgcccaggcatttatcatcggcgaggaattcatcggcaacgacaccgtatgtatggtccttggcgacaacattttcgcaggacatggcctcaaaaagcgcctgaaagctgctgtagacaacgcagaaacaggcaaaggtgccactgttttcggatactatgtagatgatccggagcgtttcggcatcgtggaattcgaccagaacggaaaagctgtttccattgaagagaaaccggaaaagccaaagagcaactactgtgtaaccggtctctacttctacgacaacaaggtcgtagagtacgcaaaaaatctgaagccaagcgcaagaggcgagcttgagatcacagacctgaaccgtatctaccttgagaaaggacagctgaacgttgagcttctgggccagggcttcacatggctggataccggtacacacgaaagccttgtagaggcaaccaacttcgtaaaaaccatggagcagcatcagcaccgcaagatcgcatgccttgaggagattgcttacttaaacggctggatcacaaaggatgacgtgctcaaggtttatgagatccttaagaaaaaccagtatggccagtatctcaaggatgttctggacggaaaatatctggacgcgcttcactaagccgatctgtttttccgacactgcatttacctgcggactccgtttcgacggaatccgcataagatcaatcatttattataaaggagattttttatgacaatcatcgttaccggcggcgccggatttatcggaagcaactttatttttcatatgatggaggctcatccggattaccgtatcgtatgcctggactgcctgacctatgccggaaacctttccactcttgcaccggtcatggacaaaccaaacttccgctttgtaaaggaaagcatcacagaccgtgacgctgtttacaaacttttcgaggaggagcatccggacatcgtggtaaacttcgcagctgagagccacgtagaccgttccatcgaaaacccggaggtattccttgacaccaacatcaagggtactgctgttctcatggatgcctgccgtaaatacggaatccagcgttatcatcaggtttccacagacgaagtttacggagatcttccacttgacagaccggacctcttcttcacagaggaaactccgatccatacaagcagcccgtacagctcctccaaagcaggtgctgaccttcttgttctcgcataccacagaacctacggcctgcctgtgaccatcagccgctgctccaacaactacggcccgtatcacttcccggaaaagctgatcccgctgatgatcgccaacgctctgaacgacaaaccactcccggtttacggaaagggtgaaaatgtccgcgactggctctatgttgaagatcactgccgtgccatcgacctgatcatccacaaaggacgtgtaggcgaggtttacaatgtaggcggacataacgagatgaaaaacatcgatatcgtaaaactgatctgcaaggagcttggcaaaccggaaagcctgatcacacatgtagcagaccgtaaaggccatgacatgcgctacgctatcgacccgaccaagatccacaacgagcttggatggcttcctgaaacaaaattcgcagacggaatcaaaaagaccatcaaatggtaccttgacaacaaggaatggtgggaaaccatcatctccggtgagtatcagaactactacgaaaaaatgtatggaaaccgcgaggaggttaaagcatgagatttttcgtaacaggtgttggcggccagcttggccatgacgtaatgaatgaactgtccggccgtggacatgaaggcgtaggaagtgacattgctccttcctacagcggcatcgctgatggtactcctgttaccaccatgccttatgtgcagcttgatatcacagataaagaagcggtagcaaaaaccatccgtgaggtaaagcctgatgcagtagtacactgtgccgcatggacagccgtagatgctgcagaggacgaggaaaaccgtgagaaggtacgtcttgtcaatgttgtaggaacacagaacattgcggacatctgcaaggagcttggcatcaagatgatgtatatttccacagactacgtttttgacggccagggaaccacaccatgggatccggactgcaaggactacgctccacagaacgtatacggtcagaccaagcttgacggtgaactggcagtatccggcactgtagataaattctttatcgtacgtattgcatgggtattcggcaaaaacggcaaaaactttatccgtactatggtaaatctgggaaaaacccatgacaagcttaccgtagtcagtgaccagatcggaactccgacctacacctacgaccttgcccgtcttctggtagacatggtcgagacagagaaatacggctactatcacgcaaccaacgaaggcggcttcatcagctggtatgatttcactaaagagatcttccgccaggctgctgccctcggccacaaggaatacgaaaaagtagaggtatctcctgtcacaactgcagagtacggcgtttccaaggctgtacgtccattcaacagccgcctggataaatccaagcttgtaaaaaacggcttccagccacttccaacatggcaggatgccctggaaagatatctgaaagagatcctgtaaaaaaaaatccatcggtaatcgccggtggatttttttcgttctgtttctcatgaaaaaacagccggtggaaagctttacgcttccccggctgttcttatgctaaaatttaataattttatcttactgctgtgcaacagttccgtctgcactctgggcatctgctgtgccattctgtgtagcatctgcagtctcaccctgcgcttctgctgtacttccctctgcagctgcctgggtatcattatctgtagctactgccgctgatgttgcactgtctgcctcctcctgggaaacagtctctccgtcacgaaccttcttcatcatggcctccgccttctgaacggtagactcatccggaatcataacgtaagccttctggctcatagaatacggtttctgtgtgtcaccggtaccatttacactgtagcttacgatgttccagtcaccgccgttgttcagctgctgctggagcagtctggcgatctcctcgtaggagatattggtctcaaagcatccctggatgctggaaagaacggaagaataattcttcagaagctccggtgaaagagccttgttgatcacacccttgatcactgccatctggttcttgccacgctgacggtcgccctctttaaaggcataacgctcacggctgaataccagagcctgctcaccgttcaggtagttctctccctgattgaagtgatatcctgtctcattcttggaatcaaagtcatagtcagaataaacagtaactccgccaagcgcattgatcagctgctcaaatcccgcaaagttgatacggaaataatagttgatatcctcattataaagcattcccagagtatccatacatacattgataccatagatacctgcatgtgtcagcttatctctctgtccgcctgaaatagaaagcggtacaaaataatcacgaggtgtggaaaccagaagcacctgtctggtagctgtatttaccgtagcaatgatattggaatcgctgcggctctttgcaacaaggccgctgcggctgtcgataccactgataaagatggtatatacagaaccgtcattggtactctcttcagccttcgcctctgtctcctggggctcaatggtcgtctccaccttcttcacggtcagctctttgatcctggaagaaatatcggaatatccatccatctcttcaataacacttaaatatgcgctgttcagcacgatcgcacctgtctgtccgttcagaagaccgtcaaccagctctgtaagtcctgcatactcctggacctgcacagtcttgcctgtctcggaatccacttcctggatagccttgtccgaattggctctgtcaagatctgtcagcacaccatacacataatctgctgtagcctctatggaatctgcagaatcatctgcacggacataaataccgacctccgtaacctctgtgttcacaccggagatccctgccagtgtggaatgtgtcttataaacatacatacttccgagaatgaatactgctgcaaaaactgctgccaggatcactcccactacaaatcttatcttaccatccgtactccatacaagcgctccgacgatcacgatcaggaccagcattaccagtccgatcactgcaatgaacttcgtcgggatcaccttcatattcagaagcatgaccgcaaatacgatcgctgtgatcagaaccacaagcgtcacgatcagccctgggatatgttttcccatttttctcatatgcaatcctccatttttgctggtacagagaatattacatatggacactctctgtacagattcaaatatcctaatcattttacgcttttttactgataaaagcaagaaatatcgtaaatcgccaaatgcaaaaacagttccgtgatatcatgatccttttatgctctcacgatgtcacggaactgccgctaaaatgttccttctgtgaaatggatctccttattccacggtaacactcttggcaagatttctcggcttatccacatccagacctttatttacactgacatagtaacccagaagctgcagcgggatcactgccagagaagttgcaaaatgaggatctgttttcgggatataaaccgtaaagtcagcagtatcctcgatattatagtttccaaacgtagtaagccccatcagatatgccccacggcttctgcactccaccatattgctgactgttttctcataaagctccggctgtgtcaggacaccgatcacaagggtgccgtcctcgatcagggaaatggtgccatgcttcagctcgccagccgcatacgcctcagaatggatgtaactgatctccttcatcttaaggctgccctcaaggctgatggcataatcgatccctcttccgataaaaaagatatcctttgcattggcctgcttggaggcaaaccactgaagcctttccttatcctcgatgatcctgctgatcttgtccggaagtgtcttcagttccttaatgtaggactcacactgctcctctgagatctttccgcggaccagtgccatctgcaatgccagcacataggaagcgatcagctgtgtactgtacgccttggtggtagcgaccgagatttccggtcctgcaagtgtgtagaatacatgatccgcctctcttgcaatggaagagcccaccacattgacaatagccagcgtgcggattcccttctccttacattcccgaagtgcagccagactgtccgcagtctcaccggactgactgatgatcactgccaggccgtcaggatccagaagcggcttccggtaacggaactccgaagcaagctccacacgcaccggaagacctgccagatcctcgatcacatactgtgcagccattcccacatggtaagcagagccgcaggccacgatataaacctggctgatgctacggattctctcatcatccagaccaatctccgtcagatccagcttgccctcccgaataacggagttcagtgtatctgcaactgctttcggctgctcatggatctccttcatcatgaaatgctcaaaaccggctttctccgctgcctctgcatcccactcaatgatcttaggctccttctcgatctcctcaccatccagattgtaaaaagtgatctcacccggttttacacatgccatctccagatttccgatataataaacatttcttgtatacttcaggatcgcaggaacatccgatgcgatataggattctccattctcaacccccaggatcatagggctgtcttttctcgctacaaagatctcttccggataatcacggaacatcattgccagcgcataggaaccacggatacgcaccatggcatgacgcactgcctcaaccggagatccgccgtatttctggtagtaataatccaccagcttcacagcaacctccgtatctgtggaagaataaaaagaatatcccctgcggagaagcttctccttcagctcctggtaattctcgataatgccgttatgcacagctgccacatttccgttatcactgacatgaggatgggcattgacctctgatggttctccatgagttgcccagcgggtatgaccgatcccgcacatacccggaacagattcacctgcgtttgttttctccagaaggaccttcagacgccccttcgccttaatgatctcgatatccttttccccgtcacgcactgcgatgccggcggaatcatatcccctgtattccagtttggaaagcccgtccagaaggatgggtgctgcctgatgcctgcctgtaaaacctacaattccacacatgatttttttctcctcttattgcatttttatattcttctgactgctccgttcttcagacacctgcggtctgcatccgggacattactctgccacatgccccttcttacggacgatctcaaccacctgatccacatattttctgcaaagctcctcgctctctgcctctaccataacacggagcaggggttctgtgccggattctctcaccaagatccttccggtgtctccaagtgcctcagccacactctctactgctgcctgcacatccacatctgcctgcgccgctgccttgtcatggacacgcacattctcaagaacctgaggatagatcgccagatcagcagtaagctcactgagctttttcttccttgccattataacttccatcatcttcagacttgtaaggatgccatccccggtagatgcatacttggaaaaaataatgtgcccggactgctcaccaccaatacggcagccattctgcatcatatattcataaacatatttatcccctactgctgtcttcgcatactcgatatcaagagcatcaaaagccttgtaaaggccaaaattggacattaccgtagtcacaaccgtattggtgagaagctttccgcgctccttcatataacggccgtacacataaaggatcgcatccccgctgaccacatttcccttctcatccacacagagacaacgatccgcatctccgtcgtaggcaaagccaacatccagccccttctccactacaagcttctggagaccctcgatatgggtggaaccggcattgttattgatattggtaccatccggctcagcattgatcacataagtcttcgctcccagcgcatcaaaaaccgcctttgcgatattccatgcacttccgttggcacagtccagaccaatccgccttcccttaaaggaatatactcccagggagatcagatatcctatgtaacggttccggcctgccgaataatccaccgtcctgccgatctcaccgccctttgtaaaaggaatctcatgccatttctgtccgaacagctgaagacggtcatccagataatcctccaccagagcgatgatctcctcttccatcttctcaccctggccattgatcagcttgatcccgttatcataatagggattatggctggcagagatcataataccacagtcaaagccatcagtacgggcaacataagccacagacggcgttgttgtcacgtggagaagataagcatccgctccggacgccaccagtccgccaaccagcgaatactcaaacatatagctggaacgtcgggtatccttgccgatcacgatcctggctgcagccgtctctccggccctcctgcgcagttcattataataccatcccagaaaacgcccgatcttaaatgcatgatccgccgtcaacgaaacacccgcttctccacggaagccatctgtaccaaaatattttcccatttctagctctcctttgtgtgttaatatttataacttatcttatatattgatgtgtcatacagattgatcagaattccttctgccatttctgtatgcacatccataatactgtttatttaatcatcttagctgaatcaattttatcttcaaataaataccaattatgatgtgtttttccctcttgaaaatctactggtccatactgactgtatataattcgtgctttcagagtagcacaatgcgctctttttgtctattgatttatttcgactccgttcaacaaacatatccactttacctgcacagctctgaagctttttcacaaaatcctctttccaaaagggaaagcaacaaactatgttaccccgaaaatggatcagatgataaaataactctgatcacataacaagatcgaaggtggtgaaacctatgggtacaaaggaaaaaacgtcatagaccctgacactcttcatccactggataccacagcgctcgctgtcccctacggatccggcacttcagaagttcctgtccagaaattccggaacgaattcaaatctcttaatgttatgcatgatgactccagaatttatcttcttctgggaattgaaaatcagtcagaacaacactatgtaacgcaagtgcaaagcaattgcgttcatgagcatgtagcaaagcggaatgcgaacgtccgctttttcgccggttaagaatatggtctatgatgcattagaatacgcagggcaggtggaaaattccgccaggttccacagagaagcaaagcaatggccctccacatccggagaatatctcaccggcttctacaaggatgaccggctgattccggtcatcaccgtagtcgtatacttcggctccgatacctggaaagctcccagaagcctccaagaaatgctctctgtccaggatcccgagattctttctctggtcctggattaccggatcaatctcttctcacctgccgagataaaggatgaagaacttgacaaactcgagagcaatctcaaagaagtcatgctcttcattaaatactccaaagataaacggaaacttcaggagctcacatcacagagccccggtttccggtcactcgagctcaaagcagcccgggtcattgactccataaccggtatcaatttacgtttcacagaaacagaagggagtgttaatatgtgtcaggctgttcaggaaatgtgcgatgatgcacgtgccgaaggtctatcccaaggtcttcaggaccatgctttacttactacacaacgcatgctgcaggatcccaggttctcgcctgaagacatcagcagattctcaggggtgccacttgaggatgttttgaaattgctggagaaatgatgcgtttgagaaaatgctcaggaagcgtaggtgcttcctgagcattttatgtaagtccctcaaaacaaggcgtagtgtaacataacagactttctgctatgttatccacatcattatttgaagcgcttacgatttttgacttattttcaaattttttaatatttgatgtgcaatagatttttatttagttataccaacaaccggaggttagcaaataattctgtgatatagaccgcagaaccttgcccaaagctactgattcctgattgattttagacatcagatttatctccttgataccatgtttttcttagtataccaccaagaaatccatcagtcactacgccatattttgatgcatttactacattttattgtactttcatagctgtaatagagtttatcaatttatttctaaatttaaatacaattaatatgataatcaagattactccatatctcacccaagtaaatttataaataaaattacataacaaacaacttatcgtcactactaaaacacttaacaaacagaatttaaaatcatacactttttctttttcgatttttctagaatttatataatgcaatgcagttaatattaagtttgaagctaatgttgtataaccagctgcaatatatccacatttcatgataaaaacataattcattataacatttgacattgcagcaataaccgtagctatcattatattaaaagattttttatgaaaaaaagagattgctgtaaaattatcataaagtgctgtagtatatattcctgcggcaataggtggtacaacatatattccctcataatactcttttgttgctaaaattcctatgatttctggtgcagctaaagcagtcaaaatacaaaaagccgcaaccactaacaataatggcttaactgcttctcgaattgataaaaaatcacgttctcctaatttactattaacaaatggcgtatatgtcacgcttaatgcccgccaaattaaaacacctattgctgataaaatcgcagccaaggaataaattcctgttttattttgactaatcatttgactaatcattattttatcaatgctacttaaaacaaccgttgataaatagtggggaattaacggtactgcaacaaataatgttgacttccataaaatactatctacatatttctttcctcgtctacatatgtaaatatataaaaagattgcaacaatgagattaacaattccagcactccataacctaactacgcccatgttgtggtttgaatttttaagacatacaacagcaattacagacactacttgtgccattacagctgttccaaccgatacacaaaatgttgatttatattttatctcataccgttgcttttgcgtccaaaaaattgttgccggctgaaaaaaacatgtaataagcatcaaaattattgtactgactggaagcttaaaaaattcattcacactttggtgaaatataccataaaacacagaaattacaactgttgaacacgccgtcattcccagcatacttgataaatatttccaacgattgtcactatgttcatacaatcccacgtttaaaataccaggaaagatcaaagtcaccgaagcaaatactcgtactatttcaaaccatgaattataaacagaaataagtccatattccgatgtactaagaattcgtgtaaatattggagtcgtaatataattaattccactagttgcaaatgacgcaattgcaaaaacaagagtcgcctttaagttttcaggcaatttacatactttatttattttcactttttaacccttctttatctccatctgcttttgcttccctaaatacataaatttctttgatacacacataaaaataattgatacaccataaaatccccaaaaaacaggtttataaaaagcaggatctaattgtgaaagaaccaaaaagaaaatttgaattccaagtgcaattgaatccaatttatatgcatactcataatatctatttatgtttactctttttttagttattgttattctatgatatgctttactaaataaaaatatcatcggaagtaatataattacagttcctaaaattccattttcacataataattgtaatgtacaattatgaacatccataacatcttgtccatgaatagatctaaatgttcctgaaatatgataagcaaatcctccaaatccaataccaaatatcggattttctttaaatatatcccatgcacttttccataattcggtacgcccagaagtaatgtcacttccaatcataattccttctatagattttacgtatctgctaaaaaatggaattactttcatatactcaagtaaaaccttatatgaagttaaaattatcaaaacaagcactattacaattcctatttttataaaaaaatgagctgtatcttttgacagtaaaaacagaaaaaataatgcaactattactgctaatagttctcctcttcttccttctgcaatcatagctaatactatcaggatcatgcttaatatatttttcttgtattttttaccagtaaatatattagtaaacataattaaaattccaactgtcataatataatatgctattgtaaaagatcctcctaatgggattccatatccacgaggtatataatactttgctaattctttgcatgatatatcaattattttataaacgctattccaatataatccaggaaaggctttaaaaaacaatatccatattgcaataaaacatgacataatttcaaaaaccttgcatgtcttagtaacttcagaaaatgaagggtctgccaacacaactacaaatgccataattaacattgcaattatataaagtctttcatctgcatcatgcctagatgatattcttaaaaagaacaatcctattattactactataaatatatatgatattttttcaactggtaaaattacagaaaatttatatgacattctcaaaataaaattaatcactgcaaaaacaagaaccattccccatccgaacaatgtacttattcccaaatctttatataaataaaatgttgtcaaaaataccgccattaaaaagagcaatccatttccattatttaaatgaatttttattttactcttcacatacatatgaacaatatcctttctattacatattttattggtaacgacacaatttgacaatttctttcccaactatttctgatgccattccactttcgcatattcctaatttgatatgatgatttagaattctctttttagctatttcgtggtcatactttataatcttatcttccaagtcttccattgaaaaacttgccggatatggccagtcttgtataggtgtataaaattctctttcatctatatattcattataatctggcataaacaaaaaacatggtttcttcatcaacgaaaaatcccatatggatgaagaataatctgtaattaatacatcacttatcaataacaattcctgcatatccggataatcagaaacatttttaactctactagattcaattttttcagattgcaaataataatgtgttctaattaacataatccattcttttccaaatctatttttcaaagcattcaaagttttttcataattaagcatatacttatatttcaaatcatgacgaaatgttggtgcataaatcacaattcctgtttttttattaattccaagtttttcttttataatatttttcttattctcatcattttttatcaataaatcgtttcttggcattccgcattccatgatttttccattgtactgaaaagattctcttaatgtcatctgagaaaatactttactacttgacaaataaatagaaattctttcatttttcctgagcatatttttatccaaagtttcagatgtatcttttctttttaaccctacacctttatatgcgcctcctccatgccaagtattaataacatattgtcctgttcttttaggcaaaattgaccaactttcaacattgtctattactatctttgatgttaataaataatataaatattttatgctcttgaatttaacacattttatatttctatttttcaaataactaaatgcgtcaggttcattaaatgcccatattatttcaaattcatctttataattttgttcaatccaatctgatatgtattttggattacacgaatattgtcttccactataagcactaaaaaaaatcctattattctttatcggaaacacaaaaaaaatacataaaaatttttttcctatttctataattatatttttcataattcctctacattgtttttatcaatctgttatacatccataataaattatgttctggtttccatcctaagctttcaatttttgatatatctaattttaggcaactaggtgctggatattttgaaatatctccattctttgcgactattacttttatctttccatttgcaactttctcagatactaattttcccatttcataaatagaacaatatgtttccggatttgatacattatatgcttctccactctttccacctaaaagcaccgtaaaaattgcagttacagcttgtgcagtgtaaacatatggatgcttacttgttcccttagtttgaagaataatatcttttccttcaattgcttttcttgccatcattgcaaacactcttttatcttcataagaaattccaggtccaaatgtttgcgctaatcgtacctgataaaccggtactttatattctgctgcgtaacatgcacataaattttcacacattctcttactttctggataacaacttctaatatttaatggatcaatatatcctaactccgactccgatacgaactcatctttctcgatttttccatacaactccatgcttgaaagatataccataccctttattttcttttccttcgccaattccaaaacattaatagtgccttgtacagcagtttttattgtctcaacaggatattctataaagaaagaacttgctgtaggacttgcacaatgaataatgtaatcaatattttcttttatttccggaatttcttctatgcttccttgcacgaattctaaattttgttctgctttcaattgttcagagaaaatctttcctgctttttttacatttctaactaaagccaatattttaatatcataattttttttaatatccgcatataccaaactattgattaaggttgatccaataagacccgttccaccagttactaaaattgttgaattctttatcctattccaatcaaacgattttgactgtaaaatatattccatatcttctttatataaagcttgatctacccacattttatcttctcctcttcaaattccaaaaatctgcgaattttcccttgcatctacaatcgctctaaacataaaaaaatcatttggtgttgttatcttaatattttccgctttcccatatactgtataaagtttatatccataatgcatcatcatagttgctgaatctatgaaactagtttccttatcattcgcagcttttttgtacacatccaaaatctcatttaaataaaatccctgtggtgccctagccatttgacattttgctctctcaattacctcttttatcacaccactattttcatttgaatccgataccgtgattgtttcaatagccggtgagacagttattgctgtcccatgttcttttacacattcaatgttttttgttatagtttcctcatcaaccaaaggccttactccatcatgtataaggactatgctatctgacggaaataactcgttcgctctagcaagtccattaaacgctgattctgttgcagtctttcctcctggaataatagatttgagttttgttaaatgatatttctcttttaattccaaacaataattgatccagtctttcaaagtcaccaaaataattccgtctatttcttcatgcttttgaaatgcttctagtgtgtatactaatattggtttttcatgtaattccaaaaattgttttggtcttgttttactattcattctttgtcctgttccacctgcaaaaattacagcaatattcatttcttcaacttcccttctataacagtactaatcatagtgttaaatttataccatatataaccaatcataattataaaaaacgatgccagtaccatgatgcaaattttagaactatccgaactcttcatacctatatcaaattcaaccataatgtttctgataaatacatttagcaaatatacttctagtgacattttgcctccaaaaaccaagaccatattcagcaattcccacttttttatatcaagcatccatgataaaaaaagcattattacaaatgcaattccacatgcgccaagaaaataaaatataaccccaaattcatgattaattctttttataaatggacttacaataaacgcaaggattgccattatcatataaattgccaatatatttttacattcttcctttttctcttttccgaaaagcaattggcctactatacttcctagtaaaaatacaggtactctggttaatgctttatctacttttatgtaccaagatggaaaaaatagataaataagaaaattaatcaaaacagctattattatcatgaaatttacatatgttaagtttctattttgtaccttataaataaatggatataacaaatataatataattacaaattctacataccatgtcgtagacaccccttcagtccaaaaagagattcccagtaaatctttaaaaaagtctataaaatcgctgttctcttgtaaaatatatatgaatatccaatacggaattgacattaacaaccatggtataatgactttaataattcttttttggtaaaattccatgacattatttcttttagtaatagaaacatataaacccattccagatactacaagaaacatgtctacgcctatatttccacgtgcaaatatctgtgtaactatcggaatcgacactgtagtatataactctgtaaacatatgatgtgccagcacccaaaaggctgcaattcccattaattgtgttctatatttactaatattaaataaacatttttctagtttactattcattaatgtcgttacctcttgtcattgcaataatatatacccttaaatttcgtatacggttcattcaaatccatatatacaacatcatgttttgccactcttttttcttcaggtggcaactgcatataatctccccatatttcttttaagtatcttttatatcctgccattacaggaatttgatatccttcaaattcttttaatataactttattaaaatcttgttttggatgacgtatcaacattccttttatgctaccaattaattctgttacatattgacaatcttcccatttgtattttgtcatttccttttcagcatgtttccatattttatatctgatgttttttgaaggaactactttatatatgagttctgaaaatactcttattgtttttcccttattatctggtaaacgttgcacattaaataagctaaaaacaaatgcatttattatctgtctccatctcgataagaaaaatgtaggacaaccatcaattggcattatttctaatgcaattccatgttcaatatcttcattaacgctatgtctgttaatataagttgtacgaatgtctcttatagaagcaccaccatcatgatatatatgctctcgatttgtacgacaatagacaaattttttaatatctgcttttttattccagatttttgctaatctctcataatctggtcgtggcataaacaaatcaatatcatcatcccatggaataaaccctttatgacgtacaacaccgattagacatcccccacaaacatagtattttaatgaattttctctacaaaattcatcaaaatataacaacatttccagcatcttattttgcaaatcttcgactttaatattattcattccgaatactctttccctaaaacagcaagaactgttctaaatattgtttttacttcctctattaagctaaacctgcggatactctcaaggttatatttcatttttttcggcaatatctttttcacatagatatcatctatattttctgttcccctcaataatttcgcttcatccttataccgtatacttgcctccgatgtgattcccgcaggaagcagtaacgtagctctcatctcttttgtatatttttccacatactttgttgcttctggtctcgtccctacaaagctcatatttccagataaaacatctaataattgtggaatttcatcaattcgtaaactccttagtttcgaaccaactattgttattctggaatcttcatcaatcgtaactgatgttccaattttatctgcattatttaccatagtcctaaacttatgaattctaaatttttttccatatgcagtaattctttcctgtctgtaaaatactggtccctgtgaatctatttttatcattattgatataataatcatgggaacagccaaaattataagcataaaactagcaagtgcgatgtcaaatatccttttcaccttaatactcaatttcttttttaaaagaatatcataataaaattttacttcttcacacttcataaaatctggaatttcatcccattttttaagcatttaacacctctattttttgatatattccttcacaatccccaaaaacatctcaatcacatactccacttcctcatccgtcaacttcgtatgcagcggcaatgtgatctcattttcaaatcgcttataagcattcgggtaatccttgatatcaaatcccatatttttataagcagtcatcattggcagtggtttgtaatgtacgttgcaggcaacacttttttccgccattttgacgatgatcccgtgtctctgctccagagtgattcccggaattctggtgatgtacaggtgtccggaggactgatgctcttcgttgtaatgatccagtacttcgatgccaagtggtttaaatgctgcatcatatctgctgatgatttcttttcttcttgcaagcaaagctttataccgtttcatctgtgccagtccgatcccggcaacaacatcggtcatattgcatttaaaccaaggtccgatgatgtcatactcccaggcgccaagctgtgttttggcaagggcatcctttgactgaccatgaagtgataacagctgatactgatgatagatttcttcattatcaattccttcgatatctctccatgccacagcgccgccttctgctgttgtaaagtttttcactgcatggaagctgaagtttgaaaaatccgcaatgctgcccactggttttccatgccaagtcgcaccaaatgcatgggctgcatctgccattacgataactcttccgattgctttctgaagcttattggctggatggaaaagcttctttttctcttctacgatagagaagatcctgtcatagtcgcatggcactccgccaagatccaccggaatgatcacttttgttttttctgtaatagcttctgccagcttgtcataatccatttccagagaatcttcctgtgtatcaataagaaccagctttgccccgacatgacacaccaccgatgcacttgcggtataggtataagcgcaagtgatcacttcatcgccttcgtggattcccagaagacgaagtgtcatttccgcacatgcagtctgcgaattcaggcatacagctctattggtgccgcataaatccgcaacttctctttccagttcttttgttttcggtcctgttgtgatccatccggatcttaaagcttctgctacctgttcgatttctgcctctgtaatatctggcggtgaaaatgggattttcattttttcaacactccttcgttttcgtatatatgtaaattattgaccagttatcaattcttctccgcagccacagccgcctcactcatcagctcctcatacaccttcttatgcagcttcaggtcggaatccgcagagtgataggtcggtacgatcgcggctacgatgtcccggatcttttcgctgttggcgtagccgtatgctgccaggacttccagctgtttgaagaattcctgtacgtccatttcgatgggtttgccgatgtggatgaggtcgtttggagttttctccatgccttcttcggccatcagcttttcttcgtagagcttttcgcctgggcggagaccggtgtaggtgactttgatgtctacatccggggtgtagccggaaagcttgatcaggtttcgggcaagggtgtcgatctttaccggggctcccatgtccaggacgaagatctcgccgcctttggcgtaggttcctgcctggaggacaaggcttacggcctccgggatggtcataaagtagcggatgatgtccggatgtgtgacggtgacagggccgcctttttcaatctggcgcttgaacagcgggatcacacttccgttgctgccgagaacgtttccgaatcgtacagctacgaattctgtgccggttcctgttttcgatgtatcgtttgcacttacatatgcctgaccttcgttgtcgtgaagtgcatccagggtatcctttctgtgtccgccaagtcgtggcagccagtcggtgtgtccgttgtggctgaccatgttcatgctctggactaccatttcgcagagtcgtttgctggcgcccatgatgttggtcgggtttacagccttatcggtactgatcagcacaaatcgctgacagccgttcatcattgccgcatacgcagtcttataggttcctaccacattgttcttgatcgcctcacaggggctgttttccatcagcggtacgtgcttatgtgcggctgcatgatatacgatctccggcttgtaggtttcaaatacccagttgatccttttgctgtcacggacggagccgatcagtaccttcaggttcaggttcggataactggccttcagctcctgctcaatgtcgtaagcgttattttcataaatatcgaagatcaccagaagctccggctcatgacctgcgatctgacggcagagctcgcttccgatggaaccgccgcctcctgttaccaggatccttttgcccttcagatactgaaagatctctgacatgttaactttgatggtgtctcgtccgagaagatcctccactgctacttttttcatcttgctcagggatacttctccgtttacaagctgatatacaccaggaagctgcttcagctcgcagccggtttccttgcaaatgttcaggatatcccgcttctgatgcggtgttgccgtcggaatcgcaagaaggatctgattgatatgatacttgtccacattgagaaaaatatcgtctcttccgcctaccaccggaactccttccatgtatcttccccatttattcggattgtcatcgatcaggcagcgtactctggaattggtttcctttgcattctgaagttcccggacaatagttcttcccgcttctcctgcaccgatgatcatcacgtttttgctccgctcttcacgctcgctcttttctctgcggttccgctcaagaagtacaaaacgataggagaaacgtacgcctacagtcaggaaaaactgcagcatgacaccgatcagataataggaggccggcatccgtccccagaagatcgtgatacccgcaatatgcagaacgcctgtgatcacagttgctaccgtgatcttgatcagctcatggaagcttgcgaaacgccatacactgttatacagatgcatgcatccgaacactgccagggtgataatggtatagattggtgcaaaactcctccatgcggcaaaatagtctgtggggatcgaggaataccgaaaatcgaatctcaccagcagcgccataaaataagaaaaattaacagctatcatgtcatagatgatcagatatatcgcaattactttccaatgttctaacttcttcatacttcctccggtctgtcttactgtttctgcataatccctgatgtattcttcctgctctttgtcttctgtctgcttttccctgggactttgttttgccagtgccagaagcaggaccgagaacgcaagaagtactacgatcagcatgatcaataaaatctgcatttttacttcctcttttatatttataacttatctaatttatttttatccccgaactgcgtctccgcagcccgggtcattatattcgaatctcaatatgtattgatcatttcgcaccgcttccgcggaaaacgaccataactgtcttaaccaggatctcaatgtccagcttcagacaccattcggcaatgtacttcgtatcaagctctacgacttcctcgaaatccgtgatatcacttcgaccgcttacctgccacataccggtaagtcccggcttgatggccagacgtttgcgatggtgaagctcgtacttctcccactcatccattgtcggcggtctggttcctacaaggctcatatctcctttcagaatattccagaactgcggaaattcatccagggatgtctttcggataaaatgtcctactcctttgatgattcgtggatcatcatccattttgaacatcattccgtcttttacgttattctgtttcatcaattcttttttgcgttcttctgcatccatatacatggagcggaatttatagatcttgaacggacgaccgttctttcccatgcggacctgtgaaaaaaatgcaggacccggagatttgatcttgatggccggaaccagaaagatcgctgcgattcctgtaaaaagacagcctaccagaccgcctgctatatccatggctctcttaacaaacatctggcgcggcgttacaatgtggatactgctggaaagcacggtatatccaccaagttcctccaccacctggttcttgccaagggatttcatggttgccagtctcatatggatgacaactcccattgcagaacaatccttgatcatctgctccgggattgggatttgcttaggtactgcaaaaaatacttcgtcgatccagttcttatggatataggagatcatatcctccttcccggctactaccggtactccacagacggatgctcccttcctgtcacaatccataaaaacaattcctgccagatgataggttccgtaattattcttgcggatggtttccaccacattgtctgcattttcactgactgtaacgatcagcagagatcgtttttcgctttcttcgtatctgcgagccttcagaaatttcttcagtgcctgtctgccacaatagctgaaacaggtataaagcacataggtgatcagcaggatcattctggaataattgtttccaattcttaaaagaaacatatatgccaggaccagaagacataccagtgtacactgttcaaaggttttcttcagttccaccagcattcctcttcgcagaactccgctgaagctctcattaaaaaatgtgaccatcagctggataagaaacatcaccactgccacatttcggtacagctctgtctcgtatggctgatcgatcccgtttcggatccaatatgcaagtacaaacgcaagctgcagacacaacatatcgcaaatcgtaaaatctgcatgttttacccagctgctgttttctttttgatacatattcttttctacgccttccctcgcttacattttttgttgcatttatcccctctccggtatctcaggcacctggagaggggatgatatttatttcactacaatagtaagtacggctccgttggagctgtttccactgttgtctactacataatatgtaagctcgtaagttcccggtgcagctgtatttacatcaccggtgatctggatccttttgaaaagatcactggttgactctgtatcatcctggatatcctttacatagcttaatttatccagcgtagttcctaccggtacctctacgtaataggtagtcagatacatctttggatcctgcggagagagctgctcgatcttgtcttcctgtgtcttctgcgcctgttcctccggggtcagttctccttctgtggaatctccgctttcaacatctgtgctgtctgcttctgtcccatcctgcatatctgtctcttctgccggctctgtgatgtctgtggaatctccgtcctctgggagtccatcattatcgaccagtcccagttgcggattttcggcgctgccgtcctgagcctccatggtaaattctttttttgttacattgttgtttttgtcttttgcaacaaagataacggaaacctgttttccgtcgttcttcggatatatggtttctacggtaagagaatctgtaacatctccgtccctgtcatcctgtgcctttacacccttcagaagatcttcttctgtcatatcggatgtataatttgtatcttttccctcttcaaatgtgatcttcggtccttcattatcctcagagctcttcatgtatactacaccggctcccataccaaggcagatgaccactaataaaaacacaaaaaatttcttcatatttttgctgctcccggcctttcccaacactttgatccgttgttgttatttttatgcgtgacgtttctttttctttttggatttcttgcccattttggaagagtatgggattgtaccaagtacgcttaatccaagatatttctctacgtcttccggtgtctttacagtatcgtttgtcagatatacgatgatcacaacagctgctgccagaaggatacccagaagtccgccgatcacaccgtttttcggtacgcttgggcttgacggctcatccgggatgtttgctgtctctaccacatttactgccttgatatccataacctgctggatatgcttggaagcaatatctcttactgcgtttgcgatctctgccgctgtataaggatcggtatctgtaactgtgatggatactactcgtgtatccgttggtgtatctacggaaagcttcttaagaagcttctcatgtgtcatatccagtttcagctgtgcgatcacaccctcagtaactgtacggctcttgatcagctccgcatagtccttggtcagtgatgtacttgtctggatatcctgattggtcagtgtgctgctgtcctgcttggacagtaccacgatcttggttgtggattcatacttcggtgtgatcagaagcatggttcccataacagctgccaggcagaaaacaataccggataaaatgataacacccagcttgctcagtaacaggtgaaatacctcaccaagatcgatctctacttcgtcgttgttgttaacagtctgattttccatttcttttctccattaccctgtgattttccggggatttttgataaagatcttctttacatattcgctccccattgttttttccattttggcgacacatttgccgatctccgggatacgctccgtcttacggtgtccgtcggaaccgacaaaatccagaagcccatgcttcatgactttccgtgcgaaggtttttgccccgaatccgtcctgaccgctgatggtatctgcgttgacctggatatgtgctcccatatccttcagctctgtcaggaatccgatatcgttccgggtggccttataacgttccacatgagcgatgatcgggataaaaccattcatcagaagacttctgacccgttcttcaatataatttttctcatctccgttgctgaattccacaagcacatatctggaacctgcaagggtaagccgccgtcccttcttaaggcattccaccatatccatgctggaatggagttcacagcccagataaagcctcatgccttcatcaccaatattcatggctgctctgcgcagctgcatgaactgtcttgtcacaatgttcatatgcggctcaaacatatcataccggaaatgtggtgtcaggatcacatgacgtacgccctcctgatactccttattgagcatccagagtgattcttccatgtttcttgcaccgtcatccaccccggggaggatatgacaatgaatatcataaagtcccttcattaaaataacccactcatttctgttgtcaatgtctttttatttactactgctctcaccataatctccgtaggaaccatacttgccatacttgccgtatttaccatacttgccatagtgaccgtaattgccagccttgctgtagtccaccttgttcaggatggttcccaggatcgggcagttgctcttggcaagctgatctcttacttcctgtacaaaacggtagctgatggtaccggattcaacgacgattacagatccgtcgcaggaatctgctatgatagcactgtcgatgatcagtccaagcggcggtgtatctacaataacgtaatcataaacatctcttaccacgcggatcatatccttgaagagtctgtttccgagaagctctgccgggttcggaggtacgataccggagaagataatatggaacttcggaagtgtagtggcacagatcacgtcagaaagcttggcctgcttggaaagataatgagcaagtcccattacctcctggtctactgtcacacgtcccatcaaaacggatttacgcagatcggcatcgatcagaagcactgatttgccgctctcagcaagagaggcagcaagattaaatgccacactgctctttccctcattaggagtacagctggtaagtgcgatcactttcttatccgctccacagaactggatatttgttcgcagagctttataagcctcatccatctggtgatcagacttccagttgctcagtttaactttaatcataattccttttcacctttacctttatgttctatctgatgacagtctcgccccttgggcatgtctacagattattatacaatccaatttcctaatacgcaagttctttattcgacagaaaatccgctaaatatgtacaatttgcctaatttttatttccccgctcagaaacaggatagattatttttattccctgtgttaaaataaacccacggcaatgagtgcagcggttacaggaggagccttattttttgccaaccgtgattggctgccataaggaggatataaacatatgacaaaacaggaatttcagaaactgaccgaaaatcatgtcctgctgctggatggtgctaccggctccaacctgatgaaggccggcatgccacgtggtgtctgcacagagagctgggtgcttgaacacaaggatgtgatccagtctctgcagaaggcatacatcgaggcgggaagccatatcatctatgcgcctaccttcggcggaaaccgtattaacctcactatgcacggactggaggatcagatcgaacagatcaatcataccctggccggctattcaaaggagattgcaccggagggtgttttcgtagcaggtgatatcaccaccaccggcaagatgatggcaccggccggtgacatgacttacgaaaaagccttcgaagtctatcaggaacagatcggctatctccgtgacgcaggtgtggacctgatcgtagcggaaaccatgatcaacatcgaggagacactggctgctgtagacgcctgccagagtgtctgcgagcttcctatcatctgtaccgtgactgtagaagcagatggaagtatcttcagcggcggaaatgccatagaggctgccatgtccctggaagctgcaggtgcagacgctgtcggcatcaactgctcggttggcccggatcagctggtatcggttatccgcaatatcaaagagaacgtttccattcctgtcatcgccaaacccaatgcgggaatgccccagatcgatgatcttggaaatgcagtttacagcatgacccctgcggattttgcaggttatatgaaggtgcttgtggacaacggtgcttccgtgatcggcggatgctgtggtaccacaccggagtttatttcggaaaccgcccaggtgcttggacttcgataactttaaccggaacagatatgtttccacgcactgcttcaattgagaacagcaataagccgtgagtggaagattccgtcaaaaaaatcctgaggatcctatgtgagatatcaacagatatcaacatagaaattctcaggatttttgttttttcggatattatttctcttttactgcttccgccggccggtttgcctcatccgcataggagctgcggatcgcttttcgcacaggaagtacacaggcgggaacaacggaaaggccgtccactcccatctggataaaagcttctgtaagattggaatctgctgccagctctccgcatatgtaaacttcacatcctgacttatgtcctgcctctgttaccatgcggatcatctttacaagcgccggatgatgatcattgtatttatccttcaaaagaagattctgccggtccatagccagggtatactgggtcaggtcattggttcctaggctcagaaaatccacacgttttccaagttcttcactgatcatgaccgctgccggtgtctcgatcataattccggtacggatgtttttgtaaggaatgttcttctcatccaggcccttttttacctcacggatcagcttctcgatctcatccagctcatcctcggacgtgatcatcggatacatcaggttgatatttccataggcacttgcacggtaaatagcccgaagctgcgctttaaacatttttttgcgatccaggcagaggcggatgccgcggtttcccatcattggattgacctcatcaggaattgccatatattctgcctgacggtctgcccccaggtccacggtacggatcactgccggccgttcatccatatcctcggctacttttttataggcacggaacagctcattctctcttggataattctctcttccgagatactggaattcacttcggagaaggccgatacctgccgctccgtaataaagaaccgtattcagatcgtccagatttccgatgtttgccagaagcttgatctccttgccatcggctgtgatatccttctggttccgaagtctcaaaagttcttcccgctcttccttatctgctgcatgacggatctcatattccttaagaagctccggctccggatcgatatacagtgttcctgtatacccatctacaatagccatatggccatcccattctttctgtatctccacctcgaccagggtggggacttccatggattttgccatgatcgatacatgggaaataacagacccctgatgcatgactaccgccagaagactggctttgttcatctccagaagttcattgggggaaagctgctctgctgcaaggatcactggctcatctcccagattgatccgtgcatgggagccacccatggcgccgatcagcagctcggagatctccctgatattttcgatctgttctttgacagcctcgtcctccagcttgcggaacacattggcaagctcatccctggttgtctggactgcgtaagctgcactgaccttttctgtcgtgatcatgctttccacggcccgctgaaagctgccgccacttaagagcttcagctgacgtttcaaggtcagctcctgctctttggggaggggtgctccgtttttatacatatgctggatctggttctttaccgctgttcttgcattatccagacgatccagctccttttttacattgtctaccatggactgacggatctgatattcgcctctgtggtaatacagtatttttccaatggctattccggaaaaagcggatgtgcctttgtatatctccacctgaaaaacccccttactggtccgtctgcttaatcgcaggcagctttaaactctgtccagatcttattgtattcctgctctgcttcctggcttacattctgtacgatctcaccctttgtcacgctgtccggaacaaccaggctctcgtctaccagatcatctgctgccttgtttgtattgtagtatccgatatagttgatgcactgtgcagatacttccggctccaggatataattgataaattcattggcagccttcgcattcggtgcttcacttggcacaaacattcccataataccaaatccaagaccttcctccggataaaccaccttaagatccggattatccttcagtgcctgtgttacctgtgatgtataaagaaatgccacgcttgcctctccgttgagaagggcattctgtgtattgtcatcctggatcatacgaatgttcggtgccagctctttcagcttctcaccggtcttgtcgatcacggatacatcttcttcgttcatgctctcccccatggaaagctgtgtgatgccacagatcacgcggtaattacctacgatggcaatgctgtcctccagagacttatcccagagatccttgtatcctttaatgtcgatatctacctgctccggatcataaacgatcagtgggattcctgctccgtaaggtactgtatattcgtcatccggatcataaaactgtccctgataaaggggattgatgttcttaaaattggaaacggtatccttgtcgatcttctggacaagtccctcttttaccgcgctgtcgataatgtaatcatctgcaattaccacatcgtaatcgccgccctttgcctgggaaagcttctcaagcatggtctcatcggtatcaaagttggaatacaccaccttggtccctgtttctttttcaaaatcatccagcacttcctgcggaaacattccgtcccatgtataaagtaccagttcatccttatcctttgcactgacactgacacctgttatcatagatgttccaagtaccgcacataacatgatcgctgctgctttttttgatttcatagaacctccttcatgtctctctctgacgtcttgttattttgcttttacctttgtccaaagctctgcgaatttctgcttgatctttggcttctggtatccgaagatctcattctttggattgtcgatctgcggaatataggaagaaattccctcataagttccgttcttcatctcctcgaatgcacgctttacagtagaagtatatcctacttcttcggtattggaaagagcattttcatcatccagcataaaattgatgaactcatgagccagatctacttcattacagtccttggtgatgaccatggcatcataccaggtattggttccctgctgcggggtataatagccaagctccggattttcgctgataatataggaagcatctccggaataaacaaccgccattgccttgtttcctgagatcatgttgtcgatcacatcatcacctgcatagatcggatccatggtatctctctgccggatcagccactcataagcctgctggatctcatcaagatttttggtgttcatggaataccccagcgctttcaaggcgatcataaaggaatccctttcggaatcatacatataaagatctcccttatatttttcatcgcagagaatattccagccctctttgtcaagatcctcctgagagactacattcttattataaaggatgcctacagttccccagaaatacggacaggaataacgatttcccggatcatagtccttattctgtacctcgggaagaagatttttgctgtttggaatttttttccagtcaagggcctgaagatattcctccttgatcagtctttcaatcatataatctgacggaaccaaaacatcgtaggtttcaccactggccagcttggtgtacatcatctcattggactcgaaggtttcatatacaacagtacagttatactgcttctcaaatttgtccagaagactcaggtccatatattctccggcattatatacacgaagcacgtggtttccctgacttacgagcgtccactttcccaataccagaacaaccgcagcagctgtgataaccgcaacgatccttctttttttcggatccatttttttcacggtggaggcctgaagcttcggcatgatcagatttgcaaaaagaagcaccagtacaatgaccacgatcacaatggtagaaagggcgttgatggtgggattgatgcgctttgtcatattatatacaacaatggatatattttttactccgtttccggaaacaaagtaggaaattacgaaatcgtcaaaggacatagtaaaggccaggagcgctcccgcaaaaatcccttctttgatcatgggcacgataaccttggtaagtgcctgatatggcgttgcaccaagatccatggctgcattggcaaggttcggatccaggcttcgtaccttcggatatacactggtgatcacatagggcgtacagaatgcgatatgtgccagcagcatggtcagatagcctttcgtcattcccagcgaagaaaacagcagcatcagaccaatcgcggttacgatctccggattcagaattggaaagttattgatggtaagaaccatctccttcagcacctttctggattttgaaagtccgatggctgtgatggttcccagcactgtagaaataacagttgccagaattgccactgtgaccgaaacataaactgccttactgatctccatgttgtttatcagctctccgtaccagcgcagggaaaatcctgtaaatctggtcagggacttggatgagttaaaggaaaagatcatggtcacaaggatcggcaggtaaaaaaatgccagacacagcactacatataattttgaaaatatggtattttttcttttcatctcctgcctcctttaatcgtcctgggtatccatcttcttcatcaggctcataaagatcaggatgatcactgccaggatcagagagatggcacttccgaagttccagtcacctacagaaataaactgtgactcgatgagattaccgatcagcatgtactggccgccgccgagaagcttcggaataacgaaggttgatatggacagaaggaataccatcatgataccattgaccacacctggcatggaaagcttccaggtgatcctccagaaggtctgaaagggattggcaccaaggtcgttggccgcttcgatcagtgacttgtccattttacttaaggatgtatggatcggaatgatcataaagggcataaagttacagacaaggcccacgataacggaaaaatctgtatacatcatggtgatcggtgagattcccagcattttcagaaggttgttcaccagaccattgtcagaaagaatgttcatccatgcataggtacggagaagcatgttgatccacatgggaatggtgaccataaggatcagaaagctctgcaccttttcggaatatttggaaataatgtacgccagcggatacccgcagaccaggcagatcagtgtggtcaggatacccaggcggaaggatttcaggataacacttaaatatgtagcttccagaaattttgcaaaattcgcccatgtaaaatgcagggtcagaacttcatttccatctgaggtaaatgcataaagcacgatcaggatcaatggtaccacgatcaggatcgaagcccagatgatatacggcttgatcagatgcttgaactgtttcattagtatcctcccattctgcacataacatggatatcctcaggaccaaacttcagtcccacttcacgtcccacttctgcataatcggtagtgtgcaccatgtatgtgcgaagctccgtctcgaccaggatctcataatgcacgcccttgaacgtaatgttccgtaccgttcctctgatcttggcctgatccggttccacaatatccagatcctccgggcgaagaacaacctcaatggcttcgttgtcctcaaatcccttatctacacattcaaaacggaagccatcaaactccacaaggaaatccctgatcattgttccttctataatattggactctccgataaagccggcaacaaaacggttctccggctcattatagatatctgtcgggctgccaatctgctggatctcaccgttgttcatgactactaccgtatcagacatggaaagtgcctcctcctggtcatgggtaacatagataaaggtgatccctacctctctctggatctttttcagctcgatctgcatctgcttacggatcttggcatccagtgcgccaagtggctcatccagcagaagcaccttcggctcattgacaagagctctggcaatggcaactcgctgctgctgtccaccggaaagaagtgtaacatctcttttttcgaagccttccagccctaccattttcagcattctttttaccttctgctcaataacagatttatctacctttttcagattcaggccgaaaccgatattgtccataacattgagatgcggaaacaatgcatatttctggaatacagtgttgatctctcttttatatggaggcagcttggagatctcaattccgttaaacagtacctctccgccgcttggctcctcaaagccggcaatgatccttaaggttgttgtctttccacagccgctgggtcccagaagcgtaaggaattcgttttcgtgaatgtccagattaatgccccggagcacctgctggtcatcaaagttttttgtgagattttttaactcgatcagtttgttgctcatcttttatattccccttcccgcgttttcctgcgatcagatatactgccagtaccagaaggatcactcccagcattatggtacaaagtgcattgatctccggcgtaacgcctgttttcatctgtgtgtaaacttttatcggcagcgtggatacacgtggcccggttacaaaaatactgatcaccacatcgtccatggacatggcaaaggccagcagagaaccggatataacagccggcatgatcagcggcagggtaatgtcccagaaggcccgaaaggaaccggcaccaagatctctggctgcctcttccagggacggatccattcccacaagccttgcttttacctccatcaaaatatagggcacacagaaaaccgtgtgtccgatcagaagtgtcagcattccaaatggcaggttcagcatatagaaaaatgccatcagtaccattcccagaatgatctctgggatcatcagaggcagaatggaaatatactccatcaccccttttgttttccagtggatcctggaaagtcctacagcccccagtgttccgatcactgctgataccccacagctggacaccgccaggatcagactgtttttcaatgcctggatcagatccctgtcctgaaacagttcctgataccatttcagggaaaaaccggtaaagcgcaccggaagtcttgcttcattaaacgaaaataccactaccacaccaatgggcagatacataaggaaaaacaggatccccaggtacagtcctgaaagctttgagttctttttcatccgattccctccagttccttcacattggtaagcttccgatataatacgatcatcagagttgtcagtatcatcagtaccacagccagtgctgcggcaaagggccagttattgcctcttgtcatctgctcctggatcagacttcccacaagtacgatcttgtttccgcccaggatatccgcaataaaaaacagacccatagacggaataaaggtaagtatcactccggaaagaagtcccggcaaagtcagcttaaaggtgacgctccagaaagccttccatttgctggctccaaggtctctggcagcttccacaagggaccagtccagcttttccgcactggaatatacggacagtgccataaacggcagcaatacatagatcataccgatcacgatcgcaggatagctgtacaggatttttaagggctcctggatgatgccaagcttcatcagcagataattcagaaggccctttttctggagaatgatgatccagccataaagacggatcagggaattcacccagaaaggcagcatcagaaaaagcatggccagcttctttttgccctcagaaagctttgccataaagtatccgaaggggtagcccaccagacagatgatcaaagtgctggtgagcgcaaggcggaaggatcccgtaaaggtctgcaggtatacaggctccaggatctgcttgtaattatccagagtaaatttccaattcacgccgtagccgccgtctgctgtggaaaagctcagtgcagctacatacagaagaggcagtgcgacgaagatcagtgtaaaaagatacagcggcaggatcatccatacggagcctgctctgtgcttacgcatgggtacctcctgcacagggacctgactgatccggcaatacttcttctgatctttcttcccgatctaccagcactgcatctgtaggaagaaaacagcagcgcaccttttctcctacactgacatttgtatcaatgccgtaacggcttgccacgatttcctgaccttccgaagttttcaaaacaacacggagctggccgccggcgaaggttttttcaataacttcggcggttaagccatcgcagctgtcatctgtgtttttttctgcgggctcctgtacactcttttttgtgttttctgatgtgcaattcggcgtgctttgttgtgcattttttttattttcctcaaaccggatattttcgcttcttactgcgatggtaaccttttctcctttttgtgggaaatatcctctgtcagatgtagctacggtgtccattgatacttttacttttccggcatcagttcttacggtgatctgagcggaagtaccgtcaatctcctcttccgcaatgctttccacaataccggtcaggatatttgcatttccaacaaaggttgccacatagctggtcttcggatgattatagatctcatccggcgtcccaatctgctcaaagcgaccgtggttcatcacagcgatcgtatcagacatgttgatggcttcttcctgatcgtgagtgatatagataaaggtgatccccagcttcttctgcaggcgcttcagctcgtgctgcatggcacgcctcagctgcagatccagcgcaccaaggggttcgtccagaagaagtacctccggattgttcacaagtgctctggctatggccacacgctggcgctgaccgccggaaagctctgacggcttacgcctctcaaagcccggaagctggacaagctccagcatttctttgactcttctgctgatctccgctttcgatgtttttttcaatttcagcccatatccaatgttatctgctacattcatatgtggaaaaagtgcataattctggaacactgtgttcacattgcgctgattcggttccagggatgtcacatcctttccatccagaaaaacctggccggaatctggctgttccaggcctgcaatgatccgcagtgtggtggtttttccacagccggaagaccccagcagagtgacaaattctcctttttttgctgtaagacagatgctttctaggacgtcctcaccttcctggaagctcttttttatgtttttcagttctaatgaaatttcggacatttagttctccttctgtttgctatgatatccgcaccctgcatgggactttcctgatataagattgcttattgtactctcgcaggggattctcctgatccaagattgcttattgtaccccgcatgggactttcctgattcaagattgcttattgtaccccatgggatttcctgatccaagattgcttattgtaccccgcatggggtttcctgattcaagattgcttattgtaccctcataggacttctctgattcgattaactactcattttcatgaaaattatctcgtatatactgacaataagtttctttattaaatacaggtttaaattcccgacagattttttttgcttcttttgcctgatcacaaagaagacgatacgtagtcagtgccagaagcttggctggtttgatatatgccagttcttcatccatgatcttaaaatctgctccgtgaagttttcccgcaaatcctccgaatgtaaaattcagcactggaaacagatgggtcaggtctcctacgtcggtacaggcgttgttaaaatctgccggctttgagcaccggtacgtagcgtccagaagctttacagattcttccatcactttatccgcacctctgtgcaggatcggcatatatccctgaagcggttctctttcgatcgtaccaccgaatgcataggcagctccgtcataagcacggtccattttttcctgtgttgcccggatcgcatccagagacgctgcacggacttttgtttcgatcaccgcttcgtccggaactgcattgatcacatctccggctttccgtatcacgttgtgaagacgcacatggtcttcctcccggaacgtttcacgcatcagtcccatcatctggatggcactggaagtaatacttaatgcattgacgccatcccatggatcaatggctgcatgtgcggcttttcctcttactgtcactcgttctgcggaaaatccattgcaagccgcattccccaggtaaaaatcttcctccacctgcatcatgtgcacgtgggttgtcagaataatgtcagaatggtcaaattctccaagccggatcagttcgctttttccggatgcaggaaagccgattccttctttacgaagccgtgcacgtttatctgcatcaatgtattcttccgccggaacggcaaaaaaagatacggacccagacagagaggcttgaacctcctcattggtcagtgccaatgctgcgccgatcatggctgcaatctgtgcgtggtgtccgcatgcatgtgctgtcccattaacgggatcagccatcggatgcgacttacatccgatggcgtcaagttctccgataatcgtaatgttcggtccgtcctgttccatccactcagcgcggactcctgtgcgtgcaagtcctccatgcacacgaagtcccaggccacgcaaaaaagccgcaacatgtgcggctgttctctcctcataaaaccctggttccggatgactctggatatccttcgcaagagctatgatttcttctctatgttcatctatagtctgaatgatcttttcttcaatatgattcacgtttcgtaacctcctttttccgcaggttaagctatatgatatcataaaacagttgatttggaaatagatattttctggagatacttcgccactccgtcgttttcattggagccgatgatcccggttgccacagctttcagttcactcactgcattttccactgcataggcttcatccgctatttcaaacatatcaatatcattttttccatcaccaaaaacaactaatctgtcacattccagtttttgttttagctgcaaagcagcctgcgctttggatgctttttgcggcatgatctccagccactgctctcctgtgtagatgtccttctgataaacaacatgatatttatttttatatttatgataaaatggttccagcttctccggcttatcaatgcaggtaatataaaaaagatctccatacatcagttcagattctgtagttacaatattcgtacgtttgtcgcccttccggctgtttaaaaatgcctgcattccacttgttgcctttgctgttatataagaaaacttttcaatattattctgatatgaatatatgatcggatatatttcatgcgcaaaaagatccctcaatacctcatatatatcctctgcaaaataattggcaatgagaatttcctctgttatattatctttcacaaatgccccattgtatataataagaggaaagtgtgtgttaaggccttctgttactttttttgccgtatttaaggaacgagctgttgcataggaaaatgacatgcctgaagaagttaaagcattgattgtttttattgtatatgaagatagagtttcattttttctcaaaagagttccgtcgagatctgatacgtatagtattttcataaataaatcctttcgttttgctatgaactgaatagggaaacttttttcagttgacaggaaaattgatgataaagtatttctttattatagcacaaaaaaagtggccatttaagccacttttttacgattgtatattcaaaactacatacatgttctgttgatgatcgttaatcttttttgaatcaattcttaacctgcgtttcttggtcaagccctcacccgattagtaacagtcagctccatgtgttac

SEQ ID NO: 197 - DNA, 12308 bp, Unknown
  gut microbiota DNA sequence
attataagaaaacctctgatggattcctgactgtccgcacaaaaaactatctgaaggatcagtattcagttcatatgtaccatctaaaagagaaggagctcccaaacgaatctaatcttttgtttttatgcggaaaaacagatgaacacactgccgatacctttgatcgccttggatgcaatattctttccatgtgttctgactgctctttaattgttatggatgagcttggtccacatgaagcagacgcagctttatttcggagaaaaatcctaaaccttttggatgggcagactcccattttaggggtattgcaagaacctgcagaatctttctggcctgaaatcgtaaatcacccaaaggtagaaatcattataatttctgaagacaatcgaaatgattgctctttacttaatcacattcaatataaaatctcatctccttaataattactcccggggctatgcgctcggaactaaccaaagggtcaagtagcttttgagaagtctctttgtgtattttcaatatttttattctcaaatcaccccaaacaccttcatcgcattactctccgtcacagccacaacctcctcgcagctgatccccttaatctccgcaatcgtcttcacaacctccggcagatacagggagctgtttctttttccacggttcggcacaggtgccatgtacgggcagtcggtttccagcagaatctgattcagcggtgcatactctgccacttccttcagcttccgggaattcttaaaagtaaccactccgccgattccgagataaagtcccatattcagatactctctcgcaatttctttgctataggaaaagcaatggataactccaccatacatcccgtccttcatatattctttcacgatattcaacgtatcctccgcagcgtcacggctatgaatgataaacggaagctgtttctcacgggcaatgtccatctgctggcggaataccttctgctggagaagatgctcctccttctccttatgccagtaataatccagaccgatctcacctacagccacagtcttttccatgtcgcaatatctgcggatctcatccagaactgctgcatccaccttatccgcatcatccggatgaacacccactgcgccataaataaaaggatacttctccaccaaatcataaacccggtcaaaatgtcccacagaagcacacacatccacaatatgcccgatcccgttctcctgcatactatccagtatgtcagaacgatcctcatcaaaagcctcatcatcgtaatgtgcatgggtatcaaaaatcatagctttatccacagtcatctcgtcaccgacggaaacttttccacctttcagcactcttgtaaacacaccttcccgtggcatgatgcattcacccatcttctgaaaaatggcacagccattgtggcactcctttccgatctgagtcagctccagcacaacctcaccgcaacgaaatctggtgccaaccggaagctttgcaaaatcaatcccttccacaaccaggttctcaccaaaagcaccatcctcgacctctgcgcccttcgcacgaaacacatcgatcttttcaccggaaagaagactcacctgccgatgccactttccggcatgagcatccccttcaagcccccagtcctccacaaaaaccgcagacccgacattcttcttctgtgttcctttcttctcactgatacaaaccgcaagtacttttcccatagcaaactcctattaatcacacatcattaccaaatttattcctatatcacaccagtaatattgatttccaaaacctaccacatgtaactctcaagcctcaggaattatgaatcgctggagatgaattttaatcataaaacctaccacattcaacagccagcccaacggaggcagggccagtacggtgacgttagcggagtggccgtcgagaggcgagtatagctgctgccaccgagcgccctgtttgagccgcaggcgagttggcgcgaatggcagcaaatcagcgacgcagccgaacaggccgcgcagcgtgtcaccgtactggccctgcctccgttgggcgtccgttcgttagtacaggtatcccccatacactaccggccacactccccggcatccccggtaagtatctcaatcccatgccccaacgcctcaataataacctccaggcactccctgacagccttagggctccccggcaggttaacgatcaacgtccccttccggatcccggccgtagcccggctcagcatcgcccgcttcgtgatcgtcagactaaacgcccgcatcgcctccggaatccccggcacacgccgctcgatcacatcctccgtagcctccggtgtcacatccctctgagaaaacccggtaccacccgtagtcaggatcagctccgcaagccccagatctgcgatctcagccatccggctcccaagcatcccacggtcatccggcaaaacatccacagaaacaacctcatacccggccacctccataatctccttcacagcaggaccactaagatcctcacgctcccctctgtaacccttatcactagaagtgatcacagcaactctcttcatcactcaacctccgatctgtgccatacaaagcttctccgtcttatcgtccttctgtttctccagacttccgccaaaagcatgcccgtcaggtttctccgccagagcctccaggatcacagccttcagcacctcatccgaaccaccaccgcggatcacctcccgaagatcccttcccgccgcatactgcagacaggtcttcaaaaagccctgtgaagtcagccggatccggttacactccccacagaacttatggctcaccgcgctgataaacccgatctttccggaaaaaccatccacatcataataatgacacggtccattcccaaggggctccccaacatacggcgaaaaccgcggaagcttttctccaaggatccgaagcaattcctcctccgacatcccatgaaattcttttcccatcccaatgggcatcatctcaataaaccgcacatgcaccctgtgatccctggcaaaaagcgccacccggcaaagatcctgctccgggatcccaagaggcacacaattgatcttcagtgaaatctccggatacttcattgcctccgaaatcccttccagcgtccgcccaagttcatcccgccgcgtgatcctcctgctgcaggcttcatccagtgtatccaggctgatattcaatccgtccagccccgcccgggcaaaatcactcatctgatctttcagaagcaaaccatttgtagtcagagtcaccttctcgatccccggcatatttttcagtttttccaccagctgaggcatccgcggccgtacaagcggttccccgccggtcagcttgatcttccggatacccagctctgccatcacccggcagatcctcaaaatttcctcttcctgcaaaatgagggagcgctccacatgctgcactccctcctccggcatacaataaatacaccgcaaattacatctgtcagttacggaaatcctgagataatcaatatttcttccgcacctgtctatcattatttttccccaaaacgaaaatctccgcttttgcctcctgttttttcttccagatggatatcagacatgaccatgtgcttgtcaattgccttgcacatgtcataaatggtaagaagcgccacctgaacacctgtcagggcctccatctccacgcctgtttttccctctgtttttaccgtgcagaatacacggatcactcctgcgtcctcatccgtctcaaaatccacagaacatttctggatgggaaggggatgacacatggggatcagctcagaagtacgcttcacacccatgatacctgccacacgggccacaccaagtacatcaccctttttcacatttccgctttttaccgcggccatgatctccggacttacctgaatggaacccgtggctgttgccgtacggtgagtgaccggtttgtcgcacacatccaccataacagcattgccatttttatcaaaatgattcaattccatatctgtctatacttagcagatctcagcgcctgcaggcatctctttctccggtaccatcagggaaagatttccgtctgcatcctctgcacagaggatcataccctcgctaaggattccggcaagcttggcaggcttcaggtttgtaacgaccataacctttttgcccaccatttcctctgctgaataatgagccttgattccggatacgatctgacgaacctggcttccgatcttaacctgagagcagagaagctttctggatttcttaacctcctcacaggcgatgatctcaccaacctggaactgcagcttctcaaaatcatcgaaagtgatctccggctttgcctcgatatcgatcacgttctctgttttctcctcttctacctcttccttcggctcttctttcttcggatgaagcttctcaaccttctcaagaacctctttcaggtcaagtctcgcaaaaaggatctccggtttgtcggttacgcggtttcctgaaggataaagaccaaactgctccatctcctcaagagttctctcgtttgcgttgagctgtacaagaatacgctctgttgtacgcggcataaaggatttcagaagagatgcgccgatgcagattccctcaaccaggttgtagagaactgttgcaagacgatcctgctttgtctcatcctttgcaagtgcccatggcattgtctcgtcgatatatttgttgcagcgtttaaacagagagaatacctctgtgatagcatctgccacacgaagcttgtccatttttgcggaaacgttcttcggaacctgaaggatgaagctcttaagatcctcatcaaccggctcagtaacattcttattctcaacgattccgttaaaatatttgttggacatggaaattgtacggtttacaagatttccaagtgtgtttgcaaggtcggaattcagtctctcaaccatcagctcccatgtgatcacaccgtcattctcaaatggcatttcgtggagtacaaaataacggacagcatctacaccgaagaactcaaccagctcatctgcatagattacatttcctttggatttactcatttttccatcgccctgaagcagccatggatgtccgaatacctgtttcggaagcggaagatccagagacatcaggaagatcggccagtaaatggtatggaaacggatgatatcttttccgatcaggtgaagatctgccggccagtatttgttgaatttatcgctgctgtttccgtcgcagtcatagccgatacctgtgatatagtttgtcagggcatccagccatacatatacaacgtgcttcggatcgaaatctaccgggattccccatttaaaggatgttctggatacacagagatcctgaagtcccggaagaaggaagttgttcatcatctcgtttttacgggactccggctggatgaaatccggatgtgtgttgatgtagtcgatcagcttgtctgcatatttactcattttgaagaaatatgcctcttccttggcaggtacgcatggacgtccgcagtccggacatttgccgtctacaagctgggactctgtgaagaaggactcacatggtgtacagtacattccttcataatgacccttgtagatatctccctttgcatacatttttttgaagatttttttgacctgctcttcatggtctttatctgttgtacggatgaatttatcataggatgtgttcatcagatcccagatgcgtttgatctcaccggaaacgttatctacgaattcctttggtgtaacaccagcctcctcagccttcagctcgatcttctggccatgctcatcagtacctgtctgaaaatatacgtcataaccctgctgtcttttaaaacgtgcgatcgcatccgcaagaacgacctcataggtatttccgatatgcggtttaccggatgtgtacgcaatggcagtactgatataatatctctgcttttccatcttttctttcctccataaatataaaaataaattgtgtacttgctcataacggactgaaaatatattccgtcaaaacaggaaaatccctgtccggggacattggaagattaccaagtaattctcagcgacataaaaaaacgtcttctcataccataatgatatgagaagacgagttattacccgtgttaccacttcttttcgttcctgcctcgcggcaaaaacctcatcaggtacagcaagctctatacccttccgctataacaggcggtcctgtcactgcctgccggtgtccgttaaatcggacattcgcacttcgcttatcgcgtttaaaccggttcagcaatgcctctccgaagccatcttccatctgcgcctgcacatccctctcagtctcggaactcctgcataaagtgaacctttaccattcactctaccgcagatctatgacctcaactgcgtcacagcctgcatctaaaaagtcctctggggatttccctgtagtacggtgtacacatgtactctcttcttccatgagttttccatatgggaaaatcgtaacacatttccgatggtttgtaaacggggaatttcgatactgtattacattctcctctgcctgtacatccaccgccacgccatccggaacgcaatggttgtcagcgtcattcctgctgccatgctcaccgcaaaaaggatcgtatagattccgtctttctggaattttgcccagtccttcatcaacatccagttcattgtccggtaaagtgctgctcccggaatcaacggaattgtcgcagaaaccagaaatacagttaccggcgttttatgaattcttgccatacattctgcatacaaagtaatagctactgttgaccagaaaccgcacacatacggacttggcgttatgaactctactgccagatatacagcccaggacagacatccacccaatgccgcaaaccagagtttttttccatggatattaaataatgccgcaaagccgagggatcctgtgaaggatacgaccagctgtatgatttcccgcatgttttcctcctgaataaaatcataactactctcaaatactcccatcatctgctgcatttcgctactccgcaattgatgcagtatctaaactcctcattcactgcttattgcttttcgcaaccttcaagagaacttccctgattcggttaaaacaacagattcgccaccgtaaaaccaaggcccacgaccaatgccagcaaaagtgcctccatacatcggatcaaacctgtaatggtatctcctgaaaacatatcgcgcaatgaattggtaaatgcaattcccggtatcagaagcatgatatttccgatactgatcagatccgcatgatgtccaagcccgattagaactgtaagattggaaagtactccgccggctccgcagcaaagaagcactgtcagtagcgagtttaatgcacctttttttacaaaagcctcaaacagcttcagggcgataccaatcagcgcagaagcaatcatatcgttgacatctcctccgaaaaacacggaaaaagaacctgaaattacagcatagatcaaaatctgcgttttaaaagaatatccttgtttatcccggatcttttccagccccttctggatctcctccggcttcggccgatactcacagatgtatctggaaagctggttcaggtcatccagccgtcccagatcattggacattcccggcacacgccgcgtctgggtgcaaataccgaaatcctctccataaatagtcgtcacaatactggatgtgatagaaaaaacatctgcccgggtggctccatatgccaggcagatccgccgtatggtatcttccacacgtccaacctctgctccgcagcaaagaagctgttcaccaattgtcatcgcataatataaatactgttccgcttcctcccgcgtcatccggcatccctcactttcctgctttatttcatttttatctattttaggacacgtaaatattaaaatcaacaaggattttttgtcttaatattcatttcttctatattttctcaaagtaataagcagatattttcgttcaaaataaaacaccacccggacaaaaaagatatctatcccttctgtccggacggtgtttgtgtttgaaaatccaatgctctgctcagtttttatttatttgaaatctaatagatcttatgcaagttttccgccaagttcacggcaagctgcaagtccttcatcatcaggtgtgttgtttacaatgagtccttcatcatcaacaagctctgcgcctgcgtcttttgctctgccgcaccaggttctcatccactctccgtcgccccagtcataggaaccgaaaagcgcaactttcttaccggaaagtttgccttccagatcagagaagaatggctcgaactcaccatcctcaagctcctcatctcccattgccggacaaccaagtgccaaaacatcataagagagagctttatctacatctgcatctgcaacttccatgatctcaacatccgcaccagctgcttttgcaccttcctcaacagcctgtgccattgcctctgtgttgcctgtggaagaccagtaaataattcctaccttgctcatcttaaaaacctcctgtttttaaactttatattatacgcacatctgagatgtacagagatgcttcataccaacaacctgcaaaatcgaataccccgcacggatctgcgccgcagtaaactcccggcacttatcatagctgtcaaaaatcctgcgagcctgctccacatcatcataaaccttccagtaaccacacatcttgcagccactgcctccgaatttccggaaacccttcacatcttcaatgggataccccaggaaaagtccgatctcatgaggaaactccgtcttataaaaaaatctctccttcagacgggcgatcatctcatccaaagaaccatctatattatacccatcctgacgtaaaagtttcctggcttcatcctgcttaagatattcctgcagcatatccggccggtacaccagaagaagataatgcttcctgcatccacagatgatctccatacggatgccttcccgttcaagactctcctcataatccgaaatgatctccggcagctccggcattttttccttggaaaaggaaacaagattcgccggtttcattcccattaatacaggggaacaatgataacccatgacagattcaaatttttcacaagtcatttgcattctcctttacatattagttagatttctctaactgttgtaaatatactaccaaagttagtctctgtcaacttatttttataaattttcaccgagaatttttactgataaaatcctatcattaaggacacaatattccttataacaaacactctgtcagacatccgactaccagttctcaccatttaaccgaatcaagtaagtcctctgcagggttgcaaatatctcctacacctgcagcgtaaaaatactcatttacatccaactcataaaatgaaaatatttcaggataatcatatccaaacctcttgacaaacctccctctgtcatgtattataatatcagtaataattactattactgataggaggaaacattatggcagcacttaaatacagccgtcagcgagagtccatcaaggaatttctgagatccagaacagatcatccaacggcagatacagtatacgagaatcttcgacagatctacccgaacatcagtctcggaactgtctaccgtaatctttctcttctcagtgacatcggtgagatccggaagctgaccaatttcggaagcgcggatcgctacgatggaagggtcgcaccacactcacatttcatgtgtaccagatgcaaccgggtgatcgatatgcagtcagacagccttaacggaattcttgaacaggcagctgcagaatttatccacggaaaagtctttgacgtagatgcaagcttctatggaatctgcaaggaatgcctgaaaaaagaagaaaaacaagcttgacaaaacaaagatcacatggtatcataaaatagtaataattactattattaatttagaagaaacaaaaacaaacaatatatttcaaaaaagaaaaggagatcattactatggctaaatgggtatgtacagtatgtggatatgtttatgaaggcgagcaggcaccggaagcctgtccagtatgtaaagcaccagcttctaaattccagaaacaggaaggcgagctctcatgggcagctgagcatgttgtaggtgtagctaaaggcgttagcgaggacatccttgcagacctgagagcgaacttcgagggcgagtgctctgaggttggtatgtatcttgcaatggctagagttgctcacagagaaggatatccggaagttggtatgtactatgagaaagcagcttacgaggaagcagagcatgcagctaaattcgcagagctccttggtgaggttgtaacagacagcacagagaagaaccttcagatgcgtgtagaggctgaaaacggcgctacagcaggtaaattcgaccttgcaaaacgtgcgaaagcagctgaccttgacgcaatccatgacacagtacatgagatggctaaggacgaagcaagacatggaaaagcattcgcaggtctgcttaagagatatttcggcaaataagaaatccgcataaaataaggattttttaagggggaatcacagaagtgattcccccttttttcgtacaatttttatttaactgtaactttacaggttgtcctctttgagccgcttcggattgtgatcgttgcggttccttttttcagacctttgatcacaccaccggatgttactgtcacgatttttttgttggatgatgtgtatgtaactttttcctggctggttacaggagtgactttaactgaagatgccagtttacggtaagtagttccttttttgagtgtcacagatttagtgcttacagtaattttcgaagtttttactactcctctctgtacggtaactttaaaagatgctgactttttgcttgcaagaataaccttaactgtagtacttcctgcctttttacctgctgtcagtctgaaagttcccttctttgtcacagaagatacttttacgattcctgtatttccggatgtcacctttgtaacataatcacctttcgccagtccagctgctttaaatgcagtggtagactgacctgctttcattttcagggaagatgtagtcagggaaatcgtcggtttcagtttggcaactgtaatttgttttctgagcactttgccacatactttacaatgacttccttccttctttcctgctttaaatactgtcgctgcaactgctgcatcttttacagcggtatgttttgccggaagtgttacggttcttacaccatcacaggaagtacatttatcggttctgcttccttttgacgtacaggttgcctgaacagtttttactgctttccagctgtgactgtgttttgaactgttttctccaatctcaaaatgttttcttacaagccgctcccactccccgtttttgttttttcgcatggcagacagtgcaagccttgtattatcatcggactttctcgtcatgatcggaagctcctggccggaaactttctgcatgttccatgcttcatcatcgtaatcatattgcagtttaccggattctgtatccttccagctcatcactacgatttttatatcatttcctgtaatctcaacgggatcgccttttccgtttatatactgaaccagttttacttttaaattggcgagattaatggattctccaacagccggattaagcagctttccattcttatctgtcagattctccggtaacagcataaattcgctgacttcaaaccatatatcttttctgaaggcttctttatatccaccggttttatccagaagttttactgctacataacagcagccaacaccggttttatcgttggatttaattataagcttctttccatccggagaaactgtagcttctgccagttttgattgttctatgatttccagcttataatcttttaccggatgctggccactggttttatccagtatgtctgtcacaatggtcgtttcattgttcggcagcatggcttcatttcctgctgtgccttccaaatcgtatgtcagattataaaagcttttttcctcactatcatcactgtcatgaccactgtcac

SEQ ID NO: 198 - DNA, 2321 bp, Unknown
  gut microbiota DNA sequence
atctgcaaaagttgctcccgctgtagaaaatccggtagaagttttgataaattctgctcctgcatttgtaacgatctcacacattttaattttctcttcttcggtaagaagacatgtctcaatgataactttgaggattcttccatcacaagcttcatggatcgcacgaatctcattctctacttcctcatatcttccatcctttaaaaatccgatgttaataaccatatcgatttctgaagcaccatttgcaatggcgtcttttgtttcaaatacctttacagcagttgtattatatccgttcgggaaaccgatcactgtacaaatcggaagttttcccgctacatattccgctgcctgttttacataagcagccggaatacatgcaaatgcagcctcatatttcatggcatcatccaggattcctcgaatatcatcccatgttgcagtctgtccaagtaatgtgtgatccactttttttaatatttcttttttatccattttaccttccttttacttcagctcatccagaagagaacttccaattgttccctccggcatcttaacttcaaaattatctgcgatcgttgcaccgattactgcaaaagtattctgatcttccagttttccgtatccctccatagatggagaataagcaaaaaatggtactttttctcttgtgtgatcagttcctgtatgcgtcggatcatttccgtggtcagctgtaatgatcagaaggtcatcctcacgaagctcatcaagaagttcaccaagttttacatcaaatctttcaagttcctctgcatatccctttacattgcgtcgatgtccccaaagagcatcgaaatctacaagatttacaaaacaaagcccctcaaactctcttttcgcaatgtcaattgtctgctccattccatgaacagagctttttgacttattggactctgtcagtccctcgccatcaaaaatatcaaaaatctttccaacggagatcacatcataacctgcatccttcaatgcattaagcgcagtttttccgtaaggcttcagtgcataatcatggcggttgctggtacgtttgaactcaccttttttcttgccaaggtaaggtcttgcaataacacgtccgactttccactcatccctcatggtgatatcacgggcgatctcacagcagcgatacagttcatccagtccgaaagtctcctcgtttccgcagatctgcaatacagaatcagcagatgtgtaaacgatcatatgaccggtagcgatttcttcctcagccagttcatccaggatctctgttccgctggagctcttgtttccaattactttatgtcccgttctcttctcaagctcatcgatcagctcttttggaaatccggtctctgtaaaagtcttaaacggttttgtgatgtgaagccccatcatttcccagtgtcctgtcatagtatcttttccggtactggcttcttttaaaaatgtataataacccattggtcgctccactgctgcaacctgtttcaacggatgaagatttgcaattccaagcttctgaaggtttggaatcgtaaattcatctacattctgggaaatatgtcccatagtatctgttccttcatccccgtactgggctgcgtccggcatttctcctgccccaaaggagtctattacaatagtaaatattctcttatatttcttcataatttttgtctcctttctgctgtcttacttatggatcttacatatttacaacaacttttgttactaattccttgaaggatttcgctacgcggtctgctgtttcctgcacttctttatggttaagctctttttgggaaattcctgctgccatatttgtgatgcaggaaattccacagatttccattcccatgtgtcgggcagccatagcttcgcatgcggtgctcattccaactgcatctccaccccatctctgtgcaagtcttacttctgcaggagtctcataatttggtcctgtaaactgtacataaacaccttcctgaagtttgatgtcacattcttttgcacatttgcggatcacatcctgaagacggcggctgtatacctcactcatatccggaaatctggttcccagctcatccatgttcggtcctatcagagggcttggaactcccgttgtaatgtgatctgtgatcatcatgaaatctcccggtttataggaaggattagctcctcctgctgcattagtgagaaggatttttttcgcaccgagcattcccataagacgcgttggaagaacaacatctgacattgcgtatccttcataataatgaacacgt

SEQ ID NO: 199 - DNA, 69275 bp, Unknown
  gut microbiota DNA sequence
ataaatcagatttatagaaagcctcttaagcactgcggataacaggacttgaacctgcacggttgcccactggtacctaaaaccagcgcgtctgccaattccgccatatccgcatattcaattatattttcatcctgtctgatgataaaaaaataacggaaagcaaatgctttccgctaatgaggcatcggggattcgaaccccggacaacttgattaaaagtcaagtgctctaccgactgagctaataccccataaaaaggactgggctagctggattcgaaccagcgaatgcagcagtcaaagtgctgtgccttaccgcttggcgatagcccaatgggcgaagggtggatacagggattcgaaccctgggcctccagagccacaatctggcgcgctaaccaactgcgctatacccaccacaacgtgcctgaagggattcgaacccccgacccacggcttagaaggccgttgctctatccagctgagctacagacacatgctctcttctcagagaagcgggtgatgggaatcgaacccacgtatccagcttggaaggctggtgttctaccattgaactacacccgcatgcttgcggtaataagtttacagcagtcggggtgacaggattcgaacctgcggcctcctggtcccaaaccaggcgctctagccaaactgagccacaccccgatgtaccatttacttatggtttttattaagttgttgtcgtcttcgtttgtgtttcgttttcgtttcctgcctgacgacaagtgatattatattatagcgatctacaaatgtcaacaccttttttgaatttttttaaaaaaactttttttcacgttttttccgcctatttaaaggttttcttgtcatttgcgactggcttatggtatcatgaaaccataattaaagtcaagaaaaaaagcaaataataaggagatgtttttacatggatataaaattatttcagcagaagcttaatgacatctgtgccatcgctgaggaaaacaataagcagctctcccagcagcagatccgtgaccatttcgatgaatcggatctgagcacttcacagcttgtaaagatcctgcagtatctcaaattaaaggggatcaccatcgaaggcgccgatgaagctgccggcgctgccagagcagatgctgtttcatccgaatccagcgacaaggaagagcttccgggtacccgtgctgctcttactgccgaagaacaggcttatctcagtgactatatggaaagcttttccccggagggacttgatccggatgatctcgcgtccctctttcaagcctttgcaaagggagacactgctgccgaaggtgcactgacacagttctacatggctcaggcagcccagatggccgctgaactgaactgtgaggaaatccacctggccgatctcattcaggaggcaaatctggcccttctggcgtctctcaaagagactgccccacaggagaaaaacgatgcctggatgcgtggtcgtatccgcagtggaatccttcatgccattgaggaacagacacagcagaaattccgtgacgactatctggtatccaaggtagaaaacctggaggctgcggttaaagaactcacagacgatgatgacgccaccaaattcaccattgatgagcttgccgtgatcctggatatgaatgtggatgagatccgggatgtacttcgccttaccggagatgataaataaagctttcttcatattcttcacaaaaacgggtctgacatagcttgtcagacccgtaatcttaatattctttatgctttttcttcccgtttcagctccgccggttctgccagatggatctttccttcccgaaatatgtggataaatacctccgccatatccggatcgaactgttttccttcctcttctcttatgatccgaagagctttttccactggcatcaattccttataacaacgtttggatgtcatggcgtcaaaggaatctgcgatgcagaggatccttgcagatgccgggatatcttctcccgcgatcctccttggatagccgtttccatcataacgttcgtgatgaccgataaccgcagggataacataatccagcgacggaaggtgacggatgattccgatggacgcttccacatgacctttcatgatctcatactcttcatccgtaagcttgccttctttattcaggatatgctccgggatcccgatctttccaacatcatgaagaagcgccgcctgacggatgatctccaccatttccgttgtatagttcagcgccttcgcaagacttgttgcgtaataagccacattgttggaatgtccgaaggtataatgatctttggtatcaatggctgcagtcagcgcatagatcgtggattcataggactgataaatatgttcatgatcggatttcttacccgcattttcttcatccaggctttccttcagcatggtgtcaaaaatctcgatgccgtttttaccgctgcgctttacatgatatactgccaggtccgcattatccaggagttcctttgctgagcgtgccgcataaggcgccgcactgatccccacgcttaccgtaaggatcttcagcttgtagtctgcagaatcgttgcgcatatgcaggatctgcttctgtatggattctgccagatttctggcggaaaaaatatcgtaatttggcatcaggaccgcaaattccttggcactgtgacgtgccacatatccctgttctcccacacttgcctggatgatatctgccacctttcgaagtgcaacatctccctgctgatttccgtacagctgattgtacagcttgaaatcatcaatattgaacaggatcagtgcaagcgaaccctctttatttttttcgtattcctcatccaggatctcataaaaatatttccggttcagaaggcccgtcagttcatcggtccttgcctcagtccatgccgcctcataaagtctggcatttttgatggcaatggaagctactgagctgaccgaagacagcatggcaaggtcattatggttcagattcctgtgtccgtcaccggaaatcgcaatgatcccggccagatcatcattttgtcgaagacctgcacagtattcgatacccagctctgaaaacatatgtttctccgactcccacatggatttgtaggctgtggaagaacgaaaatcccggatcaccacacagtcctcatttctggtaagccaggtgaccaccggattatccgctttcagcgaaaaggtcagatcgttcaacggacggttgctgtaaacagcctgatattcccctgattttttgtctctcagacaaatatagatccgtcctgcattggtagtttccttcagcacatttaccgtattgcgcaggatctctcctacccggagtgtcctggatactgactggctgaaatctttcagctcctgagactgctggatctcttttttgataaaaacattgttcatcagacatttccacagcactgtgaccagccatgcagatatgagaaaaacgaaagaaaagatcagcacatgatactcactggctgcagggagcaacattcggatataactcatcaggtacggtgaaagattgataaacagtactaccgtcaggaccacgcccacaccaaagcaaaccccatctgacgcaagacggcgcatctggaacagccgtcttctggtcagtgcataaagcatcaggacagcattgatcagaccgctgacaatatcgatggggaatccggaaaatgccggcactgccagcgcaaggtttcccacaaaaatgatcagtatccccacaaggatcggttcgatctgtttgcggtatccgggatgtctccggcatccgcggtacatggtaataaagatctggataatggtgatccctgctaccacaaagaacagaaggaaccagggtgtgatcttataaacaaaatgcgcaccaccgtttttacggatcagatctggccagcgcaggatgatcccgcccgggatgttgatcacaaaaagcagcagcatcaaaagcaatgggatcttgctttttctgcccatacgcactcccatgaattcactgatgaacacatagtaaaaatatggcagaaacaggattcctgccagagacacataataccacaggatataagagggtcctgcttccatacgcatcagaaaagagcccagcgtccagcagagcattcctcccagcacacacatgaaactgttgatgatccggctgcgcttaccagccagaagagtcagtatcataaatgtatagaaaaaaactgaaatgattgaaaatgatatatagctttccatagttacttcctcatattcccgaatccgatctcatcctgcagtctcaaaagttccgccacctcataataaggagtgctcatatgccgtggtttccgtccttttctggactcatacagatgaaaggtaccacagcgcaggatggtcaccacaaggggatccattcccaggattttcttcagatcccggtaatcctgatcgatatatttgaaatacgtggtcagaagttctttcagaatatccgtgctcatagcctgatacatcagcgcttctttttttacttctatataaagatgcagatatgggcgttttttctcattatattctttcactgcgatccaatccgtaaccggctgcccggacagctggatcacacttttgataccattttccgaaatcctggtaaagcctgcgatatcaatgatccacggaacacggtctatgtactcaaatcttgggatctgtgtccggtcctcctggttggtaagacccacgcaccgatacatatctcccacacggtacctggcaaaggctccgcccttcagcacagtgatcacaagctcatatttctccccgggaacaacctcatccataagataggtcggaggagtgaacgtgggatcctcataattatggagcatatccttttcggtgataaattcataaaagcaggtatccgggaaaaagtacattccgttcctggtccaggtctcggttcctataatggaaggttccgttcctgcaaaaagctccatgggccgaactccccacatttcctccagatcatccttatagcactggttgtcggttcctgccaccataaatcccttcaggtgaaaaagatctttcggaagaagctcccgtttctccttcttacagatctttttggcattcaggatccttttcagcatctttggtttatactgcagaagttccgaaaaggagattttgctttttcctgatgatacgcttccggtgaggctctggcttactgcataggccacacttccaagtccgaagaaaaattccacgtcctgtttcatggccatcttgaagccctctttgttccgctcaccaaagctcatatttaccgcatcttccacttccggaagaaaacggatgtcgatgtcctctttcagcgccagtggaaaaaggccggtagcaaaaggcagcggtgccagtccgtaaaggatcttgtctgtttcctccacatcaaatttgcccttttcacggcttgtagccaatatgaggcaggcaactacattgttcctgtaggtatccagcatacttcttgtgtatggtgctacctttatcggatggcgtccgccttcccaggtcgtctgtatccagatgatcggattccccggaagagtttcgcttctcttctggaggagcatatccgcataatcctcataagtggtaagaggtaccagccgacggaactcgtcgatcccggatggtctcctgcccttcagaatgcttttgcccagttcacagtctgaccagagctggatctgctcttccatcaggcgattctggatcttcatgtaatcctgcattgtcagatcaagaaatccgcaatattctttccagatagcatcatactgctgttttcgaagcttttcgccaagactcaccgccttttccccccttttcgccatgtttttatgcaggcagctgtactgtttcggtctgggatcagaaagggagttgtctgctgatacgctccgtaattactgaatgtttccggaaacacgatcctgtcctggtaaaaaatgtacaatatattccacacgataaggaccccaaaagcccccattgccttcccggatcccagaaatccggccaggcaaaaataaaatccggcgaaccacagaacgccaggatgtcggcagagtgcataaacaccccctgtataggccagcctttcatgattttctttgacatatgtctcatcaaagggcagcgcaaaaaacaatgtatagatcaacagtcccagaaacaggatcgctgctgtcagaaaaacagcagaaataaaaaacgaacttccccgccgcggccagcagctccggatcaccagacctgttgacactgcgatcaggaaacatcctatgctaaaaaacggatgaagaaagctttttttcaatcggatactgttatgatcatacaggaagcagcataaaaagccgatactccctataataaccgcagtcatctgtattttcccccttcatttatgtaaagcggaccttctcattccgctctgctgcattctcaggaacgagacccattcatggtcagtaccctaaagaatgctctatattactagaaaacaactacttgttcattatatagcacatagctgactttcgcaatcgtttttgactaatatatgctgaatattggcacaaattttatcaattatgacagtttatttgttttttctgccggaatcagaggtaacggatctctacgtgcatttcgccctttccatctgtctccattactgcatagcttggacggcgtccccgttgtctgggataagccagacttccgggatttaccagaagcacacctgcttccttttcaacaaccggtacgtggatatgtccgaaaaaagccgcattgcatccccttgagcgggcagcttctgccagctgatcaaaggccatggatacaccgtagtaatgaccgtgagttaccaggatcttatttccctcgacctcgatcacatcttctctcggaagatccgagaaaaaatcattatttccggacacaatactgcagggacattctgcaagggcttcgatataaaattctctgccttccacatctccacaatgtaccagcatgtcaaaaggagcctcccgatttatcgcgatctccaggttttcatctcttccgtgagtatcgcttacgatcagcaccttcatacaagctcttcctttataaggcaaagagcttttccacgatggctgatcctgttcttttcttccatggaaagctctgcggaagtacagccatattccggaagataaaagatcgggtcatagccaaagccattctcccctttttcctcgtagccgatgcggccttccatggcagcacggactgtctttcttctgccatccgggaaaactgccgcaatagcacatacaaaacgtgcagtacgtttctcatcgggtacaccttccagacgctggatcaggtttgcgtttttaatatggtaagaagtatcctcacccatatagcgtgcggaatagattcccggctctttgttcagatagtcgatctccagaccggaatcatctgccagaacgatctcgccggtcattttactgattgcttctgccttgatcatggcattttcttcaaagctttttccattttcatcaatatccgcatggatcccggcatccttcagggaaaggatctccagagaaggatccgcaagtatccttcggatctccttcattttatcctcatttccggtagcaaaaatgatctttttcattctttaatacttcctttcttcggcggacgtggtccaagaaactggtaatagtaggttttcatcattccgttatagatcttacggtttttatctgcctttcggccgatatcattctctgccttgtcataggcagtgatcagatacatggaccagcgatccagccccttatagctttcaccgatctcacggtacagtgcagggagattggatttttcttcgatccgctcaccatatggcggatttgtcacgataaaaccaaagggtttggaatggcggagttcactgaccgggcgctgctggaaatggatcagtctgtccactccggccatttttgcgttggcgcgtgctgccttgatggcagctgcatcgatatcaaagccctggatatcggtttcaatatcaagatttacacgttctctggcttcttctcttgcatcctcccagcattccttcgggatcagatgctcccagctctcggccagaaaatgacggttcagtcccggtgccatatccgctgccatcattgccgcctcaataggaaaggtaccgcttccacagaacggatcgacaagaatacggtcctttttccagggggtgagcatcaaaagagcgctggcaagagtctcagtgataggtgccttgacagtcatctggcgataccctctcttatgaagggatactcctgaagtgtcaattccgatcagagctacgtctttcataaaggccacacggataggaaattccggaccgtcttccggaaaccaggaaatcccgtagatgcctttgagacgctctacaatggcttttttcataatggactggatatcagatggactgaaaagcttacttttgatggagtttgccttggctacccagaatttaccgtttttcggtatgtaattctcccatgggagagccttggtcttttcaaaaagctcatcaaaagtctcggcttttacttcgcctactttcagaagcacacgttctgtggtacgaaggaacagattggcgtctgccacaccctgggcatcagcctcaaaggtcactcttccgtcttccaccctggtcacttcatagccaagatccagtatttcacgcttcagcaccgcctctgttccaaaatgacagggcgctgttaattcccacagattcataaagtgatctcccgtactgtatttccttcaaaatctttaatagtaaaacttccgttctcaaggattgcataggtcggcggattgccttcctttggaatggatacggaacctgggttcagaaggatataattccccatattttctgccttcagcacatgtgtatggccgtggatcagaatgtctccgtccatcattggcggaagattatccttattatagatgtgaccgtgtgtggcatacatcgtttttccctcgatggaaaggatacagtaatctgccataaccgggaagtccaggaccatctgatccacctctgcctcacagtttccgcgtactgcgtagatctgtttttttctctcatttaaaaggcggatgacttcctttggtgcgtattccttcggaaggtcatttcttggtccgtgataaagcagatctcccagaagcaccagtctctccgccttctccgcgtcatatgcttccagcattttccggcagtaatatgccgaaccatgtacatcggatgcaaacatatatttcataatcttttctccttgtaatttgtgttggtttttatctctgttctttacattatcatgatttactttaaaatacaagatttgttgttttatccgcgcacaagatttctccctctgtaggcggcaaatccaccgatcacggatctggtacggcagccctgtcttgccaagcttcgggcagcctgcatgctggcaccaccgcgatcgcagtaaagtatcagcagtttatctttgggaaaacggtatttctgatcctgttttttttcaagatattcctccagctctctgtatggaatatttgccgcgttccggacatgtccccttctgtatgcggcaggatcccggagatctatgataacagcgtcactgcgctccacataataatccagcatttttgcagagatagtttcaatctgaaacatggaaaaaatctcctctttttggtatattatatggaagcttccgggtgaatgttcccttatatgtatttaagcgggaaaagccatctctgacttttcccgcttttcttatcatttaatatctgtcagagcctctgtccttctcagaatcatattcatcggaaattttgtttccgtagctgcttttggaactgtttctggaagaatttcccgcactgttcttagagctgtttttcccgcagtttctggaagcactttccccgtgattttttcctgcataattagactcatttctgtctgtttcgtaatttttcgccatttgaattacctcctgatgaagttgattttacggctttccgaagctttctgccgctttttattacaggaaatagtatcccaaaaagtttggagattattcgccaaaatcatattgcttttttttccagtttatattataatcattcttgtaaaaagaatttacccttcaaaaattttttttacataaccccttatttaattatttatactcccctcgaaacacccggtagctcccctaccgggtgtttctctatacaaaaaaccaagccaccggatgacgatcacagttgctccggcagcttgtttttttatccgttgattggatttacatgcaccatacagtgctttacatctttgaatttattctcgatcgtatgatgtacattttccgcaatatcatgtgcatcaaaaagggaaatatttccatctgctgcgatctcaatatccacatacatcttggatccgaaaagacgggttttaagaaggtctactcttctgacgcccggtaccttgagtatctctctcttcatggattcctccgtttttgcatcacaggaatgatctaccatcttgtcaatggcatccctgaaaatgtcgatcgatgccttggcgatcataacacagatcacgatactggcgatcgggtccaggatcgggtatcccagtcttgctcctaaaataccgacaaaagctccgatagaggaaagtgcatctgaacgatggtgccatgcatctgccatcagggctcctgaattgatcttctttgcagcacctcttgtataccagaacatccactcttttaccacaatggataccactgctgcaatcagtgcaagtgttcccggaatggcaatggttccgccggatgtgctttttacgatatcacgggcaccggtaattccgatcccaagaccagtgacaagcagcattcctgcaaggacaatggaagagacacactccattctttcatgtccgtactggtgctctttgtctgatttctttgtagaaagacggacaccgatgattacgatgaaggtgcttcccacatctgatgcagaatgaatggcatcagagatcatcgctcctgaatgtgccacaatacctgcgatcagtttaaatactgataataaaaggtttaccagaatactgatcccggataccttcattgctgtctgctgttcccatgaagctgttttttctgtatcatgtataattgttttgttttctgtgtgttccataaacaggacctccttttaaatatatgatcaggttcttcttatggcacaacattttccgtgaaaaaaccgacggttccttcactactcgctgcagtgcgattttccgccggtgttctttcttttctgtataaggatatcccagcttctaccttctgttccatccatattttgcagtaaaaaagacatacctgcgaaacatacactgtcccgcagatatgtctgaaagcaaagccacattctgcttcacctcatattccgtgaatgcaggttctttgcaattacgtttaaatccatatccgctgccgcttcctgcggcccggccccatgccttcggataaatattttcgattccgaaaagcatcgcctgctcagtttgtactgttgatctcgcatcctgttcgaatgtaatgcagtgcaaagagaatttttgcagtcttacgggtctcccgctcaacttctcagaaaggatacaccatatgccctttgttagtcaagccaaagttttttattttacaggtagatatcttcaactttttgtttattccatgtctggaaacatgcttcgcactgcacagttctatatcaaataatagatcctcagttgtttgtcaaaaaaccgggagcggataaatcctctcccggttaaatctacgatctgtattcagttggaatgactgattatgcctgcgggccagctgcaacgagtgctttaccagctgcatttccttcatatttagcaaagttcttaacgaatcttgcagcaagatctttagcctttgtctcccactctgcagcatctgcatatgtgtcacgtgggtcaaggattgcaggatctacgcccggaagctctgtcggaacctcgaagttgaagaatgggatcttctttgtcggagctttaaggatagatccgtcaaggatagcatcgatgataccacgagtatctttgatggagatacgttttccagttccattccatcctgtgttaacgaggtatgctttcgcaccactcttctccattctcttaacgagctcctcagcatattttgtcggatgaagctcaaggaatgcctgtccgaagcatgcggagaatgtaggagtaggctctgtgattccacgctctgtaccagcaagtttagctgtgaatccggaaaggaagtagtactgtgtctgctccggtgtcaggatagatactggaggaagtacgccgaatgcatctgcggacaggaagataacctctttcgctgccggtgcagaagatacagggcgaacaatgttctcgatgtggttgatcgggtaagaaacacgtgtgttctctgttacgctcttgtcagcgaagtcgatcttgccctcagcatcaagtgttacgttctcaagaagagcgtttctcttgatcgcattgtagatgtccggctcagactctttgtcaaggttgataaccttagcgtagcatccaccctcgaagttgaatactccgttgtcatcccagccatgctcgtcatcaccgatcagaagacgcttaggatctgtggaaagtgttgtcttacctgttccggaaagaccgaagaagattgctgtgttctctccgttaaggtctgtgtttgcagagcagtgcatggaagcgatgcccttaagcggcagatagtagttcatcatggagaacatacctttcttcatctctccgccgtaccatgtattaacgataacctgctcacggcttgtaatgttgaacattacagctgtctcagagttaagtcctaattctttgtagttctcaactttagccttggatgcgttgtaaacaacgaaatccggctcaaagttctcaagctcctcagctgtcggctgaatgaacatgtttgttacgaagtgtgcctgccatgcaacctcaacgatgaaacggatagccatacgtgtgtctttgttagctccgcagaatgcatctactacgaaaagtttcttgttggaaagctccttcttggcaagatctttaactgcattccatgcttcctgagttgccggatggttatcgttcttgtactcatcggatgtccaccaaactgtgtccttggagttctcatccataacgatatatttgtctttaggggaacgtcctgtgtagatacctgtcattacattgacagcaccaagctcactgacctgacccttctcaaatccttcaagctccggtttggtctcttcctcaaataatgtctcgtaggaaggattgtacacgatctcagttgttccggtaataccatactttgttaaatcgatttttgccatcttaacatttacctctcttctttaatagtaattatgatagccacctactgctgcaggtttttgtcatcctgccataggaattggtcattccaacatccctatccacaattatacataaattgtacgtaaaagcaaccaaaaaaattcattttccgcaaaaaaatgataaatctttaacagtgacgttttggtactgtcagattttactccatctatacttgactttttcagaataatggctacaatatatctgattatagttattatatatatttataatgataactatactattttaatatatagaaagaagtgatttctgtgtcagatattccggttaaacgtaatcatatgaaaatcccctggcacaactacgtaagcgccaggaacagccagcccatcaccgaggcttctctttccgaaaaagcttccctgatcggccgcacaggcatgatgcttctctcctgtgggactggtgcctggcgggtacggagttccatgaatacattgtcagaagcacttggcatcacctgttccgcagatatcggactgatgtccataagctacacctgctttgacggtgagagcagtttttcccatgcacttagtctgactaccaccggcgtaaatacttccagactgaacaggctggaacattttgtcagtgattttcctgtggagggtatccatatgagtggtgaagcactgcacagtcagttagatgagatcgagcggatccacgggctttattcccctgcagccctgggactggcttctgcactggcctgtggtgcatttacttttcttctgggcggtggcccgctggaaatgatcctggcttttgcaggcgcaggcatcggaaacgccatccgctgcaagcttggcaagcatcattttactctgtttatgtgcattgcagtttctgtttcctcagcctgtcttgtatatgcaggcttcctgaagctggcagagcttctgttccacatttccgtccagcatgaggccgggtacatctgttccatgctgtttatcattccgggctttccgtttatcacaagcgggatcgaccttgccaagctggatatgcgttccggtctggaacgactggcctacgccattattgttgtaatggtggctgctgtctctgcctggctgatggcactgcttcttcatctgaagcctgtggatttcctgcctctggagctttcggcagctcagaggatcctgttccggcttctggcaagcttctgcggggtattcggcttttcagtcatgttcaacagtcctgtgcggctagccgcagctgccgccttcatcggcgcactgtccaacactttacgtctggagcttgttgatcttgccggtttcccacctgctgccgcggcttttttcggagcactgacagccggacttctggcctccctcatcaaaacaaaagtgggatatcccaggatttccattaccgtaccatccattgtgatcatggttcccggactttatctctaccgggcaatctacaatctgggaatcatgtccctgaatgtttccgcctcctggtttgcagctgcgattctgatcatcgttgctcttccccttggccttattttcgccaggatccttacggacaaaatgttccgctactgcacctgatgggcatacaaaaaggactgctttctgtagcttccggtcatcaactatccttctgataaccggagcaatacaaaagcagtccttttttgtacactctatttcattacgatctcatcagcgatcccgatcattttttccaggcggtccgcaaatttatggatgggtagaaaaacgcccagtccgtcataacgtttgccaccatcctccacagaatcctgcccataatacacaaaagctcttggaagcttcttctgaattgccatcatgatatcccatacagccgcataggcctgtgcctccgtttctttttcccttacgctgtccggaagctcatacaccagcagcacaccgatatgttcgcccattttgtactcttctacttccatggtagcttcatcataggcatgtcgcttccggtagccatacgccagatacatctttacaccaggtttctccctgtatatcctgcgaaatcggtcgtaatccctgtcacttacatggattcccttttcccgcagaaaatttcctttttcatctgtgagaaataccggattctcctgtccatctgcattgaacctgaacggtgccagaaaagaatttcgcagaagatcaaacatactgttctggcagatcgccataaggagagctgtcagatcacggtttttatatgcgtccagcaatgcataggcgaatttttccggaggaagatatccgcattctatgtctgtatccgcatccatggattcatagaaggtctccgtcagccgtctgcacgcctccgaatccttcaggatcttttcaaataaaagctccgccttttcctctcttgggaataatgtgctgttttccacaattcctcaccctttctaatctctatgtttactggaaaacatcagaataaagctgatcagaagcaaaacatccgatacccagattgccgggatccccagcctcatggacagatttcctccgccaccggctccaatggcaaaaaagaaaattattccgaaataataaagagcctgcttcaactgttccggacgtttttcacgacaatacacggacaacgccgccgtgccgcttcgtaaatttccgatgcacatggtgcttgcataggaataaccgcccaccttccggaaggtctgtacctgcatggcgcaggaaaaggataccagtacggttgctagcatatccaattctcccggcataaatcccaccgcaaaaaggatcaggatctcgatcagcaggatcatctgcctccagtgaagtttttttgcatatttaaaggtactctggatccgctccgccgctacaacaccaatggcaaaggctaaaacagggaacaggtaccttaagccctctccccactgtcctgtcataaaattttggctcatcagaaccacgttgcctgtctgggcgttggaaaacacctcatctcttgtaaagtatgtgtaggcatcctgaaatccgccggacattgccagaaatacacttgtgataaaagcttctgacatctgccggtctgcgctctgcagctttccgcctcctgaaaccactctaaatcactcctgtcattgatttttttcctcgggtgtattatagtttgctcagaagcaaatgtaaaaagtattattaatatcgtaaacatattaaaatcatatcacaggatggagacaatacatgatcacttacgactactaccggatcttttattatgtagcccagtataagagctttaccaaggcagcaagagctcttcacaacaatcagccaaatatcacccgctgtatgaacaacctggagcaggagctgaaatgtacgctctttctccgctccaacaagggaatcgcacttacaccggaaggccgccaactttatgaacacgttgccctagcttttgagcagctgtccatcggcgaggaggagatccgccagaacggagagctggagcatggtctagtttccatcggcgccagcgaaaatgccctgcgtctgatccttctggaaaagctggagctgttccgcgagcaatatccccatgttcgcctgcgcctctttaaccattctactcctcaggcagtacaggcactgaaaaattatgcggtggatttcgctattgtcaccactccgatctccatccgcaagcctttacagaaaaaaagtctcctgcgttaccgggagatccttgtatgcggaagcaaatataaggatctgaccactgcccctatcagcatccatgagcttcaggatctgccctttgtaggtcttgcggaagggaccagcaccagagaaatgtatatgaattactttatggaaaaccgtgtttcttttcatcctgacatcgaggcagcaactacagaccaggtccttcccatgatcgtccacaatctgggaatcggcttttaccccgagccccttgcccgggaagtgatcaatgacgggaagatttttgcccttcagcttaaggagccgctccctcagagggaggtctgcttagtcacaaacagcagtactgccatgagtactgctgtcaaaaaagctattgaatttattgtgtaaatccctgaggcggatcagccatttatatttattgctccactgtccgctcaatatgcatggcaagataaccgatctcgatagggtccagctttttcccaaggcttttgcccagactctcgcagacatcctctgcgattctgtaggattccggatatttttcttctatatattcattcatatccagcttcagtgtctcccctgtggagacacgggctaccatatatttgatatggttcatcatacggttgtaggacagggagatcacatcgatctttcttcctgtggccatctcgatcatggcgatgcattcccgcaccgttcttgctgtctgcatggcaacagacaccttctcatctccaagtgctgagtgaatatgaagtgccacatatcccacctcatgctcatcgatctcaatatccatccgctccttcaggatcttcttcagtacctctgccaccttgaattcgctgtaaaaaagcaccttgatatcatcggtcagaggattgctgatctgctcatgattccggatacgtcccactgcaaaggaaatatgatcagcaagggaaaacaggatctttctgtctatggtatccccaaaggtcttctcagcttctctcaatatctcatctgcgatctccagaaattccggtgctacgctctttgccagttcttttgctgagccacgttctgtctcctgagccagcctgtaaagggtacagtctgccggagcctcaaaacgctggctgaccttctttccaaatcccacaccttttcccagaagcacatattcctggttttcttccatatctatggcaatgatgccgttattgttcaataccttgctcactctgtacatctttttccccaccatttttatatatcctgctgcttttccacattccaccactgtctgccccggattttcagtcggcatttttgtctgcagctgttgattttctttatcgtaacagaatctttcttttgtgtaaagcccttctgacagacagttgttttctttgccacaggaaaagcgcgcccgggcattaggcgcgcttttcacaaaaccaatcatctatattattgctgaaaaatttcttattcttccacagtctctactgcgaacagcggctctcctgccttgatctctccattggcaagaaggcgtactctctgattatcctcgatctctgtgcaaaggatcggagaacataaggacggagcgttttctgtaagatatgggatgtcaatcttcatcaacggctcgcctttttttacatgctgtccctgctctaccaggatctcgaaacctttaccttccagctttacagtgtcaatgccgatatggaggagcattggaagatctgtatctgtctggaatccgatagcatgctttgtgtcaaaaataaactctacctcgccgtcttccggagcacagatcaccggatccttcggtgtgactaccgcaccctctcccatcattccttctgcgaagccttcatccggcgctgtggaaaggtctgctgcgataccggttaccgggctgtagacgatagctgttctgaggacctttttctccggctgcgtgttggcttcggatgttggagctgtgttctgaacagcctcacctgtactttctgctatgcgctctgtatcaaactgagcctgattttccgtattgtctgtttctgtctcatttgcaccttcaaaatattcatttggcgctgtctccagataatcctccagcttggatttgatcacagttacctgcggaccgtagatgatctggacaccctggccttttttcacgattcctctggaacctgttgttttcagaatatcgtcgttgactcttgctgcatcatggacggtgatacggagtcttgttgcacagcagtccacatcactgatgtttttctttcctccaaggccggctgtgatggctccgcttaccgggtctgcggatgtgcttcctgctgcttcaccggcttttccggcttcttttcttgcgtttacatctgcttttgtataaagctttgtttctgtgtcgtcatcctcacgtcccggagtcttgaagttgaactttttgatcaggaaggtgaagatcacatagtagagaataaagtaaatgataccaaccgggataatcctaagccagcttgtctttgcatttccctgaaggattccgaacaggaacagatcaaggaaaccgccggagaaggtaagtcctactgcaatgttcagcatatgtgcgatcatataagccgcacctgcaagaacaacctgtactgcaaacagtgcaggggctacaaacaggaaggagaactccagtggctctgtgattcctgtaagcatacatgcaagagctgcggaaagaagaagtccacctgctgcttttttcttctcaggctttgcacagcggtacatggcaagagctgctcccggaagaccgaagatcatgaaaataaactctccggaaaaatatcttgttgcatcagcactgaaatgcgctacatttgcggaatctgcaagctgggcgaaaaagatgttctgtccgccctgtaccatctggcctgcaacctccatagtcccgccaacggctgtctgccagaatggcatataaaatacgtgatgaagtccgaatgggatcagcgcacgtttgataataccaaagatcagagttccgacataaccgctgcctgttacaagaccgcccagagcataaataccgttctgaactgccggccatacaaaatacatcaggattccaacaaacatatacacaatggtggaaatgatgggcacaaatctggaaccaccgaagaaggaaagtgcatttagaagcacgatcttatgaaaacggttgtgcagagccgcaacaccaaggccgacgataataccgccaaacacacccatctgtaaggactgaatgccgcagacagatgttacagtaccttccagaacgctttttgcgatctgtccgtctgctgtgattttaccatttactaccagcataccattgatggctacattcataacgaagtaagcaatcagtgcagaaagagctgctacctctttctctttttttgccataccgatggccacacctactgcaaagatcagcggcaggttatcaaataccgcgcttccgactttgttcataatgatcaggagtgcatgtaaaatcgttccgtctcccaaaagcttctgaagtccgtaggttgcaatagttgtttcatttgtgaaggaactgccgaatccaagaagcaggcctgccacaggaaggattgctatgggaagcataaaggaacgtcccactcgctgcaaaactccgaaaatcttgtctttcatgttctctctccttttctttcgacgttttggagcgggagtcttttaagtgggcaacaaaaaaagacaccaacccccataaacgtcaaataaaaataataacatttatgactggttaatgcctgcttatcagttacacaccaaatctgaaatacactatacgggttttgttcttctgtgtcaaggagtaatttgattttttccaaaaaagatatctcctcatatcactatccgctccgttgccaacaatccctcgcggaatatttcctgtgaacagcagccatatagtttctattctcagaaagtatgcagaaacaaaacagacctgaaattcacttatcttgactttattcttacttatgataagatgaacatagaatgtccggcagcaatgtttttttgctcagacaacactatacatttcataaaaacggaggtactttttccgatgaataccatcaagaaattcatccactactacggcccgtacaaagcggtcttttttattgacctgatctgtgcagccgttatcagtctggtagatcttgcctatccccagattcttcgtactatgacaaaaactctctttacacaggataaggatattattcttcatgccctccctgtgatcgcagcttctctttttgttatgtacatcgtgcagagtctctgcaaatattatgtaacctatcagggacatatgatgggtgcaaagatggaacgtgatatgcgccgggagctttttgaccattaccaggagctgtctttttcctattacagcaggaataattccggtcagatgatgagtaagctggtcagtgacctttttgacatttccgagtttgcacatcatggtccagagaatctttttatctccctggtaaagatcgtcggtgcttttatcttcctgttctttatcaacaaaaaacttgcactgccgctgatcctcctggtgatcgtaatgtttgtgttttccttccgccagaatgcaaaaatgcaggaaaccttcatggaaaaccgtcgtaagatcggagatgtaaatgccagtcttcaggatacgctttccggaatccgcgtggtacagtccttcgcaaacgaggacatcgagcgtgccaaatttaagaaaagcaatgaggcgttccttgtttccaaaagagataattatcactgcatgggaagcttcatgagttccaatcttttcttccagggcatgatgtacctggtaactcttgtttacggcggctatctgatcgctcagggtgaaatgcagactgcagatcttgccatgtatgccctgtatatcggaatctttatcagccccatccagatcctggtggaacttgtggaaatgatgcagaagggtctttccggtttccgccgtttcctggatgtgatggaaacagaatccgagatcagggatgcagacaacgctgcagagcttacggacgtgaaaggacatgtgcgttacgaccatgtttcttttcattacagcgatgatgaaactcctgtgctttccgatatctctattgatatcccggcgggaaaatccattgccctggtgggaccttccggaagcggaaaaaccacgatctgctctctcctgcccagattttatgatgtgaccggcggttccattactgtagacggaaaggatatccgcgggctgactcttaagagccttcgaagccagatcggtatggtacagcaggatgtctatctttttgatggaaccatcaaggataatattgcctacggaaagcccggagcttccgatgaagagatcatcaaagccgccaaatgtgcgagtatccatgactttatcatggagcttccggataaatacgacacttatgtcggagaacgtggcacacgcctttccggcggacagaagcagcggatctccattgcacgtgtattccttaagaatcctccgatcctgatcctggatgaggccaccagcgctctggataacgaaagcgaacgttggatccagaagagtctagaggagctttcaaaaaatcgtactaccattacgatcgcgcaccggctttctacgatccgtgatgcggatgagatcattgtgatcacagaggatggtatcgctgaacgcggtacacatgctgagctgcttgagaagaatggattgtatgctgcgtattacaatatgtaaatatacgagggagggtcatctcagagttgcgaagcccgaagaccctccctcgagctcccaccctcttgggcacgccagattcatcaagacagaatgggttgaatgatgactgtgacgtacggacgtgggaggcgcttcgctgtcccactggatgtagcaatatataaaaactgccgcaaacgctgtgtctggattatggcacagagtctgcgacagtttttttaatgaactttgtgaatattccttctgtattacaattacagcagataaaccggaagctcatccttgattcctaccggctggttgttgtccggctcgtctttctttggggtgaggaacttggcctgaagttcatcagcgtttcctccactgatcacattctgagctacggttcctgttgtggtttctgcggcggctgttttcttagctgcagtttttcgtgttgttgtctttctggtggtggttttctttgctgttgtttttgttgtagctgctttccttgctgtggtcttctttgccggagctttcgctgtggttttcttttcggctggtttctctcctgtttctgtctttacttctgtcggcttttctgcaacttttacctctgtaactttctcttctgtctttgctgttttctctgcatttactgctcttgcgatgcttgctttacctactgacacgatccattacctcctctgccaatgctatgtattcttttgcgctgcggctgctttttttgaattccacaaccggctcgctgctgtcctgtgaccattcgatggagctgtccacacggataaaggattcgaaaagatagattccttccatctctttgagagtctccatggtctgtttgaaataattctttctggcatctgccttggtcaccacgattcccagaacctgaagcgccggagcgatctcacggacctcattcaggaaatcaaacatatttgcaagaccaaacatgccccacgggctggcctccaccggaaccagaacgtaatccgatgcgcacaggatattcatcacccagccgccaagagtcggcggtgcatcgatgagaatgtaatcatacaccccggaatccttaatcttctgcagacatttccgcaggataaattctctctgccatttcgtaaaaagctcatattccacggagctcatcagcgtagacgaaggaaccagatccagattctcatacttcgtatgcacgataaaatcgctgagatccgactgatgaccaatggcatagtagagatttttttccccggcagccattttcagaacttcttcttcatcaaaaaacgaaagggaaagattcagctgcatatcgccgtccacaagaagaaccttcttccccataccggccagtgccgcacctacattggaacagctggtggactttccgctgccgcccttattattcgcaaaacaaatcgtcactgtatttcccatcacagcctcccgacaacacaaaatcgtaaatcactaactttcccttattataatataacgctcccccaaaaacaagcatatcccccataaaaccacaaaatctggcaaaaaactctcacataaaacaacagcaaaaaaagaatcttgttgcagaataatttcctatacaaaaagcagcaggcttcaaatctttccgaaagcctgctgctaaacttcattcatttttattattttacgataaaggattttctcttacttacaacatcgaagataacggctgcaagaagaaccatacctttgacaaccttctggatattctggtcaatacccatgatactcataccaaggttcagaacacccataaggagggcaccaatgataacaccgggaactgtaccggtaccaccataagcagaagcaccaccgatgaaacatgcaccgatcgcatccatctcgaagtttgtacctgcctgtgggttggatgagttcagtctggccattgtcaccatacctgcaatagctgccagaaggcccatattcaggtaagcaaggaaataaaccttgtttgtgtcaataccggaaagctttgttgccttctcattaccgccaactgcataaaaataacgacctgttgtagtcttggaagcaatgtatgtatagattgcgatgatcactacaacccagagaagggaattcgggatacctttgtactgagcaagtctgaacatgaatgcaagaacaactgcacagatcagaaccatcttcactgcaacaccaccgaaagactcaacactgtagcctttttttgcacggtctgcacggtttttcataacaagtgcaacatagaggatgcagacaataatgccaactacaaaacatgttctgttaaatccttcacctccaccaaggaagtccggaatatagttattgaacagagccagataagcatccggcatcggggccagggtctgtccttccagaactacgttggaaaggccacgaaaagcaagcatacctgccagagtaacaataaatggaggaattcgtacataagcgatccagaatccctgccatgcaccaatggcaatacccacaagaagcatcacgatcatagtgagatacgggttcatactgttgagaaccatcatcttaccaccgacagcagcaacaaagcatacaacagaaccaactgacagatcgatgttaccacctgttaaaatacagaacaacataccggttgcaagaataaatacatatgcattctgggctaccaggttatttacattctgcggaagaagcataactccctttgtgttcacagaaaacatgatcacaacaaataccagaacaatgaccatggtatatttttttaatatttctgaaaaactaatctttttctccatcttcttactctcctttacctgacttcacgatcctggacatgatcagctcagatgtagcttcctcaccacttacctcacctacgaatctgccctcgttcatgatatagattctgtctgacattccaagcacttccggaagctcagaagagatcatgatcacagattttcctgctgcgaccaggtcattgatgatacagtagatttcatatttggcacctacgtcaatacctcttgtaggttcatccaaaatcagaatatccggctctgcaaacatccattttgcaagaaggaccttctgctgattaccaccgctcaggtttccgacattctgctcaactgtcggacacttggttttcagtttcttcctgtattcctcagcaactgcgtattctttatccgtatcgatcacttttccattactgataccggacatgtttgcaagcgtagtgttcatctttatggacttggaaaggatcaatccgtttccttttcgatcctctgtaacataggcgagcttgttgtcaatagcctcctgaactgtattcagcttcacttcttttccattcatgaacacctggccggaaatcttagttccatagctcttgccaaaaatactcatggccaattctgtacgtcctgctcccatcagtcctgaaataccgacaacctctcctttatgtactttaaaggatacgttatttaccaccttacgttctgtatacagaggatgataaacattccagttcttaacttccatggaaacatcgccgatctttacatttggacgtttcgggaaccggtctgtcatctcacgtccaaccattccctgaatgatcctctgctcagaaaaatcgtctttctttttatccagtgtttcaatggtagatccatctcggataactgtgatcttatctgccacataggaaatctcatttaatttatgggaaatgatgatagaggtcattccctgcttcttgaatttcagaagaagatccagaagagctttggagtcatcttcgttcagtgatgcggtaggctcatccagaatgagcagctttgcattctttgcaagtgcctttgcgatctcaaccagctgctgtttacctacaccgatatccttgatcaaagttctggaggattcctccagtcccactattttcaaatatttatctgcttccccataagtttcattccagttaatggaaaagctcctgcctctttcattgcccaggtacatgttttcaccgatagtcatatacgggatcagtgccagttcctggtgaatgatcacaattcctttatgttcactgtctttgatggtgttaaatttacagatctcaccatcgtaaataatatttccttcatacgagccgtacggatatataccacttaatacattcattaatgtagatttaccggcaccgttctcacctaccagtgcgtggatctcgccttcctcgacctggagattaacattatccagtgcctttacacctgggaaagttttggtgatatttttcatttccagaagtatcttagccaactcaatttccctccctttccactgttcatgcaggcggttatattccccgcctgcatgtgataaatttctttcttaaaaattatgattatttgatctgatcctctgtgtagtatccggaatcgatcaggatctctttgtagttatctgttgtaacaacaaccggatcgcaaaggtatgtcgggatgacacctgttccgttatcataggattttgtatcgttcacttccggctcctcacctttcatgatggagtcaaccatttttactactgcagatgcaagagctcttgtatctttaaatacggacattgcctgttttcctgctacaaggttcttaacgttcggtgtatcacagtcctgaccagtgatgatcggatattctcctgtgtaggaagctgccagtgcattctcaacaccaagggctgtggaatcgttggagcagagaactgcgtcaaggtttgttccgtcagagtagttacctgcgatgatggtatccattctgtcctgtgcttttgcactatcccagtttgcggtagcaacctgctcgaactctgtctgtccggattttactaccagcttaccgtcatcgatgtatttctggagaacatccattgcaccaccgaagaagaagttacagttattatcaccaggatctcctgtgaacagctcgatgttaaacggtccatcctgattatcaagatccagtgcgtctaccaggtactcgccctgtttctgtcctactttgtagttatcaaatgttgcataataggaaactgcatcagaattcataagaagacggtcataggagataaccggaattcctttttctttggcctgtttcagtggctcgccaaggctgcttccatcgatggatgccacaaccagaaggtcgcatccgtttgctacctggttctcaagctgggaaacctgtgtgcttacatcgttggatgcatactgaaggtctacttcatatcctgctgcctccagctctttcttcatgttctcgccatcctggttccatctctggagatccttggtcggcatggtaacaccgatcagtttcttgtctgctgcctgtgctgttgctgccggaactaccaccataccagctaccattgttgcgcaaagaagtgcagataccatttttcttttcattgtaaaatcctccgtttcattatttgtttttggaatcacgtttccttcgatgatgttactatagcacaggactgtctggacatagttggcaatgacagagacatttttttgcaaaagaaaaatgccctgcatcaggcaagacatttttgcaccaaaaatctgctattgatttttgtcataattgtgtattattgcacatatggctacactaccacattacttgcagaatttcaccaccacatatatgccggtatgcaatctgttctgcattactctgtatcataatctgtattgagatatacttcatcccttctgtggaaaccgccgtcaatgatcacctcatcaatattatcccttgtaacggcaaccggttccagcaccttcgccgggatatcatagcttccatcgttcatggtatctgtcacatctgacggaagctttccctcttctgccatcttcaccgcatattcagctgcctggcatgccagatcttcgatagatttaaatgctgtcatgtactgggttccttctacaatacgctgacatgcagccagatcaccatcctgacctaccacaatcacctgtccggcaagctggttttccgcaagaacctgtatcacctggctggcaatatcatcatttccacacatgattccctttacatcggggtactcttccagtgcctcctccacataatctgctgccagctccgcgacccagccctcacagttggcttcgtaaaccaccttcagatcactgtttttcagagtgtcttcaaatccctcttttaccatgtccacattgttatctgaagcagatccctggaccataaaaatctttccgccattagggatcgcttccatcattgactgtgccatgacctctccgactttccggttatcaaaggaaatatacatgtctgtatccgcatcatttaccatacggtcataggagatcaccctgatccctacattgtgggcacgctccacagcctcagataatgccttgcagtctctggcaatgatcacgatcacatccatatgcttcttgataaaatagtcgatctggctgatctgctcttttgtatctgctcccgcatcctgaacattcacttccgctcccaattcccttgcggttgccacgaatgcatccctgtcacgaatccacctctcaataacaaaggaatccactgtaagaccgatctgaattttcttttcaccactgtcttcctctgtatcgttttcctgtgcagctgtctgctttgttttttcggaagcacagccattcagcatcaatgtcaacagacacagcaagatcaacagcttcctgatcattttccccccgctcatattgtctacctcaacctctctctgaattcacttggtgtcacgccttcgtattttttgaatatcctgctgaaataattggggtcgctgtatccggattccgcacagatctccttgatggaaagccctgaatccttgagaagttctcttgcattgcgaagccgcacttctgtaagatactcgataaaatttcctccggtctcctgcttaaaaagcttgctgaaataataagggctgatatccacctcccgtgacacctcatccagtgaaatatcttttttgtaattgtcccgaatataggactttgctttttcgataatagaaaccgcttctttttcccttgcaatttccatgttactgcagatttctgatgttttgcccaggaaccattttttcattccttctatatctgtatattcctggatctcatgaatataatttctgcggcagctgatcgcatatttcacggtacctgcaaaaaaggcctttttttccactcccatcacaagctccaggatcttgatgcgcatgtcctccagatctactcccggctgcttctccatccacctgataaattcctcggcacagcttaaagctcctgccacatccttatccatcacccgcttttcatagcgacgttccagatctcttggatattcgccgtcatatttctgtgcagccggaacatcctcaatatgtatcacatggctggtgctttcccgaagtgcgatcatggcctccttgaaggattctttcatggtgcttcccatctccttcacccggccgataccacagcgaaatttactgtcgatcctgctttccagcttatgtaccatgtttctggttcttgttacaacctccacacgttcctcataggactccctggaattacggtgcggaacaagcagtacaatacggtttcccataatgggtcctaccagacattcaaaaaatccctgagcgatttcccggaatgtggaataaaatttgtttgccttcacactggcccccaccgcattggtaagaacgccattttctgtggaatccccgaattcagccacgatcatatatccatattcttcccggatatccagaagctccctgtaattatcctgatatgtctgaaaatcatcctgcagaagaatattattgatatatccgctctcgatcatgggtacaactgtctccagcttttcacggatacggagatcatcgcttcgcttctgtcttgtggaatctaccttttccatagctttggagcatatttccagaatcacctttttgtttaccggcttggtaagaaattccataactccaagatttaccgcttccttggcataattaaatttatcataggctgtaatgatcacaaagaccacagatctgttaaatttctgaatttcccggattgcctggatcccacttaagcccggcatctgaatgtccataaagcagatatccggcggatatttctccgcctcctccacaaccacacggcctgtcttggctgtatggatctcacattcatttccatagttggaacttataatatttttcagggattccagcatgatcccctcatcatcagcaatcaggattctgtacatttttttcgctcctctccagaggaatattgatcactacctctgttcccattccttcaccttcactgtatatttccattaatccgtcccgctcataatacagttccagacggctgatcacattattcattccgattcccgtggaatcaccctcgcctgaactgctgtggactttttttgacagtactctttgtatctgttctccggtcatgcccagtccgttatcccgaacactgatctcaatatggtcgttccatttctccacactgagatcaatatgtccctcccagtcgatattccggattccatgattgactgcgttttccacaaccggctgcaggatcatactgggaacacgtacattttccacatcacattccactttttttgaaaaatggatgtccccggcaaaccgtacattcagaatataaatgtaattgtccacagcctccagttcttcctccagtgtggcatcttcctcacccttctttacattgtagcgaaaaaaatctgccatcttttccacaaagatactggttttttctgcatcctccatcattgcaagctgtactcctgcattcagggaattaaaaaggaaatgcgggttgatctgagactggagatacttaagctgtgcctccttgagatgtgtttccatcaaaagctccctctctatcatctgctgttctttttccatgctggcctttgtcctggcaatgtaaagaccaagattatccaccatggtattaaaggctcttgttaccgttccaagctcatccctggaatctgctgggggcatctttacattaaaattcccctgacctaccagctgtgcagtttctgccatattagtcagcggcaggaacatctcccttgttgccatgatcagaaggaacattccacagatcaccaccagaagcatgatcatcatattactgatctccagatatctcataaccgcccggagagctgcataagtctgggaattttctttaaaaagctgcttgttcagctcatccatagaactctggatataactgtaaagctccagactttcatcatattcctgcttatatttctccacattcctgcctctcttggcagctacagttcctgcggtacagtaaagatatgattccgacatcttacgtatcttcttctccagaagttttacggaatcatcaatattccgttcatttaacttctccagctcctgcctgtatttcgcctcattctgataataatccatcagtgcctgagagttttttaccttcagatactggtacatactgtcctgcacatcgtcaaaaacctgcccaagctctgtgatctgggcattgctggcatacacatcatccatctcctgcatggagttgttgatccgcgcataaaacagcatgttgatgctgaacagtaaaactgccagcacgccaacctcgatcatgatcttgcttacaagagaaaagtcactccaacggatctttttcatctgtgactgcctccctcctcatcttcttcactgctgttctgtcaagaaaattaatgtctacgttgtagaaagaattggttcttccatcttctatatagctggtgactgcctccacactgtactgtcccagctgggtcgtgtccacatcacaggtaactgaaataacacctttttcaactgccgccagaatatcctcagatgtataataaccaatgatcttcacttttcctgcaaggttgaaatccagaattgcctgtcttgcacactccgttgtctcctcatccatacacacaaggatatccggaacattccgcttctgctgaaaaatatcagtaactgcctcctctgtttcaaaggttcctgttgacagaagattccttcccttgatctcaatatcctcagaaccagctgccatcttcaccgcattgctgatctgagtgtatatctgactttcgttcatatcatcaatgtcccgtttctgcaggatcaggatcttcttcgtgttctcatccacgtatttggcaacaatttccccgtaagccatgccaagctgataatcgctgactcccacgaagctctggcggcggctgtgcaccgcatcactcatgactgtaaccaccggtattccgtttcttactgcagtattgattgcttcttccagaccggcttctccattatactgcaggataataccatccgccttggccgcaatgctcatattcatataatcaagtttattataggatgtttctctatcgggccccatgatctcaagcagtacattattggaatccgcttttttcttcgcactgtcatatactgcctgccagaactgggaatcagggctatccacgatcatgtcgtactggtatttatatattttctcttcctgttcatccaaccctgctttttcactgattcctctgtaataggattctcctgtcatataagtaagtactatcacggcaacaaaaaccagcaggatgcaaactgatttctttttcataatacactccattctgtttcacaaaacattccgggtttcagtttatcataatttcacagaaaagtcactgtttaacatggtttttctgtgcactttcatgttatattagtaaccataacattgaaaaaggaggccgcaaaacatgacaaatgcaaccaagcttgccctggaagaatccctgaagcatctgcttcttaagaagcctttagataagatcaccatcaatgacctgactacggactgcggcatcagccgcatgactttttactatcatttcaaagatatctatgatcttgtggaatggtgctgtctggaagatgccagaattgcccttcagggcaaaaaaacctcttccacatggcatgaggggcttctgcagatctttgatgccgtgatggaaaacaagccgtttatcttaaatgtataccgctgcgtggggcgggaacagatcgagaattatctgttccagcttacctgcgatcttcttatgggcgtggtaacagaaaaatcaaaagatatccccatcacagatgaacagaaaatttttatcgcagatctgtataaatacagctttgtagggatcatgctggactggatcaaaaacggcatgcgcgaagattatcgcgaaatcgcagatgataccgcaaccgcactgtacggaagcatcgacaacgccatccgcaattttgccgccagaaacaaaacagcagaaatgcatacagaataaaaacttatcaaaacagacataatgataaaaaactgaacactttcggtattttgtaaatagaatcttttttccggatgggctatcatagcctcaacagcaacaaagaacagttaatccgatacaaacaggtatctcatttacgaaaggtggatgtcatatgtcagataaaaaaggattcatgggacttgcagcacttgcggcagccggagccggcgcagccatgctgatgaaaaaaacaagagagatcaacgaagaggaaaacctccatgtgaaagaaactactgcaaactaccgcaacaccgagcgtggaaagcatgataaaaacagcaaagggatttattattccaacggtaactacgaagcctttgcccgtccggaaaaaccggaaggtgtggacgacaagcatgcctacattgtaggaagcggtcttgcttccctggctgctgcatgcttcctggtaagagacgcacagatgccaggtgatcatatccacatcctggaagccatggatattgccggcggtgcctgcgatggaatctttgatccgtccagaggctatatcatgcgtggcggtcgtgagatggaaaaccatttcgagtgcctgtgggatcttttccgcagtattccttctcttgaaaaaccgggtgcttctgttctggacgagttctactggctgaacaagcacgacccgaactattctctctgccgtgcaaccgtcaaccgtggacaggatgcccataccgacggaaaatttaacctgagccagaagggctgcatggagatcatgaagctgtttatgacaaaggatgaggatctttacgataaaaccatcgaagatgtatttgatgatgaagtgtttgattccaccttctggctgtactggagaaccatgttcgcatttgaaaactggcacagtgctctggagatgaagctttacttccagcgttttatccaccacattgcaggtcttccggatttcagcgccctgaaattcaccaagtacaaccagtacgaatccctgatccttcccatgaaaaaatatctggaggatgcaggtgttgacttccagtttaatactgaagtcacaaacgtgatcttcaatttcaaggatggcaaaaagatcgccactgctatcgaatgcaaggtaaaggatgtggagcagggtatccttcttacagagaatgattatgttttcgtcactaacggaagctgtacagagggcacgatctacggtgaccagaaccacgcaccaaacggtgatgcagaggtccgtaccagtggtgtatggtctctgtggaaaaatatcgcagctcaggatccttccttcggacatccggaaaagttctgctcagacatttccagaacaaactgggaatccgctactgtcaccactttggatgaccgtattatcccttatatcaccaatatcagccagcgtgatccacgtaccggcaaggttgttaccggtggtatcgtaagctgccaggattccaaatggctcttaagctggaccatcaaccgtcagggacagttcaaagagcaggatccgaagaaggtctgtgtatgggtttacggattgttcacagatgttcccggtgattatatcaagaagccaatgaaggattgtaccggtaaggaaattaccgccgagtggctgtaccacctgggtgttccggtagatcagatcgacgatatggcagaaaacagcgctgtctgcgttccgaccatgatgccgtacatcactgccttctttatgccacgcacaaaaggtgaccgcccggatgttatcccggatggctgcgtaaactttgcattcctgggccagtttgcggaaactcctcgtgataccgtattcacaacagagtattccgtacgtactgcaatggaggctgtatacggacttttcggtgtagatcgtggagttccggaagtatggggaagtgtttacgatatccgtgagcttctggacagcagtgtaaaactgatggacggaaaatccccgttggagatccagctgccagggccgctgaatgcactgaagaaaccacttctgaatgttgtgaagggtactgtggttgagaaagtactgcgggatcatgatgtgctgaaagattatatgtaagatatacagcctgccaggcagatattctcaatccgaaaattaagatttgaacacagtaacggagcctccggttctattcttgcagcaatcccccggaaatacttctcgcgcggtatttccgggggattattttattttctgatacttattttcccagtgtttcattcatacttccggaacggaagccctgaagatccagagtcacgtaagaaaatcccaatgtgcggaatttctctgtgatctttgttcttgtttcattatctgcaattttcaggatctcttcttccggaacctcgatccttgccatggtaccgtggatgcgaacacggaactgatggaatcccagatccatcagaaactgctcggcctgatctaccatgtgaagcttctcctcggtaatggtctctccatacacaaacctggaagccagacaggcaaaagatggcttgttccaggttggaagattcatgtcttttgacagctcccggatctcttctttatagagacctgcttcctggagcggactgcggaccccaagctcctggatagccctttttcccggacggtagtcgcccagatcatccatgttggaaccttccacgatcatgttcatatggcgcgcctttgcagcttcccaaagtctggtaaagatggcttttttgcagatatagcagcggtccggcggattctgacggaaccccgggatgtcgaattcgttgatcttgcatatctcctggcaaatgtgattttcctggcagaaatcttgcgtttctttcagttctctgtcggtgaaggagcatggacatgcggtaatggccatagctttgtcaccaagtgtttcctgtgcagctttcagcaaaaatgtggagtccactccaccggaaaaagctacggctacacttccaagggaacggaggatttcctggagttttctgtattttttttcaagtgtgatgttatctgttgctggcatatgttctgtcacctcgtaatttgtaaaatcttatttttgccggatccgaatctgtaattttcagatttgttcttattgacatgctcttgcaatgctatgtgtgtattctttattgtaaacgatacctttttgccatacaagtatttttctacctgacagatgtactatgaaatttattagtatcctctctgtttccaaacataataagaccggaaatacagcatatgccatacttccagtctttctttttacagttattacatttcgatcacatcaagatcatccggaacaaacagatttccgtgataatactctctgccttctgctccgtaaagctctttacgtttcttaatgttcttatcctctgtgtgatacaggacaagattcttaactccaaggttctcagccagctcactggcatccttaactgtggagtgatgcttctcatagggattgaagatatcacgctgtccatacagacagaatgcttcgtggaacatccagtcgctaccttttgcgtatttctcttcacattcattgtatggctcgtctccgcagcaggtaagtaccttaccaccgtcatagatcatctggaaaccgaactgtttcgccttggtggaaccgatatcaaagaaggtcactttcttattaagaattgttttttcctcgccgtcttttacctcgatcagatgaagtctgtcaccgatgtactgtgtctccttcttattcagaagcttaaatgccatgtctttcagaagtccgatcacttcatcatgagcatagatgtttgcctcgccctgataagtgccttttttcatgttctggcaaatgatgcggatcacccacacgatccccatgatatggtctacgtgcttatgtgtaacaaagatctcatgaacatccatcagatcaacgccagccttcttcagctgggaaagcaccgtatttccgccgcctccgtcaaccagaaaatggccgtacttatcgctgagcacaaaacatgtattgtagcactctgttaccagtgcgttacctgttccaagcatggttaatttcattctgttctcctcctgtatagccctggtcatcaaacattcagccacccaccattctgatctctgacactctgaccggctgtctctggttatattacagacacatatacaaccgtttaattttttgttttcttatttcttctgtgtttttcgtgtccaatgataacattatgaagaaatattttcaataagatccattcattttcatagcagaaaaatcaatccacaaatcttcatagattcctgttttcacagaatccagtccggtgcttccttgcatcctctgtcatccagtttatctgcatcgcagataacagaaatatataatatatggatcctgtacaaaaacaggagcagtcacatggcgtaccatgtctgctcctgttttacatttttattatttcagcatctctatctccgtctcaaaatactgttcctgaaaccggacctgttctctgatctcctgtgctgtcatggtcatatcttccggaactgccacccatttgtcttccacatcattaaggcggtggatgatggctatcacttttcctgtaaattcctttaccgggtgatcgatccccagaacataaacgtcctgttcctcgccgtccggagcgatgatcccttcgatgtagccgtaatttaccgggtaaaaaagatctttgtgttccggatggtaactgttcattggacggtcgatcatgatatgcacaagctggcccggagtcggtttcttattctcataaaccatctgcttcatttatattcctctttaagcacatacaagaaattaacggatttttctattatgccagtaaatcgaagatttttatttcaatccgttcttcgttttaccaaatctcagactctacagccgcacgctcaatgccaagacccttcatatatcgatccataaatgcgttgaatcctttcacaccttctgcttccggcgccagtgtgctgccttcgtttcctttgaagacatcttcatccaggaaatccgcaaggtcttcgccttctctcctgttaatcagataggaagccaaaagtgcgattccccaggctccgccttctcctgctgtagacattacggataccggtgcatctaccgcatctgcaaggatctgctggccgaccccctttgtcttaaagagaccgccgtggcccagaagcttatcgatctttacatgctcctgattcagaaggatatccagacctacacgcatggcgccgaggcaagtgtaaagattatttcgcataaagtttgccagtgtaaatttgctctcaggagaacgtacaaacagtggacgtccctcttcaaagccggtcatatgctcgccggagaaatagcagtaggaaagaagtccgccacagtccgggtcgccttccatggctttgttataaagagttccgaacagtttgttcatatctacttccatgcccatagcttctgcaaattccttaaacacatttacccatgcgttcagatccgaagtacagttgttggaatgtgccatggcaaccggatctcctgccggagtggtaaccatgtcgatttctttatacggtttggaaagtgccttctccaggacgatcatggcaaatacagatgttcccgcagaaacatttccggtacgccgacggacactgtttgtggcaaccataccggttcctgcgtctccctcaggcggacacatcgggattccagctttcagctttccacttacatccagaagctttgtgccttcctcagtaagaactcctgcatcctgacctgccaccagagctttcggcataatatcgcgaagcttccatgggaaaccataaggcgcaaccagttcatcgaacttctgaaccatctcctcgttatagtccttcgtttcactgtcgattgggaacatacctgccgcatcaccgataccaagaactctttttccggtgagtttccagtgcacataggcttccagagtggtgatataatcgatatcttttacatgctcctcaccgttaaggatcgcctgatacaggtgtgcgatgctccatctctgagggatattgtaatggaaaagctctgccagcttctcagaggcttctcctgtgatgttgtttctccaggtacggaacgggaccatcagctctcccgctttattaaacggcatatatccgtgcatcatggcactgacaccgaaagcacctacgcttgtcagttccacgccatatttttcccggacatcttttgccatatcctggtaactgccctggagacctttccagatctcctccaggctgtatgtccagataccatccacatactggttctcccattcataggctccggatgcgatgggctggttcttatcgtccaccagaactgccttgatccttgtggaaccaaactcaataccaagagccgtgcgattctcaagaattgctgtttttgcctcatttactcccattgtaaaaaacctcccgtattatttgctgaaatacatgctgttccatctcagctcattctgcagattccggatcgttgtatcgccatcaatataaaccgcttcaatacccatagctgctgttttccagtcaccctcgccaccgaagccatagcctttttccatcagtcgctggatcacaagtcccggaagctgtttcagggagcccagatcaccaaagtgtgttacgacagcctgataatttttctcctcgaggaagcgctcaaaaccgatctcgatccctgcctggactgctacatgcttcttaaattcctcagggtcacgtccatccagaatcatatcgtatttattataatattcttctaccagaacatcaatatctccctggcttacatcctgaacatattctgcgatctcattaaccggataagcatcgatctcccagtttttcctggggatgggtgatagtggtaatgccctgtccctgtcttgcatatagtgaattatcatagccggttaccgcaacatcttccgggatctttttgccctgacgttccagttcttccatgacctggacagcgatctgttgtttttattatttatcaaaagttccatataaaaaaaggccggaacaccctccccattctggtgttccggcctttatatgctgccttacatatttatttcaaagtttttgctgccttccgatcatttcctgccttagcggtacatcttcatataatccccgtgtgcctcgatcagctcatcacacattgcctggatgtctttgatgttcagctctgcacctgtgtgcgggtccatcatggctgcctgatagattttctggcggtctttggtcactgctgcctcaatagcaaggagctgcgggctgatattggatgaattcatagctgccagctgtgtaggaagcttgcccacttttaccggatgtacaccggttccgtcgatatagcatggaacctctacgcaggcatccgacggaaggttatcgatgtaaccgttgttaagaacatttccaccgatcttgtacggtgtgtttgtaacaacagcctccatgatataagaagcatactctttacttctctcatggccgatcttgccatccttgaggatatcctcgcgctctttttcccagccctcgatctgtttgatacatcttctcggatattcgtcaagcggaatattgaactcctcgatcatctccggatatttggatttaatgaagaacggattatactctgcattgtgctcactggactctgtgcaatagtatccaagatgacggatatactcataacgcaccatgtcctcatgcttctcaccggaggtattcttctcctcggcaattctgcggatctccggatacagatcatttccgtctttgtcgtggatctcaaggagccacgccatgtggttgatacctgcgatcagctctgtacgtccctcaatcttgtcttccattcccattccctcaagaagcttctgggagcagacctgaacgctgtgacagaggcctacagtacggatctttgtaaaacgctgcatatagccggtaagcattgccatagggttggagtagttcaggaacagagtgttcgggcagacttcttccatatcccgggcaaattcttccagaaccggaatggtacgaagtgcacgcatgattccgccgattcccagggtatctgcgattgtctgtttgatgccgtatttcttcgggatctcaaagtctgttacggtgcatggctcatagccgcctacctgaatagcattgactacgaaatctgcatctcgaagtgcatctttacggttctctgcaccaagataggtcttgatcactgcacgatcctcgtttacgttgtggttgatggcacttaagataattctggaatcctccagcctattctcgtcaatatcataaagtgctatctcgctctcgcgaagtgccggtgtacacatacagtcaccaagtacatttcttgcgaaaaccgtgcttcctgctcccataaatgtaattttgatcatgttcgttcctcctgcctgtctttttggatatttctgtgaaaaatacctctgttttttataaaagtactgattttctgctgtttctgcggtgcagctccgctttgtttttattatgtctttatgatactgccgaaagtatctttaaaatatatactttgatgtcaataattgttgttttgttgcatgaaatataaatgcccatttactgatacagttcagaaatttcctataaaacatatttcctataaaatttacttccattcgtttttatgcttttttatgttttcggaacattgcaaagtaattttccataatgcaaaaactctccatccgataccaggatcatatatatcctgattcggacagagagttgttattttttatcgcaaagatctgccagcaacaaaaggtactgccagttatcaggcctcagattccgtataatcgcccttctttccattcactacaagtcttctcttttcttccttgtattctctcggacttcttcctgttcttgccttgaataccttggaaaaagccagcggatctccataccctactcttgcagctacttcactgacctgaatatctccgtttttcagaagagttttcgccttctcaatgcgaagattcataagatattcctgcggcgagcatccaaggctttttttaaatgaactggtaagatagctccggttgacgccaatgcggtctgccagctcattgatcttcagcctcttgtcaaagttggctgcaatgtaatccactgcatgctccacataaacggaatttggatatctgtgggatggaagaagcttgccttctctcagacatgcatcccggttatctgtgatcaggtcagaaaaaagaagcagcagaagtccgtttcgtttcagctcattttcaaaaacgagcttgtcggtccgtaccattgcatcaatatacttcgcaacattttccatgcagtggatccttcggaccggattttcccggctgaaaccacttacatgaatcacttcctcggcaatcattccctcaaatcctacccagcggtacgtccagggattgtccatgtctgcctcataccaggcctccacactgggtgggatcagaaatgcttctccaccggtcagatgatactgatagccatccatctcaaaaactccgcttccggattccacgatatgaagtacatgagagatccttttatttggtccaaatcgatatcccggatcacatttttcccacccacagtaagtaagacagagatccaccgcacctttctttaaattctccagacatttatagctgtctgagtttgtaaaaccaactgtatgaagcaacttgccacctccctgatgtcatatattacatttccgaccgtgcgctgcttcgccacccaataacagaccgccatatccggcggcctgttatttttctggtcaggcggatgttttttctacagacagtttttattccatcacttgcagaaatcagtcctctgcttcaattgtatacaatacagaatggaagtcaccgtttgtcttattgcagtagtcacgatcaaccgggattcctgcatacatcagctcatttccgtaagctttcaggcacttatcttcccattttactttgtaaagctgatcctcgtcaagacctttgaagcgcagacgcatccaggaagcattaaccttgttcagtctctcataatatccggcaactgcctgttttttgtctctggaaacaaccatccatgcagtatcatttccttcgaacgggcttaagatacggtaaaaatcaccctccacctggatcaggtcacgatgttccttcatgaattccacctgtgcctttacctcttcgatctcttcatcacttaagaggttcagatccagctcatagccaaaggttccgaaatatgccacatttgctcttgtggaaagcggtgtggtacggtgcagctgatgattcggtactgctgatacatgagatcccatgctgacgatcggatagacaaaggaggtaccgtactggatcttttctctctcagctgcatcggtatcatcactggtccatgtctgcggtgcaaaatacagcattcccggatcaaatcttgctccgccgcttgcgcaggattcaaagaggatgtcagggaatctctctgtcagtcttgtatacagctcataaacaccaaggatatatttatgcatagtcttgccctgatctgctgcagatgcgccgcggctgaaaggctcagacatgtaacggttcatatcccatttaatgtaggaaatggaagattcctcgataaccttggagatggaatcataaatgaaatccacaacctcaggtctggaaaaatcaagaacgtgctgatgtcttgagtgagactcaaaacggtccggtgctccgatgagccagtccggatgtgctctgtagcagtcactgttcttgtttaccatctcaagctctacccagagaccgaatttcaggcccatctcctcgatcttatgggaaagtccggaaattccgttcggaagcttattcttatttacgaaccagtcgccaagcccctggtaatcatcatttcttgttccgaaccatccgtcatccagaacgaacagctctaccccaacctctttggctttttttgcaatattgaggattttttcctcattaaaatcaaaataggttgcctcccagttattgaggaggatcgggcgtgcatgatttctccattttccacgcatcagacggtcacggtacagtctgtggtaagcctggctcattccgtttaagcccttatcactgtataccataacaacctccggagtctggaattcctcatctctggaaagctcccaggaaaatccctgtggattgattcccatcataactcgtgtcatctcgtaggtggaaacctcgacttgtgcaaggaaattgccgctgtacacaaagctgaagccgaaaacctcgcctgtgtcttctgttgtatgaggacgcttcagtgcgataaacggattctgctcagagctggaacctgttcctgcaagactctgtacagcctgtgtacccatctcaagtttacgtgtttttacatagcgctcacgtgcccacgcaccggaaagatggatcatctcataatccatatccgggaactccactgctgcactcatcacgttctcaaggcggatcttctgatcccctttctgaacaaggcgtgcgcttctggtgatcaccggataatcctcatatacggaatatgtaagaataagatctgtatccatcacagaatcatgaagtgtgatatccagagatgttgcttcctcatcactttctgtataagttgccggaagacctgcaagcttcttcttgccgccatagatctcatgagaaacatatttgaaatctacgatctcgcttccgttctcctgacgaacagtaagggcagggtttctgtaatcaccggttccgtaaacaggatactcctgtttggtatactgcatggaaagaagtcctggctccggaacgcatacagccatcagggaacgcatgatctcttcatgaagataactgaaatcctctttatcgcggatagcttttccatagtacagattctccatctgaccattttccatgatacaggtgatgtagcttaaatgtttgttataaatgtggaatgtctttgattcctcgtgaaatttaatcggcataattttctccttttttcatttactgcggataaaaatatccgcctctttccttaagaatcatcaaatagctgtgcattttggcatttgcttcgataaaaataccgctgacaacctcaataaccaaatcctcagttatatacattgtcagcggtcttgtattaccttatgtaatatttctgattacagttttccaccgctggtagcaataccttcgataaactgtttctggaagatcatgtagatcacgatcatcggaatgcaggcgatcagagatgcagccatcagttccgggaatttggatacgtactggccctgcatctttgcaagtgcggaagaaagtaccagcatatccttatctgtattaacgatcatcggccacatcaggtctttgaatgcgaatacagctgtgaaaattccaagtgcgaccatactggatcttgtaagtggtgccatgatgtaaaggaaggtctgaccgatgttacatccgtcaagtctggcagcctcctccagatccttcggcagtcccatgtatccctgtctcagaaggaaagtaccgaatgcagtaacaatacctgggaatacaagggcaaagatcgtattcagcatacccatcttgctgaccatcaggtactgcgggatgatgaaaatctgtaccggaaccatcatctggaacagtacaagactgaagcagagatcacggcccttgaagttcagtcgtccaaatgcatagcctgccatagttgctgtaagaaccgcacacactactcggaagaagatcagaagcagtgtattcttgtacagaagcaggaagttcatgttattgataacagaaataaatgcgtcttttctccatattttcgggaaaatagtgaaaggatctacagatgttgcttcagttacagttttaaaagctgtcaggatcatccagataaatggcacaagcatcgttatggacacaatgatcagtatgacatgtattaaaatagtggttaatttcttttttgtttccatactatccatggttaatccccctttttagttgtagaatacccatttcttctgaccgatcatctggaatactgtcaggatcatggtgataataagaagtactactacgatcgtagcgccgtatcccatgttcttattgataaatgcatatttatagaacaggtaaaccagtgactgagtcttggtaagtgccgggtttgacttgtcaataaccatatagatcaggtcgaatacctgaagggatccgatcacacgggtaacaagtacgaagaaaatggttggtgaaagaagcgggatcgtaatgctgaagaatgcattcacacctgtagctccgtcaatctctgccgcttcataataatctctcggaatttcctgaagtcctgccagaaaaagaaccatattgtaaccgatgatagaccatacaccgatgatcgcaactgcaaatactgcaattttcggattagaaacccagtttacatgaacatggaaaacgttattgataagaccataatcagagttgaacagccatctccataccatggctaccgctgccggagctgctaccatcggaaggaagatgatggttctgtaaatagaacggcccttcatctttctgttaagaagtactgcaagaacaagtgcgatgacaatggaaaaagggacctccacgatcgcatatttgaatgtgttgatcagtgcctgccagatctctttatctgcaaaaaccttctggtagttctgtaaaccgataaagatatttcctttaccaaaatctcctgtcttgaaaaagctctggtaaatagtctggaagatcggaatgatgttcaatacgatcagtccgattgttgttgggagaataaacagccagccccagaggaactcactgcgctctctctttgtccgtgcctgtgacttggtagttttagccataagaatcactccttctattccttctatgtatgaggccgctgcacctgagtgcggcggcccctctcattactgcacttaattatcggtgtttcttaatgcttactcctcagccagcttctcgttcatctgatcagccatctgcttgcaagcctcttccattgtgatgtcgcctgtgtaaacacctttaagaatctcgttgtcctcgttctcccatgttacagtagatttggagtatggacggattaccatgtcatccatcatgttcagataagcctgaaggttgaagtctgcggatttagcccatgcatcagatgtatccttgtatgcactcattgtaacaccaagttcagcctgtttctcctgagcctctttggatccgaggtactcaatcagctgccaagcttcgtctgtgtgctcaccggaagcagatgctgcccatccaagtccgttatataaggaagctcttctgcctgtctcagcgttcttaggaagctctacacaatcacagttcgctgctgtgtactcgttctctttaaatgctgcaagcatccaggagccctggcatgtcatagcgatcttgccagcctcgaaaagtacgtcctcgttgttctcggacattgtctcaagagacgggatcacgccatccttgatccatccttccagtgtctgcatagctgcgatcgtcttctcatcatcccagccggattttgtcttgtcatcactgatgatgtatccgccgttatcatagatcaggttgtagtacccggcctggttgttatcatttctcattccgagaccgtactgggaaccatcatccttggtaagcttcttagctgcctctgtaacatcatcccatgtccagtcagctgtcggataatcaagtcctgcctcgtcaaataatgtcttgttgtaccagagagcgattgtatctacatccttcggtactgcataatatttatcatcgtatgtatacagtccccagatatcctccggatagttctccggatcgatcagatcgctgtctttgatcttatcggtcagatcaagaagcatatcgttggacatgtatctctgactctcgttggagtgcatccagaatacgtccggaagggaaccaccctgtgcaccggcctcgagcattgtccagtactcatcccatttaacaacggagatctctgtcttgattcctgtcttctctgtgaagtctgcgagaatttctttgattcccggctcctggttggtgtcccagatggatacggaaagtgtaacgtcatcgcccttggcatatacaggaactgctgtcattaccatggcacctgttaataataaagctgctactcttttgaaattcataacttcttcctcctttttggatctctcttattttccctctttctttggtcagtttttatatttttccacgtccctgaccgttgatattattataattgcacatggaaaaatgataaatggattattgtcatttcaatatggaaaaatgttgttttttattcattttatccatttttcgttcatgttttgttaattattcgtcatttttacatgttttcttgtatttcttacatatattttcatatttttcactatttatgggcatattttggcactcatttatttccttgtagcaaaaccaacatttttacatatctgtttttgtatgtttttactaacttagaacatgtataaatgtcattttccgaaaaatacactttccctcccctaacataattccatgcgtgccatcattttcacatgtgcacgcaaaattccatgtttttttatacagtcccataaaccgtgctgatacttatctgcgttccctctctttacacacaatcaaaaactgtgctaagattagctgtatcggacttttcccatatggtccgtttttcatttctatataaggaggtatttcgttatgaatcttttaaatgaagataatgtcgttcatgtattcctcaacaaactgggcgacatcgtgatcgccaatcttctttttattctctgctgcatccccgtgatcaccatcgggccgtcactgactgccctctatcactgcatgatgcgtaccgtaaaagggaataacaacggcacaacgaaaacatttttcagagcttttaaagaaaacttcaaacagtcactgatcatatggctgctgatccttgctgccggagccgtgatcatcctgaatatccgctttctgctccatgccgaaggaagcgctgcacatatgctgttttacctttctgtgggagttctgactctgctgataatttttactttatacatattcccagtgatcgcaacctttgccaatacactcggggcactttgcagaaatgcatttctgctggcatttatgcatttccccacaacgatcgccattgcagtgatcacgatctttccattgtatatgacctatctcgatgcaaaactgcagcccctttacgtatgctgctggtttttctttggatttggacttgtagcttttataaattcgatgctgttgtatcgattttttaagaagctgcttcctccggaggaggatatttcgcttttgtgatgaaaagcttgggaaaattgttattatagatatgatatttttgcttttcaaagcggaggaaatctgcgagggggaaagcactcagagttgcgaagcccgcttttccccctcgcgctccccctttccgggcacgctatattatcgtacgctgtgggaatgtgttagtatatcggcacggcgatggattctacggtgttggtgatgttatgttaagccgatctatgctactatgatgctgataatgttacgctgaaacggtctatgctactacgatgctgatatttatgctacagtattcgtaatattacgctgagcttctttatgctacagcactgataatgttacgccacgccacaccacctcacctccaagttgaaagtgaagcgcctcgacccaatctctaccgtcaggctacagggaaactcagcctttcgtcccagtcatccagcgcagcgctgatgacccatccaactcccgtgaaaccactctgcttctcactctgaaccaaattcacaccccaccacttctccccatctgattccccttccgaccagcccccgacgaagccccggcgacagacagcatacaccttgcgggcgtccatttcatctacactcttttcaaaacaaccaatccctcattctcaccaagaatcacatcccggccaccattcagcacatcaccctcagtctcaccaaggccaacacacctccactgcccctcaggcaaacgcacacttctggcaacctccccctgcttccaaacaggcgccaccagcaaatcctcgccaaccataaactgatccatcaccctctccatcccctgtccagggaaaacaaactccatggaacgaacgatcggctcaccagtaactttcgcacactctacagccttcaaaatctccggcagacacttctctctgagagccagtgcatccttaaccttctgaaaatccgcctcaggcagcactctccaaggagaagccgaaaactgcatcaccggcatcaaagccgcaatctgcgcataccgcacaaacatctccggcgtacacgcattctcatttccattcaaaaaacaggtatactcaccaccaccgatcatatccgggctgccaaaaggatgccccgtaagcccctgtatcaacgtatccggaatcaatcccgcaataccactctcatcccacttcgtctgcttatcacaaagcctctgcatcagagaataaccaccggccctgaaacataccctcagctcattaaacacaaactgttccccaaactcagcccaaagcctggacagctcatccgtagaagcatcccggaacagcttatccccggcatgataataacacggatccccagcatccagtttaaaaccatccacacccatatccatcagaacatccagctgatccttcagccacttcaaagcatccggattcgtcagatccagagccgcagaatacccgttccaccactccaggatacgaggtttcccctccggagtctcaatcagaaaatgcttatccctggccttccgaaactccagcgtatccggagtaacaaacggacagatccacaacatcacagaaaagcccatctcatgcaattctttgatcatcgccttcgcatccttgaaattatctcccctgaactgccaccttccataataaggagaccagccatcatcgatcatcagaacacctgatggaaaaccattttccagaataccttttgcatatttcaggatattctcctgggtctgataataggtaagttcaatccaggaattatataccggtgctttgaaaaatctgtctgaaagtttgatctcatgaaatggaaaatgcgctttcatggctgccaggtatgcacctctcagatcattgaagccgttttccagaacgatagattccggaccttccgccaggatctcacctttttgaaaagagatatgaaaacctgcgttgctccagatgtaacggcctttcgaggaaaggaataatggcatgatctgattgtgggttgggttttcgcggaaatcccagtccacaatgtcgtctgcgcctacgggctggcggtagccttcgtagactgcgccgccataccagaattcgttttttaatatagttgttttcatatcaaaactcctttctgctatatatgaatttatgtttttttgtttaaatgttgaggttattttttttgtattgatgtaaatttattagcttttcgaagctaaggaaattgcgagggggggggaaagcactcggagttagcgaagcccgtttttccccctcgcgctccccctttccgggcacgcagttgttgtacgttgtgggaatgtgtttatgtactgatggggcgatggattctacggtgttgatgatgtaacgttgagacgatttgttcttattacctgtaacttccttccggtcaattgcttactccttccggctggaagtaccagctggcaaggcgtgtgctgtctgacgacggctctgcaggaggggtgctgattcttggctggtggaaatctgcgttgtttttcaaaagttcgctgtttgagcgcagcgagttcggacttttggaaaacgcttttagcagattttcagcggcttagaagccagccccccgacgaagcctcggcgtcagacagcacacgccttgccagcgtccgcatatccatcccaccctctccgaatcccttccacttcagcccttgcccttcccacccccatattgtataatcacctcatacaacatcccaccccattttgtgacccaaaattgcgtttttgttgcataacccaagaaaccaggaggcccacctaaatgaaaaacacacaccaggaacccaaaacccaacacaccctctccgtctacttctgcggccaggaagactgcggctcaggccactccttcggcccggccatgcgcccacactacctcctccacgtgatcttccacggcaaaggcatctaccagtgcagcggccacacctaccatctgaaagcaggcgacgcctttctcatccgccccatggactccatctactaccgcgccgatacctccgacccctggagctatgcctgggcaggctttgacggctccgcctgcaaagaaatcctgaaacaaaccgtattttcagacacccccatcttcacccccgaaacacccgcccgccaaaacagcctcctcacccatatgcaaagtctccttgacaccttttccgaaaacaacggaaacgaccttgcctccgcaggaaacctcctcctgatactatccgacatgcaaaaaaagccctccgaaagcaggaccgacatctcaaacctgtactttcagaaagcctccgaatacatcagaaacaactatgcctaccccatccagatctcagacgtggcacactacgtaggaatcgaccgttcctatctttaccggatcttcatggaacacgaaaacacctccccaaaacaatatctcctgaaacaccgcctccagatggcaacccagcttctatgctcctcctcctgcaccatcacagaagcagccctctcctgcggcttccgggacgcgccctccttctgcaactacttccgccagggaaccggctacaccccaaaggaattccgcaaagcctacagcggaaccatctacccctgaccagccacctgtactctgtcatttccctgcctgtcaaaagataaccgctcccaatcacaagcagaccaaaacaattccataacagccaaaaagacggaaaccatcacgcagactctgcaaatgatctccgtctcttattttccggaaaaaaaatgcttgataaacacatacaaaacaatgataaaagcaaacacatagccaaaagcacccagagccgggattccccacagcttcggcttcatatccgtagtacagataatactggaactgatcagaagtgccatcacccacagccccatcacaatattccgcaccagccgccgcaaaagccacgccagatcatccgaggcatgaagatccagattgatcttcgtctgccccttcatacagccctgaagaaaatccgccgccagagaaggaatatccaccgcacgtttcagagaccatgcaaaattttttccaccttttttgatctcacgcttccagtttccattgctcaaaaactgctctttaagccttgccgcagcaatctgtgtcatattgatatccgggcagatctcagccagaaccccctccacatgagttagtcctctcgcaagcatggtcagtccgtgaggcatcatgatcttattctccttcatgacctccatcaggtccaccatcacctctgccacatcaatatttcccatatccgcagtaccgtatttctccataagtccgcggatatcctcataaagcttgctggaatccggcttgcccttaaaatctcccagagccagaaccgcatcctggatcttgccgatgttgttcatggcaacaccttctatggcttcgctgatcagctgacggtcgtgttctgtaagacgccccatcattcccatgtcgatccagacgatctttccctcctgaatccgtacatttccgggatgaggatctgcatggaagaaaccatcttccatcacctgcttgataaaattgtccacatatttcgttccgacctcattgagatcatatccattcgccagaagatctgcccggtcattgatcgcaaagccgtcaatatattccatcaccagaacatgtggtgaaatatattcgcggtaaagaacaggcaccttcacaaatgccacatctttattcttcttcgcaaattccgccatattggctgcctctgtgagaaaattcatctcctcctgggtcacggtccacagctcacttaagaccatgttcagatctaccatgcctttgatacttaccggtggcatcagacgcactgccttatgcatcagtccgatatcccgggccatagtctcatagattccttttcgctgaaccttgatcacaacctcttcccctgttttcagagttgcccggtgcacctgtgcaatggatgcagcaccaaggggcttctcatcaatgcgctgaaattcctcctgccatggacagcccatggattcctccagaacttctatcacctgtgaaaaaggcatgggcggcacatcggaacagagtttcatcaactcatcacagtatattttgggcaaaatatcggaacgcagggacataatctgacccaacttgatataagttgggcccaggtcttccagtatgagccggagcttctcaggagaaacaccccgggtaatggcatgctttttcagaacggctgtgatctctctcagccgttctccatatccgcttttttcttttttctcctgttcttctctggccataaaattctccgtttacgttattaattctccgacagctttcatacttcctctttgtgcttaaactgcctttttgtttctgttccaccgtcttgttctgtccggcttcttccatgagttctgctgttttctcagaagtctctttttattctgcctccggagcttcctcactcccgccggctgcttctgttttctcttcttcaacagtctctgtggctgcatcctcaacaggctctgctacaggtacttcttcctcttttgcagctgcctcagcctgcatgctctcgatctgtgccttcacagctgcaagctgctccggtgtgagcttggagatcgtcgccttaagctcctcctgctcgttctttctggctgcggattctttcacagaatcagctgcattcttaactgttgacttgatgttgtgcttcagctcctgattgaggacctttccctgctcaacggtaagctcacctttttttaccagctcatccaggatctccttggatttctctgctgtcactgctgctgtaccaatacccgccagtaaaattttcttcagtccttcacctaattccataatattttctcctttcctgaaaccggcagctgcccgactatcaccctgcagtccgacaccagcccctgtcatgaaacaaaatttcctgttcctgtcatattcccagaaaaccaagtcccttgggaacaaaaatgatcagtccgacgattgctgccatgatcgctgcgatcagtactgccccggccgctgtgtccttggcgatctttgccagaggatgacgttcctctgtgaccagatccaccacagcttccactgccgtattcaccagttccagcgccatcaccattccgaacagccccaggcagatgcaccactctgtcacggaaagcccaaggatcagtcctgcgatcaccacaagtgctgccaccatacagtggatcttcatatttctttccttgcggatgcaggtaaaaatcccctgaaatgcatatccgaagcttttatacagcggatccttctttctgcctgccatgttcctcacctgatttcctgtttgaattattccctccaacgggaagtatgggattattataacaagtttgtagtaatatttccagtattccgaaaaatttatgaatatttaaggagtatatgtggctattcacagataactgtttgagcggataaaagcatccgcattcagttaaaccacacatactcctgattctgttgcatattctgtaagatttccggatatcctgaattatttttccggatatatatacagatgtcacatattattccacatttttcagtgcttcatccatgggcacatgacggattctccggaattccagcactgctaccaccccataagctgcgattccgatcgctgtcattttcacatagatcatgggatccacccacatagtgatccatcccgaaatactggaaagcatcatctctctgaataacacttccatgatctgccgttcaaccggaaggcttaacagcaggcagaacaccaccacaagtgatgtagaaagtatatacaaacgactgatctcgccatttgtataacccagaatcttggtcatggaaatcgactgggcatttttttcgatgataaccttggaaagcagatagatcaccaccagaaaaatggtcacggaaaatccatacatcattcccatcatatctcccatggaaacatccagctgcctggatatttttgtaagagcttccaggtcaatgacagaaccgatatattttgaagggatatccctgatctctgtatcggaaaaatatcctccaaaataatcatccccaagatcaaacgtctcattcagcttatcacgctccataaatacacagaggcttgccgtataatcatagattccgtctactttaaaggaatactcatccttctcgtatttttccttcagagttatggtatccccctccttgatccggaatttgtccgcataagcgctggaaatataaacgccgtctcccgaaagatccgcatggatatatttactatccggctccaccccgtaaaaggtaatctcctcacttttatatttatcaggcatggtattcagggaatagacagaaaattcttccgcatctttattgtccgttctggtatccgtataatattccagaagagaattcatggcatccgctttattccctgaataggcacttgccggaaccgaaagtatgtactgatattttgccagcatgttttcctggatctccatctgataatgatccagcgcagacggcaggagcattccaaaaaacagcagcagattggcaaaaacaactcccacaaacagcaccagataattgctgatattctgaaagatcacccggaggcgaaacctggaaaaaattccgatcttcgggcttaaatacaccgctcgtttctgtttttttccggaaaaatcccttctcaggagtttcagaggcgaaagcttcagacggtaccagagcactgcatgatcgatcagtatcataatgatgaccggaactatggttgtcagaagaaaggcatctgcattccatactgtcacataagtcggcagactatagctcccgtaatacatgtctgcacatacacccttaaatacggtatagccaagaatatttccgatcagggcaccgaccagcgtgaccagaaccggaagcatcatataatgaaggatcagctcacgtctggtataaccggatgcacgcaacgtaccgataacactggcttcctttcggatcgtattgctgatagtaatgccaaacacaaacgccatgatcacgatcacaatataaagaagcgtgatgaccattgccctgtctccacccatatcatcaccggtaaacatgatcgcctggttaagataacgtgggacaaaggcctccagagttaccactttgccaatatcttccacgagatcctcggaaaccttcttctcctctttttcgtcctttggctgatgagcgtagatccaggcataattataccggagcttttcctgatccagagtttcaaattcctccggagctacgattgccacaccaaactttacagaatcaaacatggaatcgttattattctgaaacagagcactgtaatccgaaagtgccacaaggcctgcgatcttccaggatttttcacccctggtcagggtatctcctaccttaagactgttgttatccgcatacatacggtcaatggcgatctcgccctgccctgacggcatttctcctttcatcaggcagaccttattcaccttctcacgatttttaaagaaacgcatggtgcttccgttatccagatcttcttctatatagtaattctcgtaaagctcaacaccggccgcttcaatgtccttccactgagaactgtaaatcttctccgcagtacggaaatttccgttttcgatgttatatttgtcaaaactttcatcataggccttcagcatgcttccatcggctaccaggaagccggatacaaaacctatggtcagtaccatcagcagaaagaccaccagatattttccaaattcccccttcagttccctggggatacgcttacgtaaaggattcttcataatgcccccttaccattccaggtcagcagccggaatcttctgctcattctgataatttctgcggatcataccgtcacgaagctttaccacacggtctgccatatccttgatggcatcgttgtgagtaaccatgactatggtatttccgtatttgtgattgactgtttcaatcagcttcaggatttccttggaggtgttgtaatccagtgcaccggtaggctcatcacaaagcaggatatccggattttttacaatggcacggccaatggcagttctctgctgctggcctcccgaaagctggttcggaagcttccgctgatgttcataaagtcccagtgtttccagcagctcatccacatccagcggtctgtcacttaaataagcaccaacttcaatattttccctcacagtcagattgggaatcagattatacatctgaaaaatatatcccagatgttttctgcggtagagagaaagcttcttttccttcatatcctccagctgttctccctgaatggtaatgctgcctgcatctgccccgtcaatgccgccgatgatatttaacagcgtagattttccggaaccggacggtcccagaagcacacagaattctcccttttcaatctccagatcaatccccttcagaacatctacgtggctctctccggacccgaaggatttttttattccttttatttccagaaacataaacctctccttccattcctgatcatttcttctttatatatgaatacaaatatatgttagttcagacttactcttttgtcaagatgcaggcttatttttgtaattcgctgtatcagtccggctcttgccaaaatccgataaaacgtatataatgggagagtatctgtatatttttaaccaaataatcttatttttaaaggagtgaatattgaaagtggaccccagcgacacttaccagataatcatattacttattctgctggcattgtcagcctttttctcatctaacgaaaccgcgctgatgtcggtaaacaagatccgtctccgctctcttgcagacgagggaaacaagcgtgcagccatggctctcgatatcctggagaaccagactcccaagcttctcagtgcgattctcatcggaaacaacattgtgaacatttcggcttcttcccttgcaaccacacttgcatacagctttggcggatatatggtcagcatcgtaacggtgatcctgacggttctgatcctgatcttcggcgagatcacccccaagaactacgcaaccattaactcagaaaagatcaccctccgctatatcccggtctttaaatttcttatgaccatcatgacaccggtgatctttatcatcaatctcttttcaagaggtgtgatgcgcctgatgcgtgtggatccggatgcagccgacaaggccatgaccgaggaggagcttcgtaccatcgtggacgtcagccacgaggacggtgtcatcgaatccgacgaaaaagaaatgatctacaatgtgtttgatcttggagatgccacagccaaggatatcatggttccaagagtacatgttacctttgcagatgtggaatccacctatgatgagctgatcgatattttccgcgaggataagttcacacgtctgccggtttataaggacagccagaacaacattgtgggaatcatcaacatgaaggatcttcttctttacgacaaaaacgaggaatttgttatcgatcatttcctccgaaagccgcatttcacttacgaaacaaaaagcatttccgatcttcttgtggaaatgaaggactccaccttcaacattgccattgtactggatgaatacggtgatatggccggactgatcacactggaggacatcctggaggagatcgtgggtgagatccatgacgaatacgatgagaaggaagacgaacttgttcagaaaatttccgaccgtgaatacatcatcgaaggctccatgcatctggatgacgtaaatgatcatctggatacggaactggattccgaggattatgattccctgggtggatttatcatcgaacatctggatcgtctgcctgttgccggtgacgaagtgatcaccgaggacggaattcgtctgatcgtagaaaagctggataaaaaccgtatcgagaaagtgcatgtctaccttccggaaaaagagcctgaaacaccgggaaataccgaagcctgagcaagcaggctccagctccgtaacaataaacagctgatgtaccggaaaatacttaatatttaatacttaatatcatccatatcggaactgttatcggaatccccggctcacccattgagccatcatgatttctgattgacagttccgatattttatattataatgataaaaaatttttatccatatttactaaatgcaatgacagggagtagtacacagtctccggatgcacagagagaagatggccggtgagaatcttcgtgactgaactgtggaagtagccctcgagcagtggactgaaccatgaatcttcatgcagtaggcttcatcgtcattcccacgttacagggaggcagtataattttgtactgacagagagcagagttttacctctgaaaacaggtggtaccgcggaattatccgtcctgagcatattttatccgatatgccgggacttttttattggaaaaatttctcgcggcagcccttatctgcttaacttttcacatcatcaaaggagggaaccaattcatgaaacagatttccggaaacaaattgcttgtaaaagccttaaaagaagaaggcgttgatgttctgttcggctatcccggtgcctgcaccatcgatatcagcgatgaattatataaacagagcggcattgacatcatcctgccacgtcacgagcaggcccttgtacacgaagcagatgcctatgccagaactaccggaaaagttggcgtatgtctcgttaccagcggtcccggagctaccaaccttgttacaggtcttgcaactgccaactatgacagtgttccacttgtatgctttaccggccaggttgcccgtcacctcatcggaaacgatgcgtttcaggaggttgatattgtcgggatcaccagaagcatcacaaaatacggtgttaccgtccgcaaccgtgaggatcttggacgtatcatcaaggaagccttctatatcgcacgcaccggacgcccaggcccggttctcatcgaccttccaaaggatgtaatggccgagctgggaagtgctgagtatccgaagactgtcaatatccgtggctacaagcctaacaccagcgtgcatatcggacagctgaagcgtgccctcaaaatgctgcagaaggccaaaaaacctctgtttcttgccggcggcggtgtgatcatttcccgcgcgcaggagatttttacccaggttgttgagaaaactcagatcccggttgtcacaaccgttatgggacgtggcgccatttccacaaagaaccctctgtttatcggaaatcttggtatgcacggcgcttatgccgcaaatatggcagtgaatgaatgcgatcttctgttttccatcggaacccgttttaacgaccgtatcacaggcaagctccatgagtttgctccacatgcacagatcgtccacattgatatcgacaccgcttctatttccagaaacatccatgtagatatccccattgttgccgatgcaaaagaagctatcacaaaaatggatgaatatgtccaggaatgtaataccggcaaatggctgaagcagatccgggaatggaaagaagagcatcctcttaccatgaaggatcgtggtattatgggaccgctggatatcatcagcgagatcaaccgccagtttgacaaggccattcttgttaccgatgtaggtcagcatcagatgctggtgagccagtatgcggacatcaccgagaaccgtcagctgatcatgtcaggcggacttggaaccatgggttacggccttccaggtgctatcggtgccaagattggtaatccggacacaccggtcatctccgtttccggtgacggcggcatgcagatgaatattcaggagctggctaccgcagttctggaggagcttccgatcatctgctgtatctttaacaatgaatatctcggaatggtccgccagtggcagaagcttttctacggaaaacgttacgccatgacaaacctgaaggccggtgcactctcccgccgcacagacggtcaggaatatccggaatacacaccggattttatccgtctcgcagagagctatggggcaaagggtatccgtgtaactgagaaggatcagatcgcggctgctttcgaagaggctaagaagaacacaaaaactcctacgatcatcgaatttatcattgatccggaggaaatggtttacccgatgatcaagccgggcggcaccctggctgatctgatcatggattgttaggaggaatgaatgatggataaaggaatgaaaaaaagatggatctctctctacgttgaaaaccaggtcggtgttctttccaagatttccggtcttttctccggaaagtcctataacttggacagtcttacggttggaactacggaggatcccacagtttccagaatgaccatcgccacagtcagcgatgatgaaacctttgagcagatcaaaaaacagctgaaccgtatgatcgaggtgatcaaggttattgattttacagacgtgttcgttcgaatgaaggagatcctttacatcaaggtaaaggactgttccccggaagataaagcggaacttttccagattgctgagactttcaaggcacgtgtcatcgactatggaaaagacagcctccttctggaattcgtccagaccgcaaccaaaaatgacgcggtcatcaagcttatcaaagaagagttcaaacatatcgaagttgtccgcggcggaagtgtcggaattgagtctatcagtatgatggagagataaaagctgaataatactacgatataaaaacaacgggaagatgatccctccgcaaacagcgccagctgctgcggaggggagccataagccatcttttcttttagggcaagtttctttcctattgtatccatcacttcattcctcctatacgacattcatcacattcttttcatctgatacaacacacaaccatgactatctacttcttctgctgcttcagttgcttttttgccggaccagatttcttttgcatcctctttgatatatatttctgctaatttatcaggaatttctttctttttatccgatacattaaatattgcaatatatgtattctcttcgttttctcctgaccagacaatccattcatcgtctctgtactcttgtctctgtccatccagtgtacgatgcatctcgtttacctctgtatttgttaacaatgagagcgtccactcatccaaatcagctagttctccaccatacatcaatggtgactgaaagatagaccacaatgtgatcattgtcttttgttctggctttgtaaagcaggtcatacggtctgcctttccacgttcacctgagcggattccaatatgccccaatggaagcatgtcacaatcaggccagtttcctttacgaataaatggtgaccaataattacagcgttcaaacatatcatacagcaattcccactcatcccagaaatcatctgtcaatctccacatatttgcagttttttgaagaaaacttccatcctgcagtcttgccggtcccggcgaaagggaaagtacaatgtcccgtcccgttttgtcgatagcctttcgaatcccttcaatttcctttctatgtgaatctctataaatcgttgaatatgcgatatcatcaactttaatgaaatcaactccccaagaagcatacaattccataagcgaatcataatataactgtccttctggaattgacatatccactccatacatatctgaattccatggacagatactgtttattgcaatctgatctgctgtcttatccgttcctttgatatgcattcttccatgaacagcctgtcttggtattccccttaaaatgtgaataccgaatttcaaccctaattggtgtacatattcagcaagtggtgcaaacccaactccatctgctgaacttggaaaacgattttcagccggaagcacacgactatattcatctatcttcaaatccgcaaacttgcgatatgctgctgactcagctcctggctcgtaccactgaatatctacaaccacatagttccatccatatttcttaagcttttctgccataatatctgcatttctttttacttcttcttctgtaacagacgctccatatacatcccagctgttccatccttttggtggtgtttttgcaaattctaacatatctctttccttacctttccattttattttagggtgcacaaaatacaggtcaccttttacaaactgacttctttcttctaataactatagctttttacttttctgtgaatttgaatcgattcgtttcctgtctgaatttttagattatttttgtcttttctttctcttgtctacattgatatcatatactataatcttattaccatgttagtcacttttgttggataacttataaattttgtcggaaattgtagtttaataaaagcaagaattttgtatctatcgaatataaatatacaaactaccgaaaggagatcctatggaattagaaaaattgaatctgtacagagacaccatctggaatgatataaaacttcgtttctgcggtcattcagaatgtctgccgcttcattcctacggacctggaacaagaccctattatctcatgcattttgttctttccgggaagggacgtcttgttgttaataaaacagaatatcttattgaagaaaaacagatttttttgattgaaccagatcagatggtcttctatcaggccgataaggagaatccatggacttattcgtgggttggcttcaatggcaaactcgctccatacttcattcatcgtcttggattcggttatccgtccctcacaaaaggactttctacagaagtctttgaggaaatcaaggatctccttgagattctgatttccataaaaaatgatagtacaaaaaatgatctgtataccaatggcattcttctccttcttctttcaaaagttggtacttttatcgagaactccaaagagcttcccgaaagaaaaagtcgtcagaattcagaaagtcatgtacagcaagcaatttctattgtagaagatttctacggacgaggcctgacagttcagtatattgcagacaaactgaatctgaatcgatcctatctctcagaaatcttttcaaagcagatgggtgttccattgaaaaaatatatactggattttcgcatcacccagagtgaagaatttctttttacttctgactggtccgtggactatatcagtcagatctgtggattcagttcgccttcttatttttcaaaagtatttaaagaataccacggaatttctcctacagaatatagaaaaaaccgtcacaaacgcgaacgccaaattgttctggtaaaataaggggctgtcgcactaagtattagtgcgtagctccttttcttgtgcaaaaaaataactgccagacctcgaaagaataaattctgtatcgcccagaacacttttgaagattgtgctttattcttacatgaacggggattactcctctcgttccatggaactaaattgtaaaagagatatcaattttatgtttcttctagaaggttccccagctcctgatcatgcaacatttgcaaggtttagaagtattcattttgctccctgttctaaacgtatccttgcagaaatgtctaatgcattgtttgatatgggagaaatttccggagaaaccatttttattgatggtacaaaaattgaagccagtgccaataagtatactttcgtctggaagaaggcagtaacaaaaaaccaggcaaaacttttgcagaaacttgctgattttgtagctgagtgtgagttgctttatgatataaaaatcgtttatggaaatacgataaaaataatggtcccatattatcagctttgacccaaaagacag

SEQ ID NO: 200 - DNA, 67746 bp, Unknown
  gut microbiota DNA sequence
agacggtggagaagtagtggtggtgggctttgccctgtcctggttgataaaataatggagatgcaaccttgaagattaaagatctaggttgcatctccgttttttattcaatcaaattgaaatattgggggaattatatagtggaatattttgaggtagttagttcaactccaggttttccagttcctgtgaggggagttttggttctgagctgtctacgtattttttgagggccttggaggtttttgcgaagccggcgttggttccggcgcctccgatgcagcctccgggacaggccattccttcgatcatgcagtttttgatcttgccggcttttgccagagtgaggacttttttgcattcggcaaggctttctgcgtgttcgatgtggactggtacatcgggatagtattccttcagacagttttcgatggctccggctacgccgcctgcaatggcgtagcctcgtcctgctgcggttgcggcctgggtttcttccgggagctcttcgcaggtggatggggtgatgcttttggcgtcgaacaggccccagagttcctcgaaggtgatcacgaagtctacatcacttcttacggaatgacgcatggcttccagttttttggaggcgcatggtccgatgaagactacttttgcgctggggtgttctttttttacaatgcgggcagttgccaccatcggggtcagttcttgcgagatgttgtcgatcatagccgggaagtatttttttgccatgactgaccaggatgggcagcaggaggtgaggaggaacgggaggtggccggttgctacttctttggcgtagtggtgtgcttcagagatgcagccgatgtctgcgcccagtgctacctcataaatgtttgagaagcccagctgtttgagagcggagcggaattggcccggggtgacgtcttcgccgaactgattgatgtaggcgggggcgatttctgcaatgatctcagttccttctcgaagggcgtgggacagctggaagatctgggatttgtcggagatagctccgaatggacagctgaccatgcacatgccgcaggatacgcatttatcctggttgatggaggcgcgtccctgttcatcgctctcgatggcttttacaccgcaggcacgttcgcaagggcgttctttatgggcgatggcatcgtaaggacagacagctttgcatcttccgcaatggatacatttgtcctggtcgatgaaggattttccgtttaccatggaaatggcgcctttggggcaggtgagtaaacagggatgtgcgacacagccgcggcacatgttgctgacttcgtatttgttggattcgcatgcggaacatgcggaagggatcacctgcataagaggtggttcataatatttctcgtcaatgttgctggccttcacgccatcggtaaggtggacggaacgattttccgggcggagggaaagtcccatggccagacggacacgttcgcttgcaacagctctttcacgatagatgctttcacggtatttcgcgcgttcctctacaatattgtagggaatggattcgatatcatggatcattgattcgtccgtggattcaaatccgatcttagcaatttcggtaaaaatctttcgccggatctgttttactggtgtgtcaagatttcgcatagatgttctcctttacaaaataaattaattaaatgttttccacgcacttttatccatcttaaagtaattgagaaataaaatcaataaccggctttaatgtttttgggcagaaacaaagagcagatttgtatctttattatcaaggctgttaaaaattgaacatattttatggaaaatagatacaaaatcagtaagccactgtaaacatttcgatatattctgaaaaaagcaaaaaaactgcttgtgaaaaatgaccatataagttataattaaaggcatgaaatagtgcaaaataatgatttgcataaatgcgcggcactgacagagtgttaaagcattaacctgtagtggaacaggttgatcaagtggaaaatctatgagaaacaaggagggaaccgaatgttagaccagacgtattacagaaaaacggacgagatcatcgagcactacggccggaaagctgcatcactgattccgatcatgcaggatattcaggctgagtaccgttatcttccgggagagcttcttacttatgttgcggaacagattggtgtaaaagaagcgaaggcgtatagtgtagctactttctatgaaaacttttcctttgagccgaagggcaagtacatcatcaaggtatgtgacggtactgcctgtcatgtacgtaagtccatgcctgttaaggaagcaatgctgaaggaacttggactgactcataagaaacatacaacggatgatatgatgtttacagttgagactgtttcatgccttggtgcctgcggacttgcaccgacactgactgtaaatgatgaagttcacccgaaaatgactcctgagaaggctgttgagcttttaaatgaattgagaggtgagagcgtatgagtataaccagtatggaagatctgaaaaacaaacaggctgaggttaagaagaatcttgatggctatacctgccgtgttctcgtctgttccggtaccggatgtatcgcttccggtgctcagaagatttatgaagaaatgtcaagactctgtgagggaatcgagggtgttgcggttgagatgcagaaggatgttcctcatgtaggaatcgttaagactggatgccagggcttatgtgaacttggtcctcttatgagaattgagccctatgattatcagtatgtacatgttcaggtagacgactgtcgcgagatcgtagagaagaccgtgatctgcggactgcctgttgagcgtctgttttatcgtcataatgatgaggcctgtccacatcccagtgacattccgttcctgaaccagcagacaaggatcgttcttgagaactgtggcaagatcgatgcagagtccattgatgaatatatttccgtaggcggcttttccgcaatggcgaaggcgttctttgaaatgaccccacagggtgttatcgacgagatcacgaagtctggtctccgcggccgtggcggtgcaggcttccctgcaggcaagaaatggtcacaggttgcacgccagccggaaaaagtccgttatgtagtatgtaacggtgatgagggtgacccgggagcatttatggatggttccgtaatggaaggtgatccttacaagatgatcgagggtatggtgatcgctgcctatgcagtaggtgcagaagatggttatatttatgtgcgtgccgagtatcctctttctgtacagagacttcgaatggctattgagcaggcagagtcctatggccttcttggtgataatatccttggttccggtattaatttccacttacatatcaatcgcggtgccggagcgttcgtatgtggtgaaggttctgccctgactgcttctatcgaaggcaacagaggtatgcctcgagtaaaacctccgagaactgtcgagcagggtctgtggggtaagcctaccgtcctcaataacgtagagacctacgccaacgtaccgaagatcatccttcagggtgctgactggttccacaccatcggtacagagggaagccccggaacaaagaccttctcacttaccggttccattgagaacaccggccttatcgaggtgccgatgggaacaagcctccgtcatatcatttatgacatcggcggcggtcttaagagcggtgctgcatttaagggtgtacagatcggaggtccttccggtggatgtctgatcgacgatcagatcgatcatccgcttgattttgattctgttaagaagctggatgccatcatgggctccggcggactggttgttatggatgagaatacctgtatggtagaggttgcgcgtttcttcatgagctttacacagcgtgagagctgtggtaaatgtgttccctgccgtgagggtaccaaacgtatgcttgagatcctggagagaatcgtcgcaggtaagggtgagctttccgatctggatgagctggaagagcttgcaaacatggttcagagcatggccctgtgcggactcggtaagagtgcaccgcttccggtcatcagcactctgaagcgtttccgtgacgaatatgtagagcatatcgtagataagaaatgtcgtgcgaaggtctgcacggcgctccgtcaattccatatcaatcctgagttctgtatcggctgcggcaagtgtgcgaagaactgtccggctggtgcgatttcaggaaagatcaagcatccacatgtaatcaacaacgacgtatgtatcaaatgcggatcctgtaaggataactgtaactttgatgcgatttatgtggaagcatagaagggaggatatcttatgggtacaatgacaattgacggaagaaaagtagaattcaccgacgaaaaaaatgtcctgacagtcatcaggaatgccggtatcaatatccccacactgtgctatcattcagaggtttccacctttggtgcctgtcgtctctgtacagttgaggatgacagaggcaaaacatttgcctcctgttccgagcagccgagagacggaatggttatctataccaactccggtcgtattaagaaatatcgtaaactgatcgtggaattacttcttgcagcacattgccgtgactgtacaacctgtgtaaagagcggcgagtgtattctgcaggagctggcacatcgccttggtgtgcgtaatatccgctttgaaaatacaagagaacagcacgagatcgatgacagttcaccgtccatcatccgtgatccgaacaaatgtatcctctgcggcaactgtgtacgtgcctgcgaggagcttcagggaatcggagctcttggattcgcattccgtggaacagaggccatggtcatgcctgcattcaataaaaagattgctgagacacagtgtgtaaactgtggtcagtgccgtgtttactgtccgacaggtgcgatctccatccgtacacatatggatgaagtatgggatgcactggctgataagaatactcgtgttgttgcacaggttgcaccggcagttcgtgttgcagttggtgatcattacggacttgccaaaggcagaagtgttatgggtaaaatcgttaacgcgcttcacagaatgggctttgacgaagtatacgataccacatttagtgccgaccttaccatcatggaagagaccaaggagttcctaaacagagtggagaagggtgagaatcttccgcttctgacttcctgctgtcctgcatgggtgaagtttatcactgatcagtataaagaatatgttccgaacatttctacctgccgttccccacagggaatgatgtctgcggttatcaaggaatacttccgtgatccggagcatgcagcaggcaagaagaccgttatggtttccattatgccatgtacagccaagaaggcagaggcaatccgccccaacagctttaccgatggcgagcaggataccgatatcgttatcacaaccacagagcttctccgcatgatcgataactttggtcttgattttgcaacactggatccggaagcatgcgatatgccgtttggatttggttccggcggtggcgttatcttcggtgttaccggtggtgttaccgaggcagttcttcgaagactgagcccggatcacagcaaggaagccatgcatgagattgcagagtgcggtgttcgtggtgaagagggaatcaaggaatttaccgtaccgtacaagggaatggatatcaatgtatgcgtagccagtggccttgcaaatgcaagaaccgttatggaacgtgtaaagaacggcgaggcaaactatcatctgatcgaggttatggcatgccgccgtggatgtatcatgggtggaggtcagccgaccagatccggtgacagaaccaaggcagccagagcaagaggtttgtacaatgcagacaataccatgatcatcaagaaatccgatgagaacccgctggttctggagctttatgagggacttctcaagggcaaggagcatcatctgcttcacaatgagttctatatcaaagactgatgtgaggaatacaaagggctgctgttcctgatgaacagcagcatataagaagccttccgggcatatactgtgatatgcgggaattatcttttgcagatggtttccggagcttacaggccagtatatgcagggaggcttttttatatggaaaactttcaggtttaccgtgatatccaggcacggacgggtggggatatctacataggggttgtgggcccggtccgtacaggaaaatccacatttatccggagattcatggagctgatagcactgccatcgatcagcgagggaaaaagagcagaacttcaggatgaactgccattaagcggtgccggaaaaatgatcaccaccgtagaacccaaatttattccaaaagaagcagtggaagtatccataggggaaaaccagaaaatccgggtaaaactcattgactgtgtaggctttctggtaaaggatgcatccggaaatgtggaagaaggcagggaacggatggtcaaaacaccatggcaggaaaaagcgatcccgtttcatgatgcggcccggattgggacggaaaaagtgatcagccagcattccaccatcgggattgtagtcacaacagacggaagtttcggggagattcccagagaaaattttatcccggcagaggaacagaccataaaagagctgaaagtccagggaaaaccctttctgatcctggtaaactcccagactccctacagtgaggaaaccggaaaaactgtaaaacatctggaagagaaatttggagtatccgttctggcagtcaactgtgaacagcttcgaaaagaggatgtgaccagaatcctggagaagaccctttatgaattcccggtcagtgagatagagctttttgttcccagatgggtggagatgctttctccggaacatgaggtaaaggcggctctgttaaatgagattcgggaaaagatgaccagacttactcatgtgcgtgatgtaagcagagaatcagtatatctggaaagtccatatgtggaagatacattgcttgagcaggtcagtctttccgatgggaaagtccgtatccggatcgcagtaaaagacatttattattatcagatgctcagtgaaatgagcgggatatccatggaaagcgaatatgaactgatccagaccataaaagagcttgccggtatgaaggaacaatttgtaaaagtccaggctgccctggaagcggtaaaaggaacagggtatggggttgtggtgcctgagctttccgagatcactattgaggaacctgaggtgatccgtcagggaaataaattcggagtaaagatccggtcaaaaagtccgtccattcatatgatccgggcgggaatcgaaacggagatcgctccgatcgttggtacagaacagcaggcggaggacctgataaagtatatcagagaaagcccggagcgaggggaaagtatctgggagaccaatattttcggaaaatccatccagcagctggtggaagacggaatccggaacaagctggccatgatcagcgaagaaagtcaggtgaagcttcaggatactatgaagaagatcgtaaatgacagcaaaggcggactggtgtgtatcatcatatgaatggagaatagaattgcaaagcaaaaaggacgttcttcagcagacgtcctttttttgatgttgttttttccattctgcgataaactgaagctgttcctggtcagacagttcctgggaagcggcgtcatttcctgcagcggcacagcagaaaagaacaaagatctggagtccgaagaatacaagaaaaaagagaagcatagaaaaacctcctttatttttcagatatgttaagtattggaggagataatgtattttatacattatattgcaagaaaatataattatcaccgggtatggagatttttaaaacagcttctgtatatctcattttttccacagctgatcgcggaacctaaataaaatatacagcaaagatcccggggattcagatgtaagatcccggggtctttttatataaaacgagtagcgggaaagatggtcgcagaataagctaaagaaaggtcagctgtccggcgggagagctttggaaaggtataaaaggatgtatacaggaaaagggataggcgtggcggttctggataccggtatttttcctcatatagattttggcagccgtatttccgtgtttcgtgattttacaggagtcagacgcagcccatatgatgataacggacatgggactcatgtcagcgggatccttgcaggggacggaactgcatcaggtggaaaatataaaggggctgcacctggctgcagtatcgctgctctgaaggttctggatcgtttcgggaacggaagcagggaggatgtgatgcgggcatttcggtggatcatggagtttggaagcatttatcatatccgtatcgttaatatttcagtgggaacaacatcccgggatcataaggaacagacagatcttcttgaaggagtggaaaaactttgggatctgggatttgtggtggtagctgcagcaggaaatcagggaccgggggccggcacggtaacagcaccgggaagcagccggaagatcattaccgtaggctccagtgatatgctgaatggcagaaaggcagtttccggaagaggccctacttttgactgtgtgtgcaaaccggatctggtagcgccgggaagccaggtcattgcctgtgcaccgggactgccgtactcatatggactcaaaagcggaacctccatgtcgacgcctctggtgtcaggagggatcgcctgccttctggaaaaagatccccggctttctaatgtagaggtaaagatgttgttaagagaaaatgcagaagatatgggacttcccagaaatcagcagggatgggggaaatttaactgtgaaaaactgttggcaggctgaattattatacaattcttataaacatagtgtggtaaagcacaaaagcgttgacggaaccggaaaatatgagtacaatgtacagtaaaagtgctgaagaaagattctaaaggaaagagcacctggaatccgaacaggagaataaacctcaaaaggagaaaataatatggaaaaaatcaaaatgcagacacctttagttgagatggacggagacgagatgacacgtatcctgtggcagatcatcaaggatgaacttctcacaccgtatctggaactgaatacagaatattatgatcttggtcttgagcacagaaatgagacagatgatcaggttaccattgatgcagcagaagcaaccaagaaatacggagtagccgtaaaatgtgccacgatcacgccaaacgcagccagaatggaagagtatgacctgaaaaaaatgtacaagagtccaaacggaacgatccgtgctattcttgatggaactgtattccgtgcgccgatcgttgtaaagggaatcgagccatgtgtaaagaattgggtgaaaccgatcacacttgcacgtcatgcatatggagatatctataagaatacagaattttatattgacaagccgggagatgcatatcttgtatttgagggtgaagacggagaagagcgtaaggagctgatccagcattttgatggagcgggtgttctccgtggcatgcataatcttgatgattccgtaaagagctttgcgagaagctgctttaattatgcactggacacaaagcaggatgtatggttcggaagcaaggataccatttccaaaacatatgatggaagatttaaagagattttccagcagatttttgatgcagagtttaaggataaatttgaggaagccggcctgacctatttctacagtctgatcgatgatatcgtagcccgtgttatgaaggcagatggcggttttatctgggcatgcaagaactatgacggagatgttatgagcgacatggtatcttccgcatttggctctcttgccatgatgacctctgtactggtatccccgaagggatattttgagtatgaggctgcccacggaacagttcagagacactattatcgtcatcttgagggaaaagaaacatccacaaactctgttgcaacgatctttgcatggacaggagctctccgcaagagaggcgagctggacggaaatgaagcacttgctgattttgcaggaaaactggaaaaagcaacactggataccattgaaagcggaaagatgaccaaggatcttgcactgatcacttccctgaaagaggtacaggtattgaacagcaaagagtttatccttgctgtaaagacaaaactggatgaactgatggcataaataacaggaatttcagaacttcaagtaatttcataaaaaataaaaaactgcaccggaagatcctgggatggatcacggtgcagtttttttatgagggatatatatggatcatctgatctctgtcagaccgaagcgttcatggcctgctgtacatgttccacaaggatctgcctgacctggggatattcgccaagtcccttcagtacaggggtgacttcatatccttcggaagaaagacggttcatccaggagtccggatctgcaccggccagatcgttctgtgcatggtcgccggctacgatcatgaaaggcgccagcacgatctttttcggatgaaagctgtcggcagcccggagaagggagtccagggctggataggcttctacagttccaagaaaaatatttttatgtccggtatctttaaaacggtaatccaaagcagcgtaaaccgtgtttgcgtagtgttctgttccatgtcccatcagtacaagtgcagtgtccggatccatgtcccggaattcatctgcaactacccggacgatcgcctggttatcttcttctgttgtgagaagaggatttccgaaaacaatactggaaaaacggtcacgaaaagaaagcgcatcggctttcatctgatcattttcgataccgttgatcacatgagtcggctgtacgatcacatcggtgataccatccagaagcatctgttccagagcctcctttaccgtgtggatcgtaagaccgtcccgctttttcagtttggcaatgatcattttgcttgtccatgcacggtaggtgggacaggccgggaatgcatcggcaatatcgtgctcgatggcctcgatggtaagcttacgggtgttttcatagcttgtgccgaaacttactactaggatcgctttttttgaagctgagttcatacggggatttcctccatcctgataattatggtgattatgataaactctttatatttctccgctggaatataaagatgatccgcaatttctaccataagatattataaaagggagggctgacattgtcaatcgtagttgactttccttacggaaatgtttatcattataaaagattgtggaaacaaaggagaaacgtaggacatgagtatattcatgattggaatcgatcataatatggcacctgtagatgtcagagcgcagtttgcttttacccgtaaaaataccggagaggcgctgcgcaggctgaaagaagaagctgggatctgcgggtgtattattctgtcgacctgtaaccggctggaactgtgggtaagtactgcagatgaggagaagccggacctgtatcagtggctctgctcgttgaaaggtgtgcagggagaacaataccagaagtattttaccagcagagaaaacgaagaggcggtggaacacctgttttatcttaccagcggactgaaatcccagattctgggggaagatcagatcctgacccaggtaaaagatgcgttgagtatgtcaagggatgagtttaccacagacagtgttctggaggtgcttttccgtatggcggtaactgcaggcaagaagattaaaacggaagtgccgttttcccatggaaatccttctgtgatccatcaggccatccgttttctggaagagggcggttatcatgttcgcaataaagtctgtatggtgatcggaaacggtgagatggggaagatggctgcccagacactgcgtgaagcaggagcggatgtgacggttacgatccgtcagtacagaagtggtgttgtgagcattcctgttggatgcagcaggatcaattatggtgagagaatggattatctgccggagtgtgacctggtggtcagcgcaacagcaagccccaattatacactgacggaagaattgtttgaggatgtacgtgtggaacgacctatgatccttatcgatctggcagttccaagagatattgatccggagatccgaaaaaaagataacatcacactttatgatatggatagcttccgaaccggcgagacaccgaaggaacttgcagataacctagaagcagcaggagccattgtgaaggcccagatgaacgaatttttccagtggctggaaggtcgtgatatcatcccgcgcatccaggagatcaaagcggatgctgtggaagatctgaacctgaggatcgaaaaaatcttccggaaaactcctatggaggattcagacagagaaaacctgaaaaaagcagtggatactgcagccggaaaggttgtgaacaagctgatcttcgggcttcgggacagtctgaaccaggatgcttttctggaatgtgtggaaggactggagaaactttatgaagaataaaccttatttccccatgtttatagacctgtccgataaaaatatcgttgtggcaggtggtggtaatattgctaccagaagaataaaaactcttctgaaatttacaagaaatatcacggtagtggctacaaaagtgacccaggagcttatggatctcgggaaagcaggaaccgtgactctgtatatccgtcccgtgaaacgttctgattttgccaatgcatatatggtgatcgcagccaccaatgactggaagctgaatgatgagatccaccgtgtctgtaatgaggagggcatttatgttaatgtagcttccgaccgggaagcctgtgatttttatttcccaggcgtatatatgcgggatgaaatggtagttggagttacagccagcggactggatcacaaaaaagcaaagcgtgtaagggaagagatccagaatgcgctggaaaaagtattgggagagcaggatgaagatgaagagagataagatcgtgatcggcagcagagagagtaagcttgcagtgctgcagagcgaaatggtccgtgactacataaaagaaaaaaatccggatctggaagtggaaatcctcactatgaaaactaccggggatatcattctggaccgtacactggataaggttggcggaaaagggctttttgtaaaggagctggataaagcactgatagatggaagaagtattctttctgtacacagcctgaaagatatgcctatggaggttccggaggagctgccgcttctggctttttccaaaagagaagatccgagagacgtactggttcttcctgagggagcttctgaacttgataaaagcaagccccttggatgctccagcttaaggagaaccttacagcttaaaaaactgtatccggatatggatgtcagaagtatccgcggaaatcttcagacaagactccggaagctggatgaaggacagtacagtgcattgatcctggctgctgccggccttaagagacttggactggaatccaggatcaaccggtattttacagcagatgagatcattccggctgctggtcagggaatccttgctgtacagggaagaaaaggggaagcttatgatttcctggagggctactgtgataaggatgcctggatcgcgggaagtgcggagcgtgcttttgtaaagctcctggatggagggtgctcttctccggtggctgcccatgcggaaattctcggggatgagatctatctcagagggctttattataatgaaaaagacggttcctatgtaacaggaacactgcgtggcaataaggcagatgcggaaagcttaggcagggaactggcagaaactcttcggaaaaaaggagaaaacagatgaaaacaggaaaagtatggctggtaggagcgggtcctggcgatatcggcctttttacattaaaaggcctcaaagtgctggaacaggcagatgtggtcgtctatgacagtctggtaggtcagggagttctgtcaagaatcccggaaaatgtcaagctgatcaatgtaggcaaacgtgccagtcaccatatcatgcgtcaggaaaatatcaatcaggtacttcttgaggaggcacagcggggtcttcgtgtggtgcgcctgaaaggcggagatccattcctctttggaagaggaggagaggaactggagcttcttcgggagaatgggatcccttatgaggttgttccgggtgttacttcctccattgcagtaccggcatataacggggttccggtaacacacagggatttctgttcttcagtccacatcattacaggacataagagggccggagaagaatatgatatagacttccgggcacttgttgatacaaagggaacgcttgtatttttgatgggcgtgtccgcacttccggatatctgcgagggtctgataggtgcaggaatggaaaaggacatgcctgcggcgatcctgcagaagggaactacagcaggtcagaaacggatcgtagcaacagtttctaccctggaagaagaggtgaaacgccaggggatcgagacaccggcgatcattgtggtgggtaaggtatgtacactggcagagaagtttggctggtatgaagaactgccgctttcaggatggaaggtccttgtcacaagaccgaaagagcttgtttccagaactgcggacaagcttcgtgaaaaaggcgcggaggttctggagcttccggcgatccgtactgtccccatggaagaccagagccgtctctataaagcgctggatcacctggaggaatatcagtggcttgtatttaccagccctacaggtgtaagggtattttttgaagaactgatctgccgtggaaaagatatccgtgccatgggaaatgcccgtctggccgtgattggggagggaacaaaaaaggccctgcaggaaagaggattgctggcagattttgtgccgtcggtatatgacggggatactcttggaaaggaactttcagagcttctttccggtggagaaaagatacttatcccgcgggcagaaaagggtaatgaaaagctcaccgcatttcttgcacaggcaggtgctgtgatcgaggatgttccgacctatcagactctttacgaaaagagccagctcatcgatgagaagaaggaatttgaaacaggacagatcagctgtgcggtgtttacaagtgcctccactgtgaagggatttgtggagggaacaaaaggactggattattcaaaggttaaggcggcctgcatcggcagacagacgaaggcggctgctgagagctttggaatgaaagcatatatgtcagaaaaagccaccattgacagtcttgtcaagctggtggaggatatgaaaaggagcgaatgatcatggaactgacaaaaagaccaagaagattaagaggtagcgaaaaccttcgtaagatggtacgtgagacaagaatggataaatcttctcttatgtatcctatgttcgtaatggaaggagaaaataaggaagaagaaattccgtccatgaccgggcagtaccgttacagcctggaccgtcttccgtataaactggagcagctttccaaagccggtgtaggaagtgtgatgttttttggtattcctgaccataaggatgaagtgggcagcggtgcctatgatccggagggaatcgttcagagagctcttcgcattgcaaaagagaaatttccggagctttattatgtaacagatgtatgcatgtgtgagtacacttctcatggccattgcggcgttctctgcggtcatgatgtggacaatgataagacgctggagcttctcgcaaaaacagcactttcccacgtggaggcaggtgcggatatggttgctccttctgatatgatggatggtcgtgttgcagcgatccgccagtgtctggacaaggcagggcattatacaacaccgatcatgtcctatgcagtaaaatatgcttctgcattttatggtccgttccgtgaggcagcagattctgctccgtcctttggggacagaaaaagctaccagatggatccgcacaacagcagagaagggctgaaagaggcgcttgcagatgtggaagagggtgcagatatcatcatggtaaaaccggctcttgcataccaggacatgatctggcaggtaaaggagatcacaaacgttccggttgccgcatacagtgtcagtggtgagtatgcaatggtaaaagcagcagctgcaaacggctggatcgacgaagaaaggatcgtgggtgagatggctacaggagcattccgttccggtgcgcagatctatcttacctattatgcggagcttctggcaagacttatggatgaagggaggatcggctgatgacaagatcagaacagttatttgagcgtgcggtaaaaagaatcccgggaggcgtaaacagcccggtaagatcttacggagccatcggtgaggcacctcgttttattgaaaaagcagataaatgctacatctatgatgtagatggaaaccgttatgtggattacattgattcctggggcccgatgatcctgggacataatttcccggagatccgcgagagtgtgatcaaggcctgcgaaaatggcctgagctttggctgtgctacaggaatcgaagtagagatcgcagaatttatctgtgaacatattccacatgtagatatgatccgtatggtaaactcaggaacagaagctgttatgagtgccatccgtgcagcaagaggttttaccggaaaagacaagatcatcaaatttgcaggttgctatcacggacacagcgactgccttctggtaagtgccggctccggtgtcatggcaagtggtattccggacagcgccggtgttccgaagggctgtacacaggataccatgacggctacctacaatgatgccgccagtgtggaagcacttctcaaacaggaagagggaaatgtggcagccgtgatcgtggaggcagtaggagcaaacatgggtgtggttcctccgaaaccaggcttcttaaagcggcttcgtgagctttgcgatgagcacaattgtctgctgatctttgatgaagtgatcacaggcttccgacttgcctttggcggagcagcagagtattttggtatccgtccggatcttgtcacctacgggaaaataatcggcgcaggaatgccggtaggcgcttatggcggacgtaaggagatcatggatctgatttcaccgtgtggtcctgtataccaggcaggtaccttaagcggaaacccggttgccatggctgcaggtttcacacagctgaaatatctctatgagcatcaggaaatctacaaagatctggctgccaaaggtgagaagctttacggtggcttgaagaagatcgtggaggaaaaaggtcttccatatcaggtaaactatgattcttctctggcaagtattttctttacagaccaggaggtaaaagactatgtttctgcaaaaacatctaacctggagctttttgcaaaatatttcaagggaatgctgaaacgaggcattcatcttgcaccttcccagtttgaggcgatgttcctttccacagcgcatacagatgaagtaattgatgaaactctggaagcaatgagaggcgctttgggagatctgtaaaaaggcgtaatggatgcgcaggagccgatccatttgcgtggatcatgtgtgaacgccatagtgaacggcagctttgcataaaaaattgcacaaaagataacaggatggtaacttgttcttgcagaagctttgtgataaaataaacacaaaaatacgtaaccaatgtaaaaagcaggaggccagaacttatgggaaaaaagaagtacgtggcttacgtgggaacatatacccatggaaccagtaagggaattcaggtatacgatgtagatgtagaaaaaggaacactcacagaacgaagcgaagtggaagttagcaatgcttctcatctggcggtatcaaaaaacggtaaatatctgtattccattgaggatgagggtgtagctgtatttgaaagagacaagaacggtgatcttacccgcctcaacagtgtggatatcaacggaatgcgaggctgctatcttgcaacagatgtggacggaagatatctttatgtggcagggtaccatgatggtaaggtaacggttgtacatacacataaagacggccgtctgggaagtgttatggacggcgttttccacaagggacttggaagcgtggcagagcgtaacttccgtccgcatgttaattgtgtacgtccgacaccggataataagtatctctgtgcggtagataatggtatcgatcaggttaagatctatcgtatcaataagaagaaagacaaactggagctggttgacattcttcgctgcccgagagagagcggccctcgtatcatccgtttcagtgatgacggaagatttgcatatcttctttttgagctcagcaatgaggtgaaggtatacagctatgacggaagtggtaagaatccggagtttcagctgcttcagagcattaccactcttggaaaagaggattccaatgatgcgcttcataacgcagcttccggtatgtctctttctgcggacggtaaatatcttttctgtacaacagcaggggaaaatactgtgactatgtatgcagtagaccaggaaacaggccttctgaccaagaaatttacacttccgatcagtggtgattacccgaaggatcttatgatcttcccggataacaagcatattgctgttgccaatcatgccagcaacagtattaccgttttcactgtggattatgaaaagaatatcatcatgatgaacgaaaaaccgagaaagatcgagacaccgaacagtatccatatctggccggtaccggatacatgcgagcagttggattaagaacaggattgatcaaagtaagtcttgtacaggcaaacaaaaacagactcagggacgagtaggaactttccctgagtctgtttttttgcgcatttataattttttatctgacaggtcaaaatgtgaaattaccgctgataaaattcgtggatacgatccatccgtgcactcatattgttaaaaagtgcatctgtaatggtaagtgctgccatagcttccacaacgactactgcacgcggtacgatcaccggatcatgccggcccttgatctcaagctccaggttttctccggtgttggtcacagtagactgagactgactgatggaaggagttggtttgatatgtgcacggagaatgatatcgctgccatcactcataccacccataataccgcctgcatggttggaggttttgaaaataatgccgtttttctgtacaaaaccgtcgttgtcttcggaaccggtaagacgtgtcacattgatgccgtcaccgatctcaacagcttttacagcaccgatggacatgatcgcatgagcgagggtagcatccagcttgtcaaaaaccgtatcgcccagaccggcaggaacgtttttgatgcggcattcgatcacaccgccggcactgtcctgactgttcagacattgttcgagataggcagatgcctttgcggctgcgtcggcatctggcatgcagagtgcattatttcggatctcttcttctgagaaggaccggatttccacaggaccgatggatcttgcgtaggtagtaaatgtaatgccaagttcgtttaacagcttgatggcaatggcaccggctgccacacgtccggcggtttctcttccggaggagcgtccacctccacggtaatcacggaatccatatttctggtcaaaggtaaagtctgcgtgaccgggacgataggagtatgcgatatttccgtaatctctggaacgctgatctgtattgcggatcagaagagaaattggagtaccggtagtctttccttcaaaaactccggaaaggatctccaccagatctccttccttacgggcagttgtataacggctctgaccgggctttctccggtcaagaaaaacctggatatcttcttcgcagagagaaagacctgcgggacagccgtcgagaacggcaccgatagccttgccgtgagattctccccaggtggtaactacgaatttttttccgaatgatgactgactcatttgtataacttcctttcgttggaattctggaatcattatataggaagccgaaaaaaatgtaaagaacgtggaaggcagaatgaatttttatgtaaagatcatgtgaaattatttaaaagctcttttaaaaagaaaaggtatgaattgacaaagctattttgactatttataataaaaaaagaattttgccctggcaaaagaaaagcaagagaagggaagtgggaatcgtggtaaggatttacaagacaatagacggagccatccaccagatacaggaaccggaggaaggctgctggattgcgctgacgaatccgacggcaacagagatttttgaattttccgagaagtttgatatagaggttgacgatttacgatcccctttggatgaggaagaacggtcacgtatcgaagttgaggataattatacactgatcctggttgatgttcctatgatcgaagaacgtaatgacaaggactggtatgggacaataccgcttggcatcattgtgacggggtctatgatctttaccatctgtctggaggacacaccggttcttaccagatttatggagggaagagtccggagcttttttacctatatgaagacccgttttatctttcagatcctttacagaaatgcgagcatgtacctgcgttatctgcgtatcattgacaaaaaaagtgagcaggtggaagaaaaactgcatctttccacaagaaatgaagagctgatcgagcttctggagctgcagaaatccctgacttattttatcacgtcactccggtctaacgaggttgtgctggagaagcttctgaagatagacagcatcaagaaatatccggaggacaccgatcttctggaggatgtcatcactgagaataagcaggcgatcgaaatggccaatgtgtacagcggtatcctgaacggaactatggatgcttttgcatcgatcatctccaataatatgaatatcgttatgaaggtactggcgatcattactattgtcatgagtattccgactattgtgttcagtgcttacggaatgaatgtggctggttccggtatgcccttatcaaggagtccattgggatttctgatcattatcctgatttctgtggcaatcagtgttgtggcagcgatcattctttccaagaagcgatttttctgattttcaaaagttttctgaaaggagattttaatgaaatttatcgacaaactggaacgtaaattcggaagattcggggttccgaatctgactgtttacatcatcggatgttatgtgttggggtattttctggctatgtttgctccgggagttttgaacatgctgagtcttgatatgtccatggtcatgaagggacagatctggagactggtgacatgggtgatctatccgccgtccagtgtgggaggaaccggcaatcttgtgatgttccttctcgcaatcttttttttctattatccgatcggtacttcattggaacgtacctggggaactttccggtacacattgtatattttttcaggtgttttgtttactgtgatcgcagcagtgcttttacatgtatttacaggtggttatgtggtgatgaacgggatcgcctattctcttggcggaaatatttttaccacatattatatcagtctttctattttccttgcctatgcagtcacatatccggatcttcagctgcttcttatgtttgtgatcccgatcaggatgaaatggatggcctttgtatacggactgttcattgcgtgggatatcgtatcttatcttcgagtcgggctttgggtaggtgtagtaccgatcgtagcatcacttttaaactttgtgatcttttatttcagtacccgtgatatgaaccgatacaatccgaaggagatccacaggaggcagcagtttaagaaggctgtggctccttccagaacagggtccggtccggatgggatcgccaagcataaatgtgcgatctgcggacgtaccgaaaaggatgacccaaacctggagtttcgtttctgctcaaagtgcaacggaaattatgaatattgtcaggatcatttatttacacataaacacgtacagtaaaacgtaaaaagaaggagaataattgattatgaaaaaaactaagatcatttgtacacttggacctgccagcaataacagggaaactctgaaggctcttatggagaatggaatggatattgccagatttaacttttctcacggagaccacgaggagcagaagggccgtgtggatatgatcaaggagcttcgtgaggagcttgatatgcctattgccatgcttcttgacacaaagggaccggagatccgtaccagacttttaaaggacggacagaaggttaagctggaagcgggaaaacagtttgtacttggaattggcgattttgaaggcgacagcacaaaggttgctatcacatatgagacactttacaaggatgtaaaaccgggaaacagaatcctgattgatgatggtctgatcgagttggaggttaaggcgatcaagggaaccgatattgtctgtgatatcttaaacggtggtgagctgggagagaagaagggtgtaaatgttccctatgtaaaagtaaatcttccgggaatcacagagcaggataagaaggatattatctttggtatcgagcagaaatttgatttcatcgcggcatcttttgtccgttccgcagaggtgatccgtgagatccgtaagcttctgaatgataatggtggaaaggatatcggtattatcgcgaagatcgagaatgcagagggtgttgagaatattgattccatcattgaagcatctgacggtatcatggttgccagaggagatctcggtgtggaaattcctgcaagtcaggtacctcacatccagaaggcgatcatccgtaagtgtaacgaacattatacaccggttatcacagcaacacagatgcttgattccatgatccgtaatccgcgtcctacacgtgcagaggtagctgatgttgccaatgcgatctacgacggaaccgatgcgatcatgctttccggagagacagcagctggtaaatatccggttgatgctcttaagatgatggcagatatcgcagagatgacagagccgcatctggattataaagtgtttattgaacatcgttccatggatggaagagagaagatctccagtgcagtggcacttgcaacggtgcgtactgcaaagaacctgaaggcgaacgctatcgtaacaccgacaatgagtggaaatacagccagactgatctccaatttccgcccgaaggttccaatctatgcgatcacaccgaattcaaccatccagcataaacttcagctgatctggggtgtaacacctctgaaaggatatcagagagataccacggaccatatcatgtctcaggctatgaatgttgtccgtagccgtcatctgatacataaaggagaccttgttgtatttacagcaggagaccctgcgaccaacatgacaaacggtcgtggtgcagtgacaaatatgatgcacgtgatcgaggcagaataagactgagttttcttcgggaacagcagtcggaaaaacaggagatgcagttattatgaaaaaagaaccatttgtgacacttgagaaactcaacgaaattactgaaaagtttccgacacccttccatctctatgatgagaagggaatccgtgagaatgcaaaagccctgaaagaggcctttgcatggaacaaaggattcaaggaattttttgcggtaaaggcaacaccgaatccatatctgatcaatattctgcaggagtatggctgtggctgcgactgctcctcagaaacagagcttatgatggccaaggcagtaggctgcaaaaagggcgatatcatgttttcttccaatgacacaccggagaaagagttcagatatgcagatgagatcggtgggatcatcaaccttgatgacattacacatattgagagcgtagagaaagctctcggaaaaatcccggaagtgatcagctgccgttacaatccaggtggagtatttaagatcagtaacggtatcatggataatcccggagatgcaaaatacggaatgactaccgagcagatctttgacgcattccgtatcctgaaatccaaaggtgccaaagagttcggaatccatgcattccttgcaagcaacacagtgaccaatgattattatccaatgcttgcaaaggttatgtttgagcttgccgtgaagcttcagaaggagacaggtgcacacattaaattcatcaacctttccggtggtatcggaattccttataaaccggatcaggagccaaatgatatccgtgtgatcggtgagggtgtccgcaaggtttatgaagaagtccttgttccggaaggaatgggggatgttgcaatctatacagagcttggccgtttcatgatgggaccgtatggctgccttgtcacaaaagcaatccatgagaagcatacacataaagagtatatcggcgtagatgcctgtgcagtaaatctgatgcgtccggctatgtatggtgcttatcatcacattacggttatgggtaaggagaacgagccgtgcgatcataaatatgatgtgacaggttccctctgtgagaataatgataaatttgccattgaccgtatgcttccgaaaatcgacaagggagatcttcttgtgatccatgatacaggtgctcatggttttgcaatgggttataactataatggtaaactgaaatctgcagagatccttcttcatgaggacggcagctttgagatgatccgtcgtgccgagacaccgagagattattttgcaacctttgactgcttccctgtttttgagaaacttcttcaagatgaagacgaactgaaataaaatagcggaaatatataaaaacagccttctatgcatcttgtaatgatgctggaaggctgttttatgtttaagtgtctggtaggcataagattgcgagcagggcggaaggtggtcaaatgcagggttacagcttccggctgccggagatttctgccagggcttttctaaactcaaagaaaaacaggatggcagtaaatgtaacggccaggatatccgcaaccggctcggccatataaactgcatttgtccggtcagcacggaaaatatggggcaggatatagattagcgggatgaccagaataaatttccggacaatagccacaatgatggaatctttggctctgccaagggagataaaggtcatctggcaggcaatctggataccaaagataaacacaactgccatatagatccggagcgctgtttttgtgaaagcaagtaatgtactgtccgaagtaaacattccggcaaagatctgcgggaagatcataatgatcagccacaggatcacggaataagaaacacttgtttttataagaagcttaaatgtagaacgtacacgtttttcgttacgtgcaccatagttgtagctgatgataggctgtgcaccctgaccaagtccctgaagaggaagcatggcaaactgcatgacgctggtaaggatagtcatggctcctactgcaacatccccgccgtattttaagagtgaggagttgtagcagacagagataacgctttcactgagctgcatgacaaagagagaagagccaagagccatacagggcagaatgatatcggcttttagtttcatggtgcttttccgaagcttcaggaaggtcttttttccaaagaggaatgagagaacccagatgcaggaaaatgcctgggagatcaccgttgccagagcagcgccccggacacccatgtggaatccgaaaataaaaaccggatccagaataatgttggagatcgcaccgatcagtacggagagcattccggtttttgcgaatccctgggctgtgatgaaattattcatgccaagagtcagctgtacaaagatagttcctactgcatagatattcatgtaaccaaccgcatagtcgatggtgtttgcactggcgccgaatgcaaggagaaggctgcggtttccgagaaacaggataacagtcaggatcagggagatgatgatctgcatggtgaagcagtttccgagagtctgttcggcttttgatgtgtcatttttacccataaagatgctggctctgggagcgcctccgtttccgacaagagcagcgaaggcagatacgaccataataagcggcatacatacacctacaccggtaagggcaagagcaccctctccgggaatatgaccaatatagatacggtcgacgatattgtagagcatattgatgagctgtgcggcaactgtaggaagtgcaagctgcagaagcagctttccgacaggctcggttcctaaaaagcttttgtctttttccatttttttattcctttcgtgatttttttgtattatatattatataataaagacctgacagatttctccgtcaggtcttttatgcgaatgccgctggccggactcgaaccggcacggattgctccgcttgattttgagtcaagtgcgtctgccaattccgccacagcggcataaccatttattataatagcacagtatcaggtggcttgcaaggattttttcagaataaaggtattatttggaaatatttttaattctaaaatgtttatgaaatcggatgaggcatccttgaaattgactgaaaaaagtggtacagtgtactacaaggctgtaccacctgatatagcactgtggatatagcgatatactataagataacggaggagactgcatgaatctgaattccaaaaaaccagagaagcggccgctgtatgtatattatatcattgcggtcgtcattattgttctgctgaatgtttttgctcttcctgctctttctgagagaagtgtaaaagaaaccgattacaccacctttctgaaagccgtagacagaggaaaagtatatgaggcaacccttaattccgattacatttattatactatgaaagtggatggaaatgatgtctattgcaagacggtatctgtagatgatcaggatcttgtatcacatctttacgatgcaggagtaagtatagagggaactgcaccccagaggcagtcattgcttttgtctctgatcctgggatatgtacttccgatcgcgatctttgttcttctgggacgctggctcagcaagaagatgatgagctccatgggcagcggaggaccgggaggaatgatgtcctttggcaaaagcaatgccaaggtttatgtgaaatcctctacgggaatcaaattttcagatgttgccggtgaggatgaagccaaggagcttttgacggaaattgtagatttccttcataatccggagaaatacagagagatcggtgcttccatgccgaagggtgcccttcttgtaggccctccaggaaccggtaaaacccttcttgccaaggcagttgccggtgaggcggaggttccgtttttctcaatttccggttcggaatttgtggagatgtttgtgggtatgggtgctgccaaggtacgtgatctttttaaacaggccaatgagaaagcaccatgtatcgtatttattgatgagatcgataccatcggcaagaaacgtgacggctccggaatgggcggcggaaacgatgagcgtgagcagacactgaaccagcttttgacagagatggacggttttgacggttccaagggtgttgtgatcctggcagctaccaaccgaccggattcccttgaccctgcacttcttcgtccgggacgttttgacagaaggatcccggttgagcttccggatcttcaggggcgtgaggaaatcctgaaggttcatgccaagaagattaaaattgcggatacagtccggtttgatgaaattgccaaggcggcagtcggtgcctccggtgcggagcttgccaatattgtcaacgaggcagctctccgtgcagtccgcgacggacggaaatttgccacacaggcggattttgaagaaagcatcgaagttgttattgccggatatcagaaaaagaaccgtgtactttccaataaggaaaagctgatcgtttcctatcatgaggttggtcatgcactggttgctgccaagcagacagattctgcaccggtccataagatcacgatcattccacgtacctccggtgcactgggatataccatgcaggtagatgagcaggaacatttcctgatgactaaggaagaactggagaataagatcgctacatttacaggcggccgtgcagcggaagagctgatcttccattccattactaccggtgcctccaatgatattgagcaggcgaccaagattgccagagcgatgatcagcaggtatggtatgagtgatgattttgacatggttgccatggaaaatgtaagcaatcagtatcttggcggagatgcaagtctaacctgttcttttgagacgcagacgcttttggacaagaaggttgtggagcttgtaagacgggagcatgaaaaggctacgaagatccttacagataatatcggaaagctccatgagattgccaagtatctgtatgagcatgagacgatcaccggtgaggagtttatgaagatcttgaatgaagcgccggtggagattgagaatacacaggaaaattaaatatgttggcgggagggacgccgaaggaaatacttctgtatagtcttcggcttccgttgggcattagttctaaggccctgaaaatctgctaaaaccattaaaaaaagttcggaactcgcggcttgttgccgctcagacagccgaactttttttttaataacgcagatttccagaacctaaggactagcagccctcctccagagacagagccatacagaagtattccctccggctgtgctctggccatgtggattgcttctgactagtctttaccatatttccgggtgtaccttggaacaggtgagtgccaaacttccggggccgatgtggcaggaaacgctcagggagagagggaagatgttgacttcaccgatattcgggaaggtggtgaggacttcttttcggaattcttcggctgcttccaggttgtgggagtggatgacatccaggttgatcttttctccgaagcggtctgcaatgtcatctttgatggctttcgtcatagtgttttttgcctgggccatggtgcgggccttggagaaggcgtccagcttttcgccctggatctgcagaaccggtttcagacggagcatggttccgatggctgcagctgcaggagtgatgcggccgccttgtttcaggtacttcagagtagctacagtgatatagatgctggagtcgaagcgggtttcttccagccaagttccaatctcatcggcagagagaccgtttttagcctgctggatagcctcgatggcagagtaacgtaaggttccggagatcctctggttgtttacgacacgtacacggccatcatagtcttctgcaagcatgcgggcagtctgcatggaactggagagaccgctggacatggggatatgtacgatctcgtcgtagtctttgagcagcttgtcccagagggtagtgacggattccggtgtgggctgggatgtggaaactctgcagcctggattttgttcaagatgctgaaagaactctgattggttcatgtcaatgtcttccagatattccttatcatctataaaaaacggcattggaagcatgtagatgccaaggtcttttacctgagcgggagacatgccgcagttactgtctgtaacgattgctatagatttcataatggtgatcctccttgcctggattttcatatttggtcagtttttctgttttctgaccgggacatctcaagtataccacaggaaaccgcccttgtcattcaacgtttaattcgctataatgatataacattctgggaaatatttccccagtctggggcaaattgtgaagcgggatctcagaagaggcttatcatatgggaggatccgctgctttgaaagagagggaaaatatgaactgtcgtattgcagagggaatggttaataaatatatcgatcatacgttgccgttgaatgatctggaggattttctggagcatattgagaagtgttcctcctgctacgatgagcttgccacatatttcattgtacataaggccatgcagcagctggatgagaaacaggaagatactgttctggattttaaggagcttctggaagaggatatccgaaaatccagaaggtatatccgaaaaaagaaatttcacagagcgatcgctgcagtggcagtctgcgttctgatcgcggcactggtggtctttcttgtttttgtgatcctggaactgaaggagggaatttgattttgagtgaaaaaatattactgatcgatggtcacagcatcctgaaccgtgcgttttatggtctgccggatcttaccaatgcagaaggacgtcatacaggagcggtatatggatttctgaatattatgttcaggatcatggaggaagagaagccggagtatcttaccgttgcatttgatctgagtgcacctacgttccggcataagagatatgaagcctataaaggcacccgaaaacccatgccggaggagcttcgggaacaggttccgctgatcaaggagatgctttctgccatgggaatcaacatcatgtccctggaaggctatgaagcagatgatcttcttggtacggtcgccagaagaagtgaagcaaagggtatggatgttaccattctttccggagaccgtgatcttcttcagcttgccacagataaggtgctgatccggcttccgaagactgtccggggaaagacaaccattgaaaactaccatacagcggaagttcttgagaaatatcaggtaacgccgccgcagatcatagaactgaaagcgctgatgggcgacagctctgataatattccgggaatcccgggcgttggagagaaaaccgcgaccaagatgatcgtgcagttcggttccattgagaatgctcatgagcatctggaagaggtaaagcctaataaggcgaaagaatctctccgcgagcattatgatctggcacagctttccaaagagcttgcaaccatcaacacagatagtccgctggaattttcctacgaaaaagcgaaagtggaaaatccctatactccggaggcatatgaattgtgtaaacgcctggaatttaagaacatgctgaaccgttttgatccggctacgacagcagattcctccatggaactggaattttttacctgtaatgatctttccggggtggaggcactgtttgaaaaagcagcgcagaaaggtcaggtgggtatttctgttcttgcagatccggatcaggtgtataccgtgggattggtcctggatgaaaaagaaatctatcagattccggtgggaggacttctcacaggggattacctttgcggaaaactgaaaattctggcggacagtacggtactctgtgctatggatattaaatcagttctcaaacatgtttcccttgacgattcgaagaaggtttttgatgcgggggttgctgcatatcttctgaatccgctgaaatcttcttattcccatgatgacatcgccagagaatatctggatggtatgatgctcccctcaaaggaagaccttcttggaaagacttctctgaaaaaggcctgggaagaggagttggaatgtcttggaaattatgcctgctatcaggcgtttgtgccctgcatggcccgaaaagttcttcttgaaaaactggatgaaacaggcatgcgtaaggtttatgatgagatcgagcttcctcttgtctttaccctggattctatggaaaaatgggggatttccgttaagggtgaagagcttaagagctatggcgaaaaacttaaagtccgtatccaggagctggaaaaaaccatctggcaggaagccggggaggagtttaatatcaattccccgaaacagctgggtgtgatcctttttgaaaagctgggacttccaggtggaaagaagaccaagacaggctattccacagctgcggatatcctggataagctggcgccggatcatgccatcgtaaaagatatcctggagtaccgccagctgaccaagctgaaatccacttatgcagatggtctcggaaatgtgatcggagaagatggaaggatccactctacttttaatcagacgatcacagcaaccggtcgtatcagcagtacagatccgaatctccagaacataccggtccgtatggaactgggcaggctgatccgtaaggtttttgtgccggaagagggctttgtatttctggatgcagattattcccagatcgagcttcgtgtgctggcacatatgtccggcgatgaaaaactgatccaggcttatcgtgaggcggaggatattcaccggctcaccgcatcccaggtgtttcatgtgccgctggatgaggtgacatcccttcagcgaagaaatgccaaggcggtaaatttcggaatcgtttatgggatcagttcctttggactgagccaggatctgagtattaccagaaaagaggcagctgcctatattgagaaatattttgagacctatccgaagatcaagggttttctggacggtctggtaaaggatggcaaggaacatggttatgtgacaactatgttcggcagacgaaggcccgtgccggagctgaaatccagtaatttcatgcagcgctccttcggagaacgtgtagccatgaactctccgatccagggtactgcagcagatattatcaaaatagccatgaaccatgtttacgaacgaatgaaaaaagagggactgcgttcaaggctggtgctgcaggttcacgatgagcttctgatcgagacaaagaaagaagagatcgaggaagtttcccgtattctggaagaagagatgaagggagctgcagatcttgcagtggaacttgacgtagatatgcaccagggtgacagctggtatgaggcgaaataaatgagagtgatcggagtaaccggcggagtaggggccggaaaaagtacagtacttggaatcctggaagaagatttccaggcatatgtgatccaggcagaccagcttggtcacattctgatggaaccgggggaagaatgttacgatgcggtgatcgcattgtttggaaaagaaatcataaaaaaagataaaactattgaccggagacggatttctgatgtagtattcacagataaggatatgcttttgaaattaaacgggatcatccatccagctgtaaagcagagaatcctggatcttcttggagaacagaaggaagccggaagagagatctgtgttgtggaagctgctctttttctggaagagaattatcaggaattctgtgatgaagtctggtatgtgtatacagaggaggaaatccggatccgtcgtctgatggaaagccgcggctattccagagagaaatctcttggcattatccgaaaccaggtatctgaccaggttttcagagaacatacggattatgtgatcgagaataatggagatctgaagggtacccggagacagatcagagaagggatagagagaaatgagactttgtagtattgccagcggaagcagcggcaactgtatttatgtgggatctgaggaggcacatgttctggtagatgtggggatcagcgggaagagtatcgaaaaaggcctgaattccctggatcttaccggaaaagatgtggacggtatcctgatcacacatgaacattccgaccatatcaagggactgggagtgatctccagaaaatacggaattcccatctataccacaggtggaacagcagatgccatgcttcgtatgaaatcccttggaaaaatgccggagggactgatccacgagatccgggaggatgagccttttgggatcaaggacctgacggtaaatccttttaccattccccatgatgctgcacagccggtgggttaccgcctggaatgcggagagcattctgtgggcatcgccacagaccttggaaaatataatgattacattgtaaaaaatctggagaatctggatgcggtgcttttggaagcaaatcatgacatccgcatgcttcaggttggaaaatacccttattatctcaaacagaggattctgggagaccgtgggcatctctccaatgagaatgcaggacgtctgctctgtcggatcctccatgataatttgaaggcggtttttcttggccatttaagcagagaaaacaactatgaagaacttgcctacgagactgtgtgctcggaggtgacacttggtgacaacccgtaccgttccagggattttaagatccaggtagcgaagagggatcacatatcagaaataatcacagtgtagaaaggaaaaaacgatgaagaagacaattatcacagtagtaggaaatgacacagtaggaattattgcaaaggtttgtacatatcttgcagagaatcaggttaatattctggatatttctcagaccatcgttcagggttacttcaacatgatgatgatcgcagacacagcaaaatgtgaaaaggatggcggtgaacttgcaaaagagcttgaaaatctgggcaaggagatcggtgttgtgatccactgccagcatgaagatatttttaacatgatgcatcgagtatgatcaagcagcgaatgcggattgccaatgcatatgatatctactttacatcaatcatcagggagaaaataaaatgatcaatatttttgaggtaaacgagacaaataaaatgatcgagcaggagaatctggatgtgcgtaccatcaccatggggatcagccttctggactgtatcgatcctgacctggatgcactgaatcagaaaatatacgaaaagatcaccacaaaggccagaaatctggtagctaccggtgatgagatcgcaaccgagtacggtatcccggttgtaaataaacgaatttccgtaacacccattgctctggttggcggggctgcatgtaagaaaccggaggattttgtgaccatcgcaagaacgctggataaatgtgccaaggaagttggcgttaactttatcggcggatattctgcactggtaagcaaaggaatgactccggcagaggagcttcttattcgctccattcctcaggcaatggcagaaacagagcgcgtttgcagttctgtaaacgttggttccaccaagaccggtatcaacatggatgccgtaaagctgatgggcgagatcatcctcgcaacagcagaggctactaaggaccaggattctcttggatgtgccaagctggtagtattctgtaacgcaccggatgataacccgtttatggcaggcgcgttccacggtgtcacagaggcggactgcatcatcaacgtaggtgtcagtggccctggcgttgtaaagaaagctctggagcaggttcgtggcgaggacttcggaactctctgcgagatgatcaaacgtaccgcattcaaagttacacgagttggacagctggttgcacgtgaggcatccaagcgtcttgacgtgccgtttggtattgtggatctttctcttgcaccgacaccggctatcggtgattccgtagctgagatcctggaagagatcggccttgagagagccggtgcacctggaacaactgcagcgcttgcacttctcaacgaccaggtgaagaaaggcggcgttatggcagcagctgctgtgggcggattaagtggtgcctttattcctgtcagcgaggatcagggaatgatcgatgcggtaaacgagggagctcttactctggagaagctggaagccatgacctgtgtatgctctgttggtctggacatgatcgcagttccgggagataccaaggcgactacactggcaggtatcatcgcagatgagtctgccatcggtatggtaaatcagaagacaactgcagtacgtcttatcccggttatcggtaagggtgtgggcgaaacggttgagttcggaggtcttcttggctatgctccgatcatgcctgtaaattccttctcctgtgatgcatttgtacagagaggtggaaggatcccggcaccgatccacagctttaagaattaattttatttttgggcttgacagactcacgttgatgtgctaaagtaaacacaacttaaaaaacaaaccagtgagaaagagaagtaaacatttcaggaagcttcacagagagcggtgatggtggaaatccgcaggggaccagatgttgaatggactttcgagggcggcccgaactatttatctgtacagtaggcgccgacgggaaccgaacccgttaccaatgaggagtgtatgttagtacaccggaaagtggacgattcgtcaatttgagtggtaccgcgataataaagaacttttattaccgtctcaagcatgatataagcttgggacggtttttgtgttacaggaaaagcgattctgtcgcatgaaagttgttccggaaaagcagaccgcaaggtgtacaaaaggtaatcataagcggaaataagaagggagaacaaaaccatgaaaaaaagaatgttagtgatcgcagcagcagtagcagcaacaactatgatgatgacaagcccggttatggcggaggattttaaagtgggcatctgcaattatgtagatgatgcttccctgaaccagatcgtagacaacatccagtcccgtctggaggagcttggcaaagaaaagggtgtcacatttgatgtgtcttatgataactgtaatgcagatgctagtgttatggaacagattatttcagattttcaggcggataaggttgacctgatggttggtgtggctacaccggtggcaatgcgtatgcagtccgctacagagggaagcgatacaccggttgttttctccgcagtatctgatccggttggctccggtcttgtagattctctggatgctcctggtgcaaatatcacaggaaccagcgattacctggatacttcttctatcatgaagctgatccaggcacagaatccggatgtaaagaagatcggtcttctctatgatgtcggacaggattcctccacaacagcgatccaggaagcaaaagattatctggataaagagggaatcgaatatgtagagcgtaccggaaccactaccgatgaagtccagctcgcagcagatgcactgatcgctgacggtgtggatgccgtatttacacctacggacaacaccatcatgacagcagagctttctatttatgaaaaattcatcgacgcaggaatcccgcactacacaggtgccgactcctttgccttaaatggtgcctttgtaggatatggtgttgattatgcaaatctgggacagaaaacagccgatatgatcgctgacatcctgatagataatgcggatccgtctaagacagctgttgaaacctttgacaatggtactgcaacagttaatacagaaacctgcaaggcacttggacttgatttcgataccgtaaagaaggcatttgagcctctctgcacacaggtaaatgagatcacaactgcagaaagctttgatgaagtagaatcaaaataaattaaccgctcacttttatgagcagttatgaaataaatccaattggaggaaatcactgtgacgattgcaactatgctctccctcggggagactgccctgaagcttggactgatctgttctctgacagttcttgctttgttccttagttattccatgctgaatgtctgcgacctttctacagatggctgctttaccttcggggccgctgtaggagccgtagttgctgtaagcggacatccgtttctgtccattgcggcagccatggcagcaggtgttacatcaggatttgtaacggctatcctgcagacgaagctgggggtagacagcctgcttgcaggtatcattgtaaatacggcgttatattccgtaaatatcgcagttatgggaggctcatccctgatcaatatgaatcggacgaccacagtatttaccatgatgaaggatgcgcttgcaggtacaccgttaaaaggcagggaagatatcctcattgcagccatcgcagtgatcctcgtgatcgtatttctggtattctttctgaaaacaagacttggccttgcgatccgggcaaccggaaataattctgatatggtaaaatcttcctctatcaatccggtctttacaacggtgatcggcctttgcgtggcaaatgcatttaccgcactttccggatgtcttctgtctcagtcacagaaatccgtagatatcaacatcggtcagggtatggtcaccatcgcactggcatccttgctgatcggaggtacccttctcggacatggaggaatttttgtgagagcggtgggaatggtgcttggttcctttatcttccgccttgtgtataccatcgcacttcggttcaatatgccggcatttatgctgaagctggtatcctctgtgatcgttgttcttgcaatttccggtccgtatcttaagaaacagtggccgcagatccgaagaagaatgactcatacaaaaggaggaagatgattcatgctgaaaatcagccatatttcaaaaacatttaatccgggaaccgtaaacgaaaaaaaggcgatcacagatctttccctggaactgaaaaaaggcgactttgctacgatcatcggttccaatggtgcaggaaaatcaacactttttaatgcgatctgcggtgattttcttacagatgccggttcaatcgagctggatggcagggatatcacatttatgccgcagcatgcacgcgcaaaagagataggacgtctttatcaggatccgatgcgtggcactgcaccgggaatgacgatcgaagagaatcttgcacttgcagccggcaagggtgggtggctttcccgcacgacccggcaggaaaaagagcgttttcgtgaggaattaaagaagctggacattgggctggaagagcggatgagtcatccggtaggtcttctttccggtggacagagacaggcgctgacgcttttgatggcaaccatgaatccgccgaaattacttcttctggacgagcatactgcagcccttgatccgggaactgctgagaaagtccttaatctcaccagacggatcgtggaagaaaatcagctgacctgtctgatgatcacacacaatatgcagtcagcaattgatcttggtaaccgtatcctgatgatggactccggcaatatcgtgctggatatcggaggggaagagaagaaggatatgaccgtggatggccttcttgagaaatttaaaacgggagtgggcaaggctttggataatgaccgtattcttttgtctgaataaacggaataaataatgaagaaccgttaccgatcatgtgtaaagtggaaaatgaatagctgctttacacaggtgacggttctctttttatgaaaattcttgagtatgtcacgttaccgtgataaaataaatgaaatcactttgtgatttcatttatgagcaagtagcgaagcggattgcgaatatccgtttgattttattatggaagagggacgaatgacatgcagttttcaaaaagattggaccgatttggagatgaaatttttgctgctctgaacaaccgacgtatggagctggaagcacagggcatgaagatctataacatgagtgtgggaactccggatttcaagactccggaatatatcaagaaagctgtagcggaagcagctatggatgataacaactggaaatacagtctccgcgatctgccggagcttctggacgcagtctgtacttattataagaaacgttttgatgtggaactgacaccggacatggtaatgactgtttatggaagtcaggaaggaatggggcatcttggcatggcgctttgtgatgagggagatacagtacttcttccggatccgtgctatcccgtatttgcagcaggaagtctgatggcaggagcagttccttactattatccgctggttgcagagcatgatttccttccctatgtaaagggaattccggaagaaatagcgaataaggctaaatatatggtagtatccctgccgtccaacccggtaggaagcattgccactccgggactttacgaagaaatcgtggaatttgcgaaaaaatatgatattctgatcattcatgataatgcgtacagcgatattatttttgacggggcatttggaggaagttttttggccactccgggagcgaaagatattggagtggaatttttcagtctttccaaatccttcaatgttacaggcgcaagacttagctttctggtaggccggccggatgtgatcgcagcgcttcgcaaattgagaagccagatcgacttcggcatgttcctgccgcttcagaaagcagctattgcagcacttcagggaccgctggacagcgtaaaagaacagtgtcagaagtaccaggagagaagagatgctctctgccagggacttcgtgatatcggatgggaacttccaaatggaaaaggcaccatgtttgtctgggcgaagatcccgggtggccgcaccgacagcatggcattctgcatggaactgatggaaaaggccggcgtcatcgtgactccgggagcaagctttggtccccacggagagggctacgtacgtttcgccctggtacttccgccggagaagatccgggaagcagtggaagcgatccgaaaaagcggattaaactgaataactgaaagttgttcaaaatccgatctcaagccatgaaaagattacttatcagcgttcaagccgctgtggatcttaaatgatccgcagcggctttttcatttcgtggatgaaaggctgacctgttttgtggcagagaagcatttcgtaaagattggaagccgcacaggtttcattaaaaagtcgaagtgcagtttcatcgaggatcacagatgcatcggcggctttggtgatcagcgggatcgaggagtttttcttgatttggctgagaagcggagcgctgcttttttgaaagccaagtacccgggcatagggaatgtgtccgggtgcttttgttttttggtcaagaaagatccggacaaggctgcggcagatagcagaacgggtaatatcccgtgttttcaaaagatccgcaaactgggaaaaaccttcatattgatttcgggatttcaggatacgccggatcagtgcatccgaaagctccggatacatttttaaagtttcttcggattccagaagcagtttgtaatgcagaggaagatccaatgctgagtcagaaagccatgctccttttttgagagaatccaggaatccgggaagggaagcagaagggatcaaccgggaaagatcagcagactgcacagttccttcggattttttcataaggctccggatgccggaagcagagggaaattcttcgtcggaaagaagagaaaaatccgtatcatgataaccacttccctttcttaaaagtgcatgaggaaggatacaactgttaagacggagaagcgctttgcagtattcgattcccaggatgttattgggagaagaaagaatgagttcaatatgttctgatgaaacgccgaatgtgttatgcacggaagtggctttttctcgcatataacggatcaaagcactgcttcttgcagcaggaaaactcattccggtacgaagattctgctgaaggagtttgcggtattcaaacggttcctttacaagaatctgtgcaatattcataagagtctctgtatctccgcattcacttccgaaacatagctcatctacaacaccaagcccgtcaagaaggcttacgccacctgcggcaaatccttccgcactggccgttgctgtctgtactggcatttccaggatcagatcggcgcctccgagaagagccatctcagcccggagatgtttttccataagggcaggagcccctctttggacaaaatccccgctcatggcgatcacaatataattagcaccaaggatctcccgggcatagcggatctggtattcgtgacctttgtgaaatgggttatattctgcaatgattccaacaattttcatataaaaaagtacctgccgtttctgaaaattataatggtgctattttaacataagcaatgtaaaaagttaagcggcattcgaaatctgttttgctgccataaaaccgaatgctgctgtacgctctgtacccggcaacgccctttgtaagatacagaaatcacgcaaatgcatgatcatgagccgaaatcctctgaccatctgtgacatttacccacaaaaaacacctcgcagaacattgtcggtgaacagtaataattgcacttcaaaaaatacgcagtatagccattttctgacaatgaaacgcttgaaaagaaaagggtaagggggtataatgaacatagtgtagtgcccgaacagacactagcgtttttgttacatcaagaaaggagccatttaatcatgggatttgttgaactgcttaaaaaaagagcaaaagaaagcgtaaaaacaattgtactgccagagacagaggatatgagaactcttgaggcaactgacaagattctgaaagagggagttgcaaagatcatcctcatcggtaatgaggaagagatcaacaagaaagctgcagagggcggctttgatatttccggtgcacagatcgtagatccggagaaatctgacagaactcaggcatatattgataaatttgtagagctgagagcaaagaagggaatgacacctgagaaagcgaaagagatccttcatactcagtacccatactatggcgtaatgatggttaagatgggggatgcagacggtatggtatccggtgcatgccattctacagcagatacacttcgtccatgccttcagatcctgaagacaaaaccgggaaccaagcttgtatccgcattcttcctgatcgttgttccggattgcgagtatggtgcaaacggtgcattcgtatttgctgattccggtctgaaccagaacccgactccggatgagctttctgcgatcgcagcatcttctgctgagtcctttaagcttcttgttcaggaggagccgatcgtagctatgctttcccactccactaagggaagtgcaaagcatcctgacgtagataaagtcgtagaggctacaagaattgccaaagaggagcatccggagcttaaacttgacggagagttccagcttgatgcagctatcgttccaagcgtaggcgcatccaaagcaccgggaagcgaagtagcaggtaaagctaatgtactggtattccctgaccttgatgcaggtaacatcggatacaagcttgctcagcgtcttggtaaagcagaagcatacggacctgttacacagggtatcgcaaaacctgtaaacgacctgtctcgcggatgctctgcagatgatatcgtaggtgttgtagcgatcacagcagtacagtgccaggcagaggataaataattattaaaagatcaggagagttaaatcatgaacgtattagttatcaactgtggaagttcttcattaaaatatcagttaatcgattctgagacagagaatgtacttgcaaagggtctctgcgagagaatcggtatcgacggaagactggtataccagaaagccggatgtgacaaagagatcacagaggcagctatgccaacacataaagaagcaatccagatggtactggatgctcttacaaacgataagacaggtgcgatcggaagccttaaagaggttaatgcgatcggacatcgtgtcgtacacggaggcgagaaatttgcttcttccgcagtgatcacagacgagatgatcaaagcagtagaagagtgcaatgaccttgcaccgctccacaacccggctaacctcattggtatccgtgtatgtgcagagcttatgccaggcgtaccgcaggtaggcgtatttgataccgctttccatcagacaatgcctgctaaagcatatctctatggacttccgcttgacttctacaagaaatataaagtaagaagatacggtttccacggaacatcccacagcttcgtatccaagagagctgttgatttccttggccttgacaaagacaactccaaagttatcgtctgccaccttggaaacggatcttccatcagcgcagttgtaaatggcaaatgtgtagatacaacaatgggtcttacaccacttgaaggtgttgttatgggaactcgttctggtaacatcgatccggctattatggagtttattgctaagaaagagaacctggacattgagggcgttatgaacgtactcaacaagaaatccggtcttctcggactttccggcggactttccagcgacttccgtgacctcaacgaggcagctgaaggcggaaacgaggatgcagctaatgctatcgacgttctctgctatggcatcgctaaattcgtaggcggatatgttgcagcaatgaatggtgttgacgcgatcgtcttcacagcaggtatcggtgagaatgcgatcccggtacgtgagaaggttgtcagctatctcggataccttggcgtaacacttgacaaagatgctaacggacatcgtggcgaggaaatcgtgatctccacaccggattccaaggttaaggttgcagttatcccgacaaacgaggagcttgcaatctgccgtgagactgtagcactggtataatcagctgtttcagtaccggtacataaccgttcgggcatgatcggtaatcaggcagaattatatattactgtggatcagcagtatacattcgggggggcggacaattaaaggtccacccccgtaatttaccccgaatttctgattaagccaacagtaacaaaaaattaaaaaaatgtaatattttcccgaaaataacgttgacaaatcacaagaccatatgtataatggattgagtgtggataggagagacttatgcagattcatttattagacatttcttcctgtgatggcaagacgatccaggaatcagttgttcctgaactggagaagattgattttcagatgggaagttttccggtacttgcgaaggaaccggtagagcttacgatcaccaataccggtgataaggttcttgagcttacaggaaccggtaagattacagtgggcattccctgtgaccgctgtcttgagacagtagccgtcgagataccactggaatttaagaagaagctcgatatgaagctttctgatgaagagcgtgtcaatgatctggatgaaagcagctatctcacaggtatgaacctggatgtggaccggttggtctatcttgaggtattgatatgctggcctttaaaggtcttatgtaaagaagactgtaaaggtatctgcagccgctgcgggaagaacctgaacgaaggtccctgcggatgcaaggaggagcctaaggatccccgcatggcagctatcagtgatatattcagtaaatttaaggaggtgtaacctatgtccatttgtcctaagaacaaatcttccaaagctagacgtgacaagagaagagcgaactggaaaatgagcgctatgaaccttgttaaatgtagcaaatgtggagcacttatgatgccacacagagtttgcaaagcttgcggaagctacaataagaaggaaatcatcaaagttgaggactaattttaattagacagtcaatatatgatgcgaaaagagtctggtatgctgagataagtataccggctttttttatactctggggggaaaataaaaaaatatgaaacagaacaagaatcagaaaaataccgccgtgaaccagatcacagagggtgtgatctggaagcagcttctgatattcttttttccgatcttgtttggaactctgttccagcagatctacaatactgccgatacagttgtagtaggccgctttgtgggaaaagaagcattggcagcagtaggaggctcatccagtatgatcgtgaatctcatcgtaggtttttttgtaggtttatgttccggtgcgtctgtagtgatttctcagttttacggagcgaaagatcacaaaaaccttaaaaaagcacttcacacatctataatcttctgcctggctgccagtattattgtgggaacagcaggatttatcctggctgagccgatccttcacctgatgaaaacaccggcagaagtaattcccgattctgtgctgtacctgcatatctattttgcgggaacatttttcaatctggtctacaacatggtatccagtatcttaagagcagtgggggattccaaaagaccgctctatgtgctgatcattacctgtttgttgaatattttgctggatgttgtatttgtagtgatcttccatatgggagtcctcggtgttgcacttgcaacagtcagctgccaggcagtcagtgccatccttgtaacctggttcctgatgcgcgcagaggatatttatcgtctggaatttcatgagattcgttttgatctccggtctttgggggctgttctcaggattggacttccggcaggactggaatcggtgatgtataatattgccaatctcaccattcagatttttgtcaatgaactggggactgacacagtggcagcctggggaactatgggaaagattgatgcggtgttctggatggtatgcaatgcttttgccatctcaattaccacctttgtgggacagaattatggtgccggaaaataccaccgcatgcgaaaaagtgtccgcgtctgtatgatgatggcatacatttcggcgtttattgtaagcggagcacttattctgttcgcaaatccgatctaccatttgtttacaaccgatcaggtggttgtagacattggggtgcatatgatccgtttcctgattccgtcctatgctatttatgttgtgatcggaattctttccggagcgctgcgcggtgccggaagagtactggttcctatgatcttgacctgtggaggagtctgtcttttacgtatcatctggttgtttgcctttgtaagatctcatccggggatcgaaagtatcatgctcagttatccggtgtcctggataattactgcggtgctgtttgtcatctattattttcggcgatttccaggtatgcagaaaaagaaataacgatatatgaaaaggtgctgattctgtgcaatagcagtgatcagcacctttgttttgttcgaaagatgtcgatttattacgtatagatttgattgcctgaaagctgaaaaagaggtattctggatgcagatagatgaaacatatgtaatggggatgaccagatatgtataatctgcaaaaaacaatacgatatggttttgggttgatacttgaagttattgcgctgtgtgtcggtatgatttatagtgcgagaactgtacgggctgaacctgaagtacagcagccggccagaaaggtaacagaagttgttactgaaaaatggactgtgatcagtggaaaacgtctggatcttatcctgaaatatatgggagatataaattttgaaaaagaaggaatcagtcttcgtatccctgcttctgtggcacaaagctggaaggtagcagagaatggtacaatacaggcactggtacaaaaggttcccgatcattcatatgaaataaagatctataaaggcactcagaagatcacggatattccggggagccggatcatgataccggtaaaagagatgtttcccaacggagatccggaaactatggaaattacggattcccgaggaagaaaactaaagacattcctggataaaaagcaggatcttctgatcgttgacacggacgagacaggaatcttctgcgtaagaggtcggaaaatagatgatatagaagagaatccttttgcagtggcagtcctgacgacagcaacaatgataacagtgctgatcgtaggaatccgaagcagatccggaaagcgaggtgacagtcataaaggagaaaagtaggcaatggaccctgatctttggacttactgtggtgttatctatgactgctttttttatgatgtatctcataaataatgaatatacagcgaaaggcgagcagcccattcagggaatcctttgtctggatgataaagatgcggcggcaaagctacattatcttgccagggaatggcaatattttccgggaaagctgcttacacctgagatgctgaaaaaggatccaggatattacagttgttatatttcgatcggagaacgtaatgaaatggaactggggaataaagaggcttctacgtatggatgtgggacataccggatgtttctgatcctgcccgaagaggaaaaaatctgggctatatctatggcggaggttttttccgcataccgaatctatatcaatggagaactggccggggaagtgggggatcctgacgaaaaaacctatatggatcgggtcatgaaccgtgtttttacgtttcagggatccggggttgtggagattgtcatagcagtagcagacaaaagccatatcagatccggaatccagactattccggttttgggatctccggtccgtgtaagcatacagagaggactgcgggtactcggaagcggctgtgccattgcgttctgtatctgtatcatgtttgggactcttatggtacatgtcagaaccaggacaaaagaatttgctatttttaatctggtctgtctctgtgtggcagggtattcgttatgctccctggtacataatttttttcttcttcccacaaagccctggtatgccctggaaactatgatctattatctgatcctttcctgcatgatccggcttgaggattgtattataggaaaaaaaaggggcatatatctgtttcttttgatcgatctctggatcgtagtagctttctttctggagatttttgcggatatacttccttcagccaggcttctttatgatgttgtctggatcagtgaggcagtcaaatgggtggcagcgatctatatgctgctcaatacttttggagaaacagattgcagatatggaaagatcgttttggtgggaacaacgatttatgcctgttcccttgtggcagatcggatagggtatctttatgagccgattttgggaggaggtttcccggagacaggtgggctgatactgacagctgcgtttggctgtgttctgtggagagacctgtcagaagcatataagatccgtctgacttatgaggtatacagtcatcagactgaacttcgtctccttgcccagaaaaatcattacgaccgattaaaagaacagatggaagaaaccagccgtgtccgtcatgatatgcgtcagcaccttcgtgttctgtctgcattactggaacgtgagcagtatggagaaatgcagaaatacctttgccggtatacccgtgaatttcaggaacgtttgacctatcattcttactgtaaaaatcaggttgccgatgcgatcttacattattatgaagaactatgcagaaaaaacgggatcgtttttcagtgtcaggtagaagcaccggaaaaaacagggatccaggatacagatttctgtcgtctctttggtaatcttctggaaaatgccatagaagcggcacagctttgtccgaaaggcagttccagatttgtccgtgtacagatccgtaccagaagtaataaacttcttataaaagaagagaacagttgcacagatcccttacgcagaaataaaacaggatttttttcaggtaagcattccggacaggggatcggaactgcgtcgatcatggaaattgcggcacgttatggagggtttgcggattttcagtctgaaaatggcattttcaaagctgagatatttcttcatctgacgcaaagagatactgaagataggctttacggatagcagaagagccacgtttccggatctggacaacctccccgttgtccagaagaaagccttcttcagaagcttcctgtatacggtccatattaacgacacagccacgataacaggagagaaaattaggacagtcccggatctgctcctcaaatttgtgaaaggtaagataagaacggaccggaccggcgtcggtatgaaggcacactgcatttcggaatgtatctgcatataaaatactgcgcagagggacccggatgggaacccggtcagaaacgacttcaatgtaacgggatgccagtaaatgcctggattgaaaggaatccagaatggaacagagtttttctggctgaaatggtttcagaagataataggaggctcctacatcatagctttccacagcgaaatcactgctggtagtgacaaaaacaaggatgcagttatcggactgtcttcggatcctgcgcgcagcttccatacctgtcattccgtccatataaatatccaggaacaggatctgaaattttccgggctgataatcttcaaaaaattcttctgcgctgaagaaatgacagatttctgcccggatctgttttttctcaaaataggaaacagcgatattcttcagggcttctgcatccgttgagatgtcatcaataattgcaatattcaaaataatataacctccggtttataaaagagtagtaaaaatagtatatcataacttttgtgtatatccaatatcggatttttgcctgaaatgacgtattgtgtagaaaattattaggaatgaacgtgattttagcagatatttaacataaaaatgtcatatttcatggaaactgtcattttgtcacaggtctgttgtcatttcccgataatttttttacaatagcgtcaaaagatacgaaaggcggtggatatacgaaaaataagggcagcagctggcgacaccagaaactgttgaccaagatccagataaaaaacaatcccccaagagggctgtacttccagatttgaggtacagccctttcccctgtcataacagtgattcttgacggaatcgtggaaattcgctatcatggaaatgatttttatatactttggaagaaaacggagaaaatgcgcatgaacattcttaatatagaacatatccacaaaatttttggagataaggtgatatttgatgatatctcctgcggcatcgatcagggagaaaaaataggtatcatcggtgtaaacggaaccggtaagactactttgctccgcgtgatcgccggagaggaagaaccggacgaagggcaggtgatcacccagaacgggatccggatcagctggcttccccagactccggaatttccgcagcatatgaccattctggactatgtggcagaaggcaaatggcagaaggactggagtaccgaaagtgaggccagacgcatgctgaatacacttggtattaccgatcagaatatcaatatggataatctttccggtggtgaaaagaaaagagtggcgctggcaaggatgcttttaaatccggctgacattctgatcctggatgagcctaccaaccatctggacggagaaatggtcatatggctggaagattttctccggaattttcgtgggacggtgatcatggtcactcatgaccgttatttcctggatcgtgtggcaaaccggatcctggagatcagccacggaaaattatattcctatgcaggagattattccagatttctggagctgaaagcgcagagagaggaaatggagcttgccagtgaccggaagcgccgcagtgtacttcggatggaactggaatgggcagcaagaggctgtcgtgccagaagtacaaaacagagagcaaggcttgaccgtttggaagcactgaaggcgggaaaaaccccgctgaaagagcagaatgtggaaatggattccattgagacccgtatgggaaagaaaaccatagagtttcatcatgtaagtaaaaccatcgaaggtcgtcttttgatcaatgattttgatcatattgttcttcgtgatcagcgtctcgggatcatcggaccaaatggctgcggtaagtccacacttcttaaaatggcagatggactgatcttgccggattccggagagattcagatcggagaaacgatccgtatcgggtatcttgcccaaaacgttccggatatggatggaagacagcgggtgatcgattatatccgtgaggtggcggaatatgttccgacaaaagaaggaaggatcacagcttcccagatgcttgagagatttctttttgatccggccatgcagtacactccggtggagaagctttccggaggtgagaagcgaagactgtatcttttgaaggttctgatggaggcgccaaatgttcttcttcttgatgagcccggaaatgatcttgatattcccaccatgaccattcttgaggactatctggattctttttccggcatcgtgatcacggtgtcccatgaccgctatttcctggataatgtggtgaaccgtattatggcatttgagggagatggccggcttgtccagtatgagggcggttatacggattatctggaagcaaaggaaagaaagggacagtctctggaaacgcgttcagatatgaatggcggtacagtacagggagaaacagctgagcctgagaaaaagaaatccgctgcagatacctggaaacagaaccggaaacagaaactaaaattcacctataaagaacagaaagaatttgacactattgacgatgacatcgcagcattggaagaacgtctggagcagatcgacaaagagatggctgccaatgccacaaatgcgggaaaactcagggagctttccgacgagcagcaggaaatccagcagaagctggacgaaaaaatggatcgctgggtatatttaaatgatcttgcagaacagattgaaaatcagaaagagtaaaagatattgacttctcaggcaaaactctagtatcataaataacggtacgttaaccggataaactgcgaagcagttattcggttatgagtaggtagcgaatgcggatttcgaatatccgcttaacttttggtactctgcaatgaaaatccttatacggatgtgtatgaggattttcactacagtgtaccatatgcattccgaaaagatttcggacagagaaaggacaacatatgtcagaaatggtaaaagtcgttgtagatgcaatgggtggtgacaatgctcccgaggaaccggtaaaagccgcagtggaagctgtgaaagaaaaagagaacatccaggttatccttacaggagtacaggatgtgatcgaagcagagcttcggaaatacccggattatcctaaggacaggattcgtgtggtgcatgcgtctcaggtgatcgagactgcggaacctccggtcatggctatccagaaaaagaaagattcctctattgtagtgggattaaatcttgtaaaaaaacaggaggccgatgcctttgtttcctccggaagcaccggtgcggtactggtaggaggccaggtgatcgtaggcaggatcaaagggatccggagaccacctcttgctccgctgatccctacggcaaagggcgtttcccttctgatcgactgtggtgccaatgtagatgcgagaccagatcatctggtacagtttgcgcagatgggttccatctatatggaaaatgtagtgggtattaagaaaccgagagttgctatcgttaataacggtgctgaggaagaaaagggcaatgcgctggtaaaggctaccttccctctgttaaaagcatgtaaggatatcaatttcatcggaagtattgaggcgagagatatcccgtcaggttatgcagatgtagtagtctgtgaagcttttgtaggaaatgtgatcctcaagctttatgaaggtgttggagctactctgatatctatgatcaaaaaaggtatgatgacaaacattcgaagtaaaatgggagctctgatggtaaaacctgctcttaaggaaaccttaaaatcatttgatgccagtgaatatggcggagcaccgcttcttggtctgaaaggtcttgtggtcaaaagccacggaagtgccaaaagcgtagaaatccgtcatgcgatctttcagtgcgagcagtttaaggaagagaagatcaatgaaaagatcgaggagtttatagcagctgagcagaaagcacaggcagaagaaaaaagcgaaaaaaaataaaaccgggattgccggaaatattacagacagaacaggaggcgaacagtcgtggaactggaaatgctgaagaccatcatcgaaaaaactctgggaagaaatatggatgccattacagaaaaaactacctttgtggatgatctgggagtggattctctggatttttttcagattcttattgatctggaggaaacttttgatgttcgtatcgccccggaggaagccgaggagatcgttactgtcggcgatgcagtggagactcttcgccgggtaacgaagggaagaagaaatggaaaataatttaaaaaagctggagcagactatcggataccagtttaccgcaaaatctttactggagcaggcaatgacacacagctcctatgccaacgaaaaacatcttggaaagcttggatgcaatgagcgcctggagttccttggagatgcggtgctggagctgatcagcagtgatttcctgtacaaaaaattccggaataatcaggaaggtgagttgaccaagaaacgtgccagcatggtatgtgaaaagagtcttgcctactgtgcaagagaattcgggcttccggagtttatcctccttggaagaggtgaggaaatgatgggcggtcgtaaaagagattccatcgtttctgatgccctggaatctctgatcggggctatgtatctggacggtggatttgaaccggcacaggcttttgttatgaaatttatcctgaacgatctggaggataagaggattttttatgacagcaagacagtgcttcaggaaatggtacaggaaggcggaaatcatccggtggaatatcgtcttctgaaagaagagggaccggaccacagcaagagctttactgtggaggcgctgatcaatggaaaaagtatgggaaccggaaccggccatacaaaaaaggcagcagaacaggctgcagccctagaggcaatacgcagtataaaataacagcaggtggccaatgtatctgaaaaatatagaggtgcagggatttaaatcctttgcacagaaaataaattttgaatttcataacgggatcaccggcatcgtaggacctaacggtagcggaaaaagtaatgttggcgatgcagtccgctgggttctgggagaacagagcgccaagcagcttcgaggcgggaatatgcaggatgttatcttttcaggaacggagcttcgcaagcctctgagctttgcgtccgtggctattacacttgataacagtgatcacaagctcccggtggattttgaagaagtaaccgttaccagaagactgtatcgttccggtgagagcgaataccgcatcaacggcagctcctgtcgtttaaaggacatcaatgagatgttctatgataccggtatcggaaaagaaggatattccatcatcggacagggtcagatcgataagatcttaagtggaaaacccgaagaacgccgagagctttttgacgaggcagccgggatcgtcaaatttaaaagacgaaaaaataccacactgaagaagctggaggaagaacaacagaatctggttcgtgtcacggacatcttaagtgagctgaccaagcagctggaaccgctggaacgtcagtctgagactgcaaaaatatatctggcaaaaagagataatctgaaagagctggatataaatatgttcctcctggaatatgaacacaccggaaatctgatccgcgagctggaagaaaaaaccaggatcgcagaaaatcagttaaaagaagcccaggatactcatagtcgtactaaggatgaatatgaacgtctggaaaaaatactggaagagctgaatgagcggatggaggcgttgcgggaagaaagcagggatcgtgctatccgtaaacaacagctgtccggtgagatcaatgttcttcatgagcagatcctggcaggagagcagaacgacagtcattatcgcagccgtcttttagcagttcaggaagatacggagaaaaaagctgcagaccaggaggcgctggaagaacaaaaatcggatcttcaggcaaatttacgggagatcaacagaaaacttgctgacgagcagaaaaaaatggacaatatccagagcagcatagaagaatgtacccaggcagtggaagatggtaagaatgagatcattgagatccttaattctcgtgcaaacaccaaaggtaaggcacagcgttttgatgccatgaaggagcagttggatatccggaaagcagggatcagtcagaggatcctttccctgaaaacccaggaagaggagcagcagtcagcgatcgatcaggcacagaaggaatacgacactatcacgaaggccattcaggaaaccagagaagaaggcagccgtcttacaaaagagatccatgccattcaggaaacccttaaacagcagaatatacagctggaaaaggaacagacgtcctatcatagagaggcatccagactggaatccctccgcaatatcacagaacgttatgatggatatggaaacagtatccgccgtgtcatggaacagaagaatcatgttcctgggatccgtggcgtagtggcggatatcattcacgttgaaaaaaattatgagatcgctattgagacagctcttggcggaagtattcagaatatcgttacggataacgagcagactgctaagcagatgatcgaattcctgaagaaaaaccggtatggtcgtgcgacttttctcccgttaaacagcatttcttcaagaggcgagtttaatcagagcggtgctttgaacgaaccgggagctattggtcttgccagtggcctggtaactgcagagaaggaatatgacggtctgatcggatatcttcttggcagagtgctggtggtggatcatatcgatcatgctattgccattgccagaaaataccgacacagtatccgtatggtaacgttggagggagaatccttaagtccaggcggttccatgaccggtggagcttttaagaacaacagcaatcttcttgggcgtcgtcgtgagatcgaggaactggaaaagaaggtaaaagagctggcagccgggtatcatgagatccgacagtccatggaagataaccgcagcagaagaaatgagatgcgtgatacggtggcgacgctgcagcagaaatttcaggaacaatccattcagcagaatacagccaggttgaacattgaacagctggagaaaaaagcggaggagatccgcggcggttataccaggatcgagagggagcaggaggagatccgtcttcaggcaagagacatgcaggcagataacataaagatcacgcaggaacttgaagcatccaaaagggatgaggaagagctggaaacgtttatcgagacccggcagaaggagctggaggactggaaaaaggacgaagcggagacttcagagaagctggaaaggatccgtcttgacgcatctgcatcccagcagaaggaaagcttcataaaggaaaatctgcggcgtctgaaaaaggagatcgaagttctttcgaaagagagggaagaaattctggattctctggaaaaaggcagccaggaaactgcagaaaagagaaagacgatcgaccaggtccgtaaggagatcgaaggctttgccgcaaaagaagaggcggctgcaaaacagctggaaaaatggcagcaggaaaaggaagagcgcacaaaaagccataaggaattttttgaaaagcgtgatgagctgtccggccagatcagtcttctggacaaagaatgcttccgactgaagactcaggcagaaaagatcgaagagaaccgggaagcaaggatttcctatatgtgggaagaatacgagatcactccgaataatgccttgcagtacaggaaagaagaaatgaatgacaggcatgtgatgaagcagcagatccataaattaaaggacgagattcgagctcttggctctgtcaacgtcaatgccattgaggattacaaagaacttctggaacggcatacgttcttaagcggtcagtacaacgatcttttggaagcggaaaaaacgctggaacagatcatccaggagttggatgagggcatgcggaagcagttcaccgaaaaattcggagagatccagaaagaatttgataaagccttcaaagaactgttcggcggaggccggggaactctggaacttgcggaagacgaggatatccttgaggcagggattcggatcatttcccagccgcccggaaaaaaacttcagaacatgatgcagctttccggtggagaaaaagcactgacagccattgcacttctttttgcgatccagaatctgaagccttcaccattctgtcttctggatgagatcgaggctgcactggatgattccaatgtaggacgttttgcgggatatcttcagaagttgacgaagaacacacaatttattataataacacatagacgtggtaccatgaatgcagcagacaggctttatggaattaccatgcaggaaaaaggggtatccacgctggtatccgtagatttagtagagaaccagcttacccagtagcagaggggatgaatcagtatggcagaagaaaaaaaaggattttttaaacgtctggtaagcggacttaccaaaacgcgagacaatatcgttgccggctttgattccattttcagcggtttttccagtattgatgatgatttttatgaagaactggaagagatcctgatcatgggagatatcggcattaacgcaaccacttccattctggagcatttaaaggagcaggttgctgagcagcatatcaaggagccgtcccagtgcaaacagcttctgatcgacagcatcaaaaaacagatgcaggtagaaagcacagaatatgagtttgagaaccggaaatccgtgatccttgtgatcggtgtcaacggggtaggtaagactacctctgtaggcaaactggccggtaaattaaaggatcagggaaaaaaggtcatcctcggagcagcagataccttccgtgcggcagccggggagcagctgacacagtgggccaaccgtgccggcgttgagatcatcggcggccaggacggagcagatccggcatctgttgtctatgatgcagtggcagcagccaaagccagaaatgcagatattctgatctgcgataccgcaggaagacttcataataagaaaaaccttatggaagagcttcgcaagatttaccgtattctggaacgtgagtatccggaagcatatttggaaacgctggtagttcttgacggaaccacgggccagaatgcgctttcccaggcaagacagtttgccgaggtcgcaaacgttaccggaatcattcttaccaaacttgatggtacagccaagggcggaatcgcagtagcgatccagtctgagcttgacataccagtaaaatacatcggagtaggcgaaagtatcgatgacctgcagaaatttgatgcagacgcatttgtaaacgccctctttgacgtagaagaaaggagctaaatacaaatgcttacattagagagctttgaggaagcggcagcaaaagtaaaagaagtgacacaggaaacaaagctgatatacagcagttatttctcagatatgacgggaaataaggtttatctgaagccagagaatatgcagcgtaccggtgcatataaggtgcgtggcgcatattacaagatcagcacactttctgacgaagagaggaacaaaggtctgatcactgcatctgcaggaaatcatgcccagggtgttgcttatgctgcacataaatatggagtaaaagcagtcattgtcatgccaactaccacaccactgatcaaggtagagcgcaccaagagttacggtgcggaggttatccttcacggcgacgtgtatgacgaagcctgcgcacacgcacttgcccttgcagaagaaaaaggatatacctttatccatccatttgacgatccggcagtagcaaccggtcagggaactatcgccatggagatcgtacaggaacttccgcttgtagattacattctggtacctatcggagggggcggacttgctacaggtgtctctacacttgcgaagcttctgaacccacacatcaaagtcatcggtgttgagccggcaggcgcagcatgtatgaaggcatccctggagaaaggggaggtcgtaacgcttcctcacgtaaatactatcgcagatggtactgcagtacagactccgggaaaaaatatcttcccatatatccaggaaaatctggacgatatcattaccatcgatgatgatgagctgatcgtggcttttcttgatatggtagaaaaccacaagatgatcgtagagaactcaggacttcttactgtagcagctctccgtcatctggatgtaaagaataagaagatcgtttccatcttaagcggtggaaatatggatgtgatcaccatgtcatcggttgtacagcacggactgatccagcgtgaccgtatctttaccgtatctgtacttattccggataagccaggtgaactggtacgtgttgcaagtgtgatcgctgaaaatcagggtaatgttatcaaactggatcataaccagtttgtaagtaccaaccgaaatgcagccgtagaacttcggatcactatggaagcattcggaacagatcataagaatcagatcgttgcagctctggaaaaagcgggttgcaaaccgagagtggtacgtgctatactgtaggacgtgttatattgcaataactgaaacttctgaccggactgttgcatatgatgtaacagcccggtcttttgcgaaaatacctgcatagacagaaaggacagataaatatgtgtggaattgtaggatttacaggtagacaccaggcagctccgatccttttagatggactctccaagctggaatacagaggatatgattccgctggaatcgccgtacgtgacggcgaggacgagacggaagtgatcaaagccaagggaagactgaaagttctgtcagaaaagacaaacggcggagagactgtaccgggaacctgtggtatcggtcataccagatgggcaactcatggtgaaccttctgagaacaatgcacatccgcatatgacagacgacggtaatatcgtagcagtccacaacggcatcattgagaactatcaggaactgaaaaataagctcacccgtaaaggctatactttctattctgagaccgataccgaggtagcagtcaagctgatcgattattattacaagaaatatgagggaacaccggtggatgccatcacacattccatggtacgtatccgtggttcctatgcccttgcgatcatgttcaaggattatccgggtgaaatatatgtagccagaaaagacagccccatgatccttggagtggcagaagatgaatcctttatcgcttctgacgtaccggcgatcctgaaatacacccgcaatgtatattatatcggcaatctggagatggcgcgtgtgaaaaaaggcgaagtcaccttctacaatcttgatggagatgagatcaagaaagagctgaaaaccattgaatgggatgcagaagcagcggaaaaagccggatatgagcatttcatgatgaaagagatccatgaacagccaaaggcagtactggatacgttgaattccgtgctcaaggatggaaagctcgacctcagtgaagttggcctggaagaagaaagcatccggaacatccagcagatctatatcatagcctgcggctccgcgtatcacgtaggaatggcagcacagtatgtgatcgaggatcttgcacagatcccggtaagggtagagctcgcttccgaattccgttaccgaaaaatggcccttaacaccaacagccttgcagtgatcatcagccagtccggtgaaacagcagacagccttgcagcacttcgtaaatgtaaggaaaatagtattcgtacactgggaatcgttaatgtagtgggatcttccattgcacgtgaggctgataatgtattttatactctggccggaccggagatttctgtagctactaccaaggcgtacagcacacagctgatcgcagcttatacactggcgatacagtttgcaatggtaagagggacgatcacagaagaagcctacagtaattatatcagcgaactgcagacgcttccggataagatctgtaagatcctggaagataaggagcgtatccagtggtttgcctccaaacaggcaaatgtaaaagatgcctttttcgtaggaagaggaattgattatgccatcagcctggagggcagcctgaagatgaaagagatcagctacatccactctgaagcctatgcggcaggagagctgaaacatggaactatctccctgatcgaagacggaactcttgtgatcggtgtgctgacccagccggatctctacgaaaaaaccgtcagcaacatggttgagtgcaagagccgcggtgcctaccttatgggcctgaccacatttggtaattacaatatcgaggataccgcagacttcaccgtctacatcccgaaaacagacccgcactttgcaacatccctggcagtgatcccgcttcagcttctgggctactacgtaagcgtagccaaaggcctggatgtggataagccacgaaatctggcgaagagcgtgacagtggagtaaaaaatatatatggactatagagaaagcctcagagtatgtatatgcgaaaatactctgaggcttttttataaaatctttacgcaaaaatagtttcatggtatcatatagacatatgatgctgtgaaattattttgcttttcaggggatattaagaaggggtgacgggtacatgcttatgccggtagtgccagagaggagattgaactgaaaccagagtgcccggacagccatagagcagataaaggagaaaaattatccggagtctttacagaaatgtacagggaatatcctggcttgtggggatcaattataacaaaccaatcaacagtggtaagcttttggagctgctgtcacagtacaaataataagataggaaaaaatatatgaagaatacagtggtgatctttaatgccggtatcggtgcgctgactcttggttttcaaaatgccggttatgagattttgaaagcatatgagccggacagaaaagtgatagagatctatcaggaaaatataagtcaaaatgtaactgcatgcagcctttcttccatagatcctgccacagttccggacagtgatgtctgggcttttgatctgacgcagtcgaaagcagaagaggtgttttatagtttgaccctggtgcaaagaagacgaccgccggccattctttttgttatgaaaaagcaattatggaaagggttcataaaggagcacatttttcagctgcaagaatatggataccatatcacgcataaaaatatccagagttcggaggttactgcatttccgctgcgggaagaatttgcatatattgtttcaaaaagagtgaatgcttcggatatgatcatgccggtgcaggtccataagagtagtatcctgttggatggctgggtggaaatgaatccacaggattcctggtattacagaattgattttgcgaaagagaagattgatgcttcgcatgccggtgacagcgttttgtgttgggaaaaaggcggttatcgggaatccgggcaggttcgcctgaatctgataaaaatgccgctgatccgtatccatggcgtctatcataagatcacacacaatgaaatagccagattaaagggatttccggaagattttccacgttctgtgtcaaacaaaagccgaatgtacagaagtctggtatatgcgccgaacataaaagtgacagaacaagtcgttcgcaatctctgcgtagaaccctatataaattcagagggtgatgtgcagatgaaaaactgggaaaatatggcccgctttaagcagctttttgaaaaataccttacatataaaggggtttctttccaaagcgatgaatgggtctttatgaccagaatgtacagtgattccaaagaaatcgctacacttaaacggttgcagagttatagccgtctggttggaaaagcagtgtcagatcagaaaaaggatctgccattacaaaatatctgtgtagtggcgaatctggtctctgatgagactaagagaaagtacgaagaggcgaagcttggatatgtctgggacatccgaaatgtgctgtggctctttgaggactatccggaactgaagaacgaactgatctcgattctgaattattcggtggaaaacatagaaccggagagaccggagccttttatctttgaggaaagcagccagatggagaatacggatccggaatcggttgctgacagctatatagcgcagttaaaagtgttggagaccggtagtgcagctttcaagaaatatgaggaactttgtgtttctattctgaaatatatccttggagaatatctgactttgtgggagcagcagaagacaacagaggaaaatctgtatcgttttgacatgtgctgtaagatcaaaaacggggtgacacaggatttttttgacacgatctgtaagtatttttctacgaagtatatcgtgttcgagtttaaaaactatgaaaagcctattactcagagggaaatttacactacagaaaaatatctgtacgaaaaagctctccgtaaagttgcgatcattatttccagaaaaggagcggataaacatgcgaaaatggctgcacggggaagtctacgggaaagcgggaaactgatcatctgcctgtccgatgaagatttgaaagcgatgctccagataaaaaaagaaggggaaaaaacaacgggagggtatttggaagatattttggatgatatgctgatgcgcctggaaaaatagaaaattttgtgaaaaataactcaaaaatactcatttcgaaggcagagttttggaagatgatccgctgccttcgattttttttattttcgaaataaatctgttgttgtaatatggaaattgatgtggcataataaatgggaaaatgttaaaaataagaaaaatccagattaaggaaatgtaaagttgcattttcaggataacatggctcctgacaaattatgacaggaagcgagtatgacaaaggagaaaattatggcaattttttcaatgatcttatctttgttgtgtggagtatcattatttttgtttggtatgtccctaatgggcgacggtctgaagctggcagcaggtaataagctggaagcatttctttataagatgaccaatactccgctgaagggtgtcgcacttggtactggtgttaccagtgtgatccagtcgtcttctgcgacgacagttatggtgatcggttttgtaaactccggtatgatgaaactgaaacaggcgatcggtatcatcatgggagccaatatcggaaccagtattactggctggatcttatgtctttcttatattgaaggatccaatggaatcgccagtgttctttccacagcaactatttctgcggttgtggctgtagttggtattattttccgtatgttctgtaagcgtaccttacataagaacgtgggaaatatcatgcttggttttgcgatcctgatgacaggtatgcagatgatgagtggtgcggtatctccattgcgtgagagtccgatgttcatcaagatgctgactatgttttccaatccgattgcaggtattctcgtaggtatcgcttttactgcggtactccagagtgcgtctgcaacagtcggtgtgctccaggctctttccgtaaccggtatcctgacatttgcaagtgcatttccgatcgttcttggtatcggtgttggtgctgcatgtccagttctgatctcagccatcggagcaaataagaacggtaaaagaacggctcttgtatatctgatcaatgacctgtttggtctgatcctctggtcggtaatcttttataccgtgaatgcgtttgtacattttacatttatggatatgaccatgacaccggtagcgatcgcacttttgaatacggtgttccgtctggcaacggttatcgtgctgttcccgtttatttcaaagatcgagaaactggtatgctggcttgtgaaggatgacaaagaagatctggaagatgaggcagactttgatcttctggaagagcgtcttctgaattacccggcccttgctatcgcacagtgtcaccgtgtaatgaacggaatgtccaagaagctccgtaagaatgtcaacagagccatgaatcttctgaatgattatcagcaggataagtatgataaggttcagcgaaaagaggatctgatcgacaagtatgaaagtcgtctaggagagtatctgatccagctgacaaagagagagatgaattctgcacagacaagacagacttcactgtatctgcatacgatcaatgactttgagcgtatcggtgatcatgcttcttacattgctcatatgtccaatgaaatgcatgataaccatacgaatttttcacaggaagcctgggatgagctgaatgttgttatggaggcagttcgtgaggatatcaatataacctgcaatgctttcatgaaagacgataaagaaatggcacagagagtagcacctctcggagctgtgatcacaggactttgtgatgtactgaagatgcgtcatgcagagcgactgagccagggcaaatgcggactggaagagggaacggtatttagtgatatcctcaacagtttctgtcgtatcgcaactcactgtgcaagtgctatggtggcacttatgaagagcggagagacaggatctgatcttcatattcacgattccaagatctatcctacaaacagtgcggactactaccagtatttcaaggaatacggacagaaatatgatattggaaatcaggaaggccatatgctcagcatggagccggaagaagtagaataagaaattcaggcagcggaaatgtagatattccgctgccgtttttgttagggatttgccctaacaatgaaaaaagaaagggctgtcgcactaattttggtgtgcgccccgtcaagtagacaattaaaaaaatataggttttttgctacccagatcatgctgggtagtatttttatgctgccataagcatgtcatggtattccattggagttagaataccgagacctcgttgaggtctgtcg

SEQ ID NO: 201 - DNA, 16683 bp, Unknown
  gut microbiota DNA sequence
cagtgcttcctgcactttctgtaaacgcatatactctcgctccttccacgccgaaaatctttctttatatcaagtatagcatgttgtgattttcgacacaaggaaaggatgaaagtggctgtgagctacggatatctcaggcccagtagagtctcattccaaactcatggctcatacggtccggatgcccatcaactcttgaaagcaaagtacagatatcctgataggtattctttgccatacatttaccgctattatcagaaagaattagtgtaaggttccacttcttgccttttccgtattctttctcaaaggtttttaccatgacacggctgtctgccggaacttctgctttaacacttcccttttccaccagttctccgttcaatgtttctgtaatgatccatgtaagttcacactctcccagagctccatctgtatcatttacaatatacagactgtccagatgatctttgtgctttgcaaaaacacccactggtgcgttgctttccagtatagcctgaagaccctttttgggaattccccaccagtcatataaaccgtagaagctctgaggacacaggtcgataaacataaactgtacatatcctgagcaaggttcatatttctggatcctgtaatgctctgtataatatttcagaagcttatactgatattcctggatcttcgggatatcatccaccagtttttccagacgataatataccgccggaacagttttcagattttcactgctgcccggtgcatcaaatccgtactctgtattcagcttttctgtctgctcataaatatctgcatattctccaccgcttaaagaacccagataattgtggctgtccccgctaagcggatcatcttcgcagaaagaacccttgatgatcggtctgcccggatccatcttctgtacctccctatacagagcaggtcccggattttcctccataaatctccttctcacatttccatccggatcaacacatcccggttcattcataatgatccagcagatcagagacggatgatgcttcagaagtttcacattttctctgtaaacatctgcaaatctctgcgcccattcatctgttgaaggatgcgtccagttgtactccgaatcctgaagaactgcaattcccagctcgtcacacagatcataaaaaacttcctgctctgtgtggacatgtactcgtaccaggttaaaacctgccgcctttacattaagaagatctctcaggtaccgttcccttgtcattgcggaaatataacaatccggaaaataagaggttcctcttatatacagcttcctgttattaagccagaatcttgttattttttcattacgctcaatctgaatgtcccggaaagcaaaattcgttgttctgctgctcagtatgtcttttcccctgcttaacgtaagttctgcctgatacatccagggataaccatgatcccatgtggaccacagtctgacatcttccactttaagctcacatttaaagcctgtctctgctttctctgccattatctgaacagttttttctgcctttataagaccggactctttttcccggatctttacattaaaatcatatgtctccccggatttcagacctcgcgcttcagtttccacatatacgtctgctttctttccatctggatccagttcatacttcagatctgtctgatcttccagaacaccttcttctgtcaggatcagctccacttttccgtagattcctacaggatttacatctctctggataaatgtatcagaatgttcgtaggtaccttttaccatatttctttttaccagggtggttctggaatcctgtgcatccagctccacctcatcatcccatggagaacttacctttacaatgagataatttttctttccaaaaacaagcttatcttttacattaaaggaaaatggagcggaatatccttcatgctctccaagaaattctccgttaagccatacttttccataataatccacattggtaaatttaaggacagcatccgtaactttctgatccggaacttcaaactctgttttgtaccaccagggtgcctgattgaaatatctcagttcacgcccgaaatatggctgtctggcatagataagctgcagatgtttcagttcctccagttcctcccattcagacacctgggaacctacggaagtatctgcttccctggcagcataaagcccgatcttttcccctgtatcatgaacatcctgcaaaattttccatccttgtttcaattcaatccttgtttccatttcagcctcctaactcttgaccgcacctgcagccataccttcgattatgttcctgttaagaataaaatacacgatcagtgtaggcaggatcgatattacgatcgccgcaaatgtacttccccagtccactcttccgaactgccccacaaagtcattcaggccaattggaagagttttcatatcagaagatgagataaacgtattggcataggtaaattcattccatacaaaaacaaaattgtatgtaagaactgtcattgtagtatttttagccataggtaccacgatcttgcggaatgtggttcccattgtggcaccgtcaataactgccgcttccagaagagaatccggcataaatttaaaaaatccggtgtaaagatagatacacattggaagtccgaacccgatctgcggaagcaccagtgcccagtatgtatttctcagtccgatcctgttataaatctggaacatgggtacaaggcaggaaaaaataggcaccatcattccaaacaggaaaaatgccatcagtgcattggcatattttacctttaccttactgatcacaaatgcaaccgggcatcccaggactacgatgccaagaagtgtgagaactgccacaaccgtactgttaagaaaatatcttggaatggatgagatcgtcagtgcgctgatatagtttccaagataaaatcctgatggcagggcatactgtgcagtatatgtcatttcatccggtgttttcagactggagcagataacccagaaaatagggtagacctgtatcatgacaaaaataaggatcactacatagaacacagcacgaataggtatattttttcttgattttatcattctgacccatctcctttcgccgatcccaggcatttctgtataatccctactgctaccagacattcaatgaccagaaaaacggacaatgtacttccatagccaaagtcagccgaattaaaagcggttttatacatataagttgccaccatctctgttgatctggatttattgtcaagaatatagaatacatcaaaggttttcagacaaccatttacaagcattacaatgacaatgctgaatatatttttcaccagtggaagctttatgtaacgatactgttgaaaaacattgcagccatccattgtagatgcctcgatcacatcctttgatatggatacaaatgcggaataaaaaatgatcatgtacagaccacagtatttatatccatcgatcagggttatggttatcagcgctgtatgggaatttgccagcaaagcgataggttccattcccagtttttccatcacatagcaaaccagaccctggggctggacagaaagcattttggaaaaaatctggcagatcgccatagatgaaatgatacatggaataaaataaataacccgcagaatatttccacccttggaaatatgtgtaagcaaaatcgccaggatcagtcctgcacataactggaacagacttcccagtacaacaaatttaagattatttacaacagcctcacgaaatgtctcatcctgaaacatcctcacataattttccagtccgataaacttcatatcaccgattccattccaggaaaaaaggctgtaacccattgaccacagaattgggatgataacagtaagaatatatatgaacagtgcaggaagaacaaacggtaaaggctggattttatttctgggcttcatatcctctcccctttcatacgcagatgcagataaaattccgcatctgcgcattctatcagttattcttcagtgtcaaaataatcagatgcatactgttctacagctttgtccatgttttcacagaactcttcaggagttgattctcccattccaaggcttgccagctcttttctgtaaacctcgtttgtagaaggatccagacgaacatcccagcactgggcaaaagtgccacagttctcaagatcacttaaaatctgctgtgtaagctccggcagcttctccgaatcacttggcatcatggatggaagcatattgaactcatacattgccgtatcagcaaaattatcccatacataactgatgaaatctttcatctcatcactcatggaatccttgagaatggcagttccgattccacaattcgcatagtaatcattttctcccgtagcggttccctcgctgtctacaggaagtttgaacatggaaatatcatctttaagatttccctcatcatctgtaagatccggtgtatcccatgttccggtgtataacattgccgcaccactgttcagaaacagatccatctgcgcggtagtatctgaacttgtccatccttcactgaaatactgggctatatcctgtgtatactgggctgttgcgatacctgtctcagaattaaatttttcttttcccattcttgcattgtcaatgaagtcatttccttccagtctgaaagccttaaatgccggataacgcatgatcatgtcgtaatttcctgcggatatcggggtcattcccgcatctttcagcttcttgcacacatccaggagatcttccagtgtctggggtgtttcagtaattccggctttttcaaacatgtctttgtgataccagaaatactctacatttccctgccaggtcataaggtaattgcttccgtcactgagtttcggataatccagtgcaataccaaagaacttgtctttgatacccagttcatcataaaggtcatccacactgtagatcagatcttttttgcaaaggccttcaaaaaatgcctccggatctgcatcaaaccagtccggcaactcattgctggatgcaaggatcttgatcttctgaagatatgtttctctgtctgcaatagactctacattgaattcaaaatccgggtgatcttttttgtaatcttctgcaagcttcttcaatgtttttaacgctgcatctgtttcgcctctggcactgatataattgatcacaagtggttcggaatcctcttttttatctgcccacacattcatcatgctgaatgaagagagacacatcattgtggcaagtgtagcagccatcactttttttaatttcattttcgtcctccttttggtacatttctattcatccggattgaatattttgttccgctttccttatcgatgagaccattatattaaatccgtccggaaaaatacatggaaaatcttcgctgtacctggaatattttctccaataatttcccaacacttgtgagaatttttcccttattatataatgtagccaataaaatcaggagggggattccatgatagaaaatctgaaaaaaaaggcgtttcaattatttttaggaatcagtctgaaacgcaggctttttattacatatctgctgctcagttctctgatacttatgcttacttccgtgtttttttatactgcctccaaaaaagtactgatcaagcgtgccgcactttccagccagcagcagctatccctgatcaccagcaaccttggagaaaagatcgatcatatatcaaactatgccatcaccctttccatcaacagcaatatcgccgatgttttaaaagaaaaccctacagttcccaaaaacacactggaacattttctggtaaattccgaacttacagaccaggcccagcgtatcatcggacttcacaaaaacatctatgcctgggatatcctggatacagaaaaccactggtttcacagcagtaccacagaaacagatcagcttgattccattttagatcccgaagtccttgacagccttcagactaatctggcttttcagtttctcggacccttccagataagcggggagccaacctttgtagccttaaaaagcattacaaacattgataacaccaaatatctgggcgccctggtccttctgatcagagaaacaaatatttcctctgcattccgcgaccttccggacagctcttccagggatttctatattactgatgaaaatggacagatactttcctcttcttcatccgaaggtatttataaagacttctcatcctatacaaaaatcagttcagagaattataaaaccctgacagaaacctacaggcagtttttttccgtagacggcactaacactctttttatctgcaaatcctatcctgacctgaactggaatgtgatcaacctgattcctctggaaagtctgcctctggatcatatggtgatcctgcacaatattcttctgatcagcattgtagtgtttattttatctgtatttttttccatattatgtacaggtactgtcaccgcacctatacagagacttgtagaaaaaatgaaatctgcgtctgccggaaagctgaatatttctgccagttactcttcaaatgatgaacttgcagttctctataaccagtttaaccttatgatgcagaagatccagacattacttaacgatatctatgaggaacaaaatgccaaacagaaaatggaaatacgtcttttacagtcccagatcaatccccattttctttataatactttaaacaccatcaagtctctcatagaacttgacatgaatgataccgcagtaaaagcagtgtctgccatgtcatctttctacagaaactctctttcaaagggacagtttatcattcctctgcgccaggagctgcttcttacagaacagtatctttatatccagaatctgcggtatatggattttgttgattacgagatcacctatgagccgtcctgggaggatcatggggcagagatacccaagctgaccatacagcctgttgtggaaaatatttttgtccacggacttaccagccagatatgccatattcacttaaatgtttctatcagaaatggtaccatctgtatttctgtttctgataatggttccggtatcccgccggaaaaacttgccgaacttaaccgttctatcagagacttcaaaactgcccgacattctttcgggcttccaagtatcaaccacaggattgctcttctctacggtgagaattacggactcaccatcgaaagttcacctgaaaagggaaccactgtaaccatagtaatacctgacaaaaatctgatcgagggggaaatataaagtgaaaacacttgtaattattgacgacgaagtttttttcagaaaatctctgatcaattttcttgaaaaacaaaacctttataacattgcaggggaagctaataacggacaggccggaatccggcttattgaaaatgttaaacccgatattgcccttgtggatatatccatgccggttatgagcggtctggatatgatcgcagctcttggaacagactgtcataccaggttcatcctttccacaggatacgaagattttgactatgccaaaaaagctatctctcttcaggtccgcggatacctcctgaagccattggatcaccgggagcttatggagacactccagaaagtaagtgacgagatcgatcaggaaaattccagaaacagttatgtgaataattattttcagttccgcgatctgtatacacggcaaatgcagcttaatttcttccagaaggtgatcagcggaacaaccatttccccggatgatctggaaaaaattccggttcataaaacttccgattatcttaccattcttatggagatccacaatgccaatccggaaatatgggatgaaaaaggtgatttttctctgctccacaccatcctggaaaatatatgcagggaaatcttacagcctgtgtgcaaagagcttatttacattgactattctcagatgagacagtatatcatcatggaaaaaagctctgatttttcttttaccgatctggaacaatcctgtctcagacttgccgggatatatgataatatcgcacagatttccacttttttctgctgtggaacacctcatgaaggcgtggaaggaatccgctattcctatgaagaggctctttctgtttttcataacagaactgcgtcttcttccggatttctttatttcatgccccagtcccattccggtgattttacattaaagcctctggtttataatgatatcctgatctttctgcgccagcaaaattcaccggctctctgtaaatatattgatgaatatttcaacgatatcatcaccaaaaaaatccatatccggcagacctggagtgtagctgctgcttttcttactgtacttgacggttttatcacggagtgcagtcagcgtgaaacgctttttcctcttctggaaaacgccctgaatacttaccagaactgccagagtgccctgcagttaaaacaactgctccagtctacctgcaaggcagttctggattctcttgctgatgaaaaaaatccgcggaagtcagctcttgtatcccaggttcaggaatatatctgtctgaattttaatcatccggatcttcgtcttgaaaccattgcttcccatttttttgtcaatccccagcatctctctgctgtattcagtcaggaatccggagttacacttacctcatatatcaatgtctgccgcatgaaaaaagccagacagtttcttctggaagacagcccttccattcaaaatgtagcttctttatgcggattttctgattccggatatttcagcaaatgtttccggaaatattacggaatctctccaaaaaactttgtatccctgactgaaaagaacagttatccaggttctatcggcatatgatctttatctcattaaagcgtaacgtttcaccgctttatctcattaaaattacattttactctaacatatgttttatgtaaaatgcaagttctttttattgtgcaatatcccggaatgtgttaagataaaacctgcgactttatacaaatagcagtttaccatactgcaataatgaggtgagttatgaaagaaagagaaaaacttggatcccgtctgggattcattctgatttctgctggctgtgccatcggaatcggaaacgtctggaaattcccttacatggccggacagggcggtggcggcgcattcgtactgttttacctgatcttcctggcccttcttggacttcctgttatgactatggagttttctgttggacgtgccagccagaagagtcctgtcaaagcatattacgcactggaaaaaccaggacagaaatggcacatccatggatatatcactctgatcggatgttatctcctgatgatgttttacaccactgttacaggctggatgctgaattacttctatatgacagccaccggtaaattccagggacttgattccgacggtgttgcaggacagtttaccaacatgcttggccagcccgttactatgggattctggatgatcgttgttgttattgcaggtgtttttgtctgctcccgcggtcttcagaacggccttgaaaaagttaccaaggttatgatgatctctcttctggtgatcatggttgttcttgccatcaacagttttaccatggatggcgccaaagagggactgaaattctacctgatcccggatttcgagcgtatgaaagagatcggtattatttctaccattaccggtgctatgaaccaggcattctttactctcagccttggtatcggtgccatggcgatcttcggaagctacatcggaaaagatcatgcactgcttggtgaatccatgaatattgcgcttctggatacttttgttgcgatcacctccggacttattattttcccggcatgtttcacattcaatgttgaccagacttccggaccgagcctgattttcatcacactgccgaatattttcaaccacattccgcttggaagactgtggggaagcctgttcttcatctttatgtcatttgcagctttctctaccatcctggctgtatttgaaaatattatttcctgcggtatggagcttaccggctggagccgaaaaaaatccagtcttgtaaatgccattgccatcatccttctgtctctgccatgcgtacttggatacaatgtatggtcctgggactggctcaaggtattcggcggcgcaattctcgaccttgaagattttctggtaagcaacattctgctcccgcttggttctcttgtatacctgcttttctgtgtttccaaacggggctggggctgggaaaacttcacagaagaagccaacaccggaaaaggcctgaagatccggaaatggatgcgcggatacatcacttatatccttccgctgatcattctgtttatcttcttctttggtctgtacgataagttttttgcataaaataaaactttaaataaaacacccctgacggatatcgtatgtgatttacacacgcgatttccatcgggggtgtttttgttgagtcaggcggatattcacagcctgcactcttcccgatacaagcaagtcccctcaccgcgtattgcttttcgtaattaaagcagggaacttacttgattcagttaagaattttacctgcctagcagctccagtacttcctctctgctgatcaaagcctggccgattccctctccgcttaagatttcatcagccagttccctttttctttcctgaagagcccggattcgttcttctatagtgtctttcataaagaggcggtagacactgacaacgttctgctgaccgatgcggtgggcacggtctgttgcctgattctgcacggcaagattccaccagggatcgtagtggatcacaatatcagctgccgtaagattcaggcctgttcctcctgctttcagagaaatgcagaaaacagaagtatcatcctcattaaatgcctgtaccatctgcgcacgtttttccttggaagtagcccccgtcagcatataaaaagaaacctttgcttttttcagacgggcagccagcacatccagcatggtagtaaactgggaaaacaacaggagcttatgtccgccattcaccgcattctgaaccaactccatgcacatctccagcttggaagaattccctttgtatccttcatataccagtcctggataacagcagatctgccgcaacctcgtgatctctgcaaggatctgcagtttagaagtgcgaaactccgcatccgactgcatcccaagcatcaggcgaagccgttccgtatgggcctcatacagctccttctgctcgctttccaacggggaaaacatatctttttccagcttatccggaagatccttcagcacatccctcttcaatctccgcagcacaaaaggacggatcattttctgcagacgctctatcgcatcggaattgctgtactgcacagctggaagctctatttccttgcggaatttctcataagaatacaaaaatcccggcatcagaaaatcaaaaatactccacagctcactgagcctgttctccaccggtgtaccggtcagcgcaagcctgaatcccgaccggatctctttcacagcctttgccacctgagttccgtgattcttgatatactgcgcctcatcaatgatctgcacagcaaaatccaggttctgataagccttcagatcccgtttcagaaggtcataggaggtgatcagaacctcccgttctcccgcatttttgatcagtgctttcctctccttcacatcaccagtcacaacggtagccggaagtcccggcgcaaaacgttcgatctcgttcatccagttaaacaccagcgaagcaggcgttatcacaagggcacgtctgttttctcccggcgcagattcctgaaattctgaccagagaaatgtgagcacctggagggtttttccaagtcccatatcatctgccaggatccctccaaactgattatgcttcagagttttgatccagtaaaagccctctttctgatagccccggaggattttttcctgctccctgggaatctgaaatttatgttcttccattgtctgcatgttccggatcagcgcacgaaaggcattgtccttctctatcttgatcagatcgccgcccttcagctggctgtccagatacatagcacgataggccggaacctgagtctttccttttttcagttcacgatcactgatctgcagtccatttttcagagcagaaagctccctgagctgaccatcggaaacatccagaaagctgccatccttcagacggaaatattttttcctacgatcgtacctggaaagaatatcaaaaagctgcgcctgatccatcccctccacatccagatccaggttcagaagtccggctgacagagaaacgccaagacggatgtttggcagctttgtcacccgcatctgtttgatggactgggaaatatagacagctgcaactttctgcatggcggggatcccttcagtaagaagctggtagagcttttcttcggaagctttcacactgtcgggcttccctgaaccttccctgcacaaagattccagttcctcggcacgacaatccaatgccagctccatccgctggtcatcatatccgttaaaatattttgacagcagcgcaaacacaccaagctctcccggaatatccctggtgcgggcggacacatctcggtcaaaaaccgaaaatttatccttcccgtaaacagaaaatgccttacaggtgatccagtcacgctccggcgcatccagatagatctcatatgcagccttgtagcattcaagacctgtttcttccgggaaatccctgagatcacagtgaaaaaattttttcagggaaggaagcagctcacgcacaaacgcaggcacatccggttcatcaataaagcctcggcctgcaggaagccgctccagacaggcaacaaattcctccactgctccaagctcctgcctggaaaccagatataccttcgcattatcaaaatacatatgataccgtatgcctgtcacactgtataccggcgcgatctcaagagataacccctgatccttcttccggatcatcagcgtcctgtccggaatttctctgacagaataccatgttgtttccggatcattgttcattttgaacttgaaacttttttcgccaagtataagaagcaaatcctcaagttcttttctgtcaacggtaagatccctcaccttttccacagctatattcttcagctgttcatatctggacatgtaagtgccgtgatgattctcgacccattcccggataaaggccagcacgcttctggatccttctgaaaaggcttcatctgaatggataaattccagatttttcccataagaaaccttctcattatgatccagattccacacaaaggccaacacatccttgaggatatattttttctcacagccaacgcggaattccacggtaaaacaatttctcacagaattaaatttcaggcaggtttccagctccaccctgccaaaatacggatccccggaaaacggaagcatacggctgtatagctggcgattaaggaggcttttcagctcaacggtggttttcgttgcaggctgccctggtccggataaagcagccggaaatgctgttccgctgaatgactctgcctgcttctgttcctcatcctgctgtctgcggatttccacacgctcataggccttacggtctccatattccagaagcactgccacgcaatgcttacagattccggaatagctgcgaaaggccgggcagtcacagtatgcttcttttatgctgtctgcttctgtatcatactgaaagcctgtattgtatacattacgcccacttcccttcactgctgcagatattttatccacagctccttccgacttaatatccagcgactggatcctctttccggtacgataaatatcaagacctctctgatatgccgttgtattacaaagtgcccggatggctgttcgtttaagcatgtatctttcccttcttttcttatcgcgtttcttccattataaaaggagacctgcactgtgacaagtctccttatagtactcattgatatctcattcctgatctgcctatagcatttccataaaatcccgcatcaggttcagctgctctgaaatgaattgctgcatcagacgttcccgtcatacgttggtacagataactttctcagcaggctttccttcttgcttcatcctctttccgctcttctccgacttctgtcatcagatacggatcaagaacctcttccagctctttctcagtcatgatcccttgttccagaacaagttcccggacagacttgccggtttttactgcagtttttgcgatggctgcagacgccttgtagccaatatgcgggcagagagccgttgcgattcctgcactgctttccatcaggtctttgcagtgtttgcggtttgcggtgattcctgtgatgcagtttacgctcaatgtatccactgctttttccagagtcgtaatggattcaaaaagattacaaaatacaaccggctcaaaagcattcagctccagctgtccggcttctgccgccatggtaatggtggtatcatgtcctacgatgtggaaagcaacctggcttactacctccggaatgaccggatttaccttacctggcatgatggaagacccattctgctttgccggaagattgatctccccaaatccggttttcgggccggaagacatcagtcgaagatcgttgcacatcttggaaagatccaccgcacaggtttttactacaccggatacggcaacaaagccgtccagattttctgttgcgtcaaaaagatcctcggcctgtttcagcggataacctgtaagcttttccagatttggcacgatcttataaaaataagaatcggaaacgttgatagcagttcccactgcagttcctccaaggtttacggtgtacatttccctgtgagccttttcgatacgtttcctgtctctggaaaccatggacgcataaccgtggaacacctgaccaaggcggatcggaactgcatcctgaagctgtgtacgtcccatagtaatcacatcatcgaactcctctgccttttttgcaagctccttctcaagtcttaccagtgctttttccagaggtgcaagaagatccagaacggtaagcttaccggccgtcgggatcacatcattggtggactgcgccatgtttacgtgatcatttggatggaccattttatagctgcccttcggacatccgaggatctcaccggctctgtttgcgatcacctcattcatattcatatttgcgctggttccggcaccaccctgaatagcatctacgataaattcctcagccaattttcctgcgatcacttcatcacaggctctgacaatggcgtctgccttatcctccggaagaagccctgcattattattagtgatagctgctgcttttttaatctgtgccaggttcctgataaataccggatgaagctttgtacctgtaataggaaaattctgttttgcccttaaagcctgaactccgtaataagcctctgcaggcacttccatagttccgatcgaatctgcttccagtcttgtttctgttttcattttgtcatccctcttctttcttctgatcctgtgcacatctgatttgctccgctgtctgatctcatctttttcattcgacggatattcgctgttttcaaatcattttgttattttcatttttatcagcagctgttttctgatgcctaagaaactaacactttctttgtggcttgtaaatacttttaagggaaaaccatgattatccgtgtttttcaatagtttatattaatctttttaagagtttcttttatttttcttatttttattaagtcgtttcttgtgttgtgataacacacgcagtataatcaatacagaaatacctattttcaatccacttccctacgtagctctgtaccagttacaaataacatttttcatcgaaaggagatattctacatggaacacaaactcgacaacatcgaccgaaagatcatcgaaatgcttcagaaaaacgcccgcaccccggtaaaggaaatcgcaaaggaagtcttcctctcctcccccgctgtctccgccaggatcgaacacctcgaaaaaaacgggctgatcacaggctaccatgcccagatcaacccggtatttctcggttatcatataaaagcattcatcaacctggaagtagaacccaaccaaaaaaaagacttttatcccttcatccagtccatcccaaacgtcatcgaatgcaactgcgtcaccggcgattactccatgctcatcgaagtagccttccgctccaccatggaattggaccacttcatcaacgaactccagcagttcggccgcaccaaaacacagatcgtattctccaccagcgtagaacacagagatctgccggtggagtaaccacccaccggcattttttataaaccatatcacatcgctctaccag

SEQ ID NO: 202 - DNA, 24567 bp, Unknown
  gut microbiota DNA sequence
tgtctattccaaatatcaggaaaaataagctggaaatcaaaattgttccaacagctccccaacagtaaaacgaatggagcagactcatagttgcttctttgttttcaaacggacaggcctcgataataggactgcaaagtacttctattaaaccgcttccgatggcataaacaataacactacatataattccaataaaaggatcaggtaaaaaatcaggtaaaaatgccagtccaagcagacccaatgcagcaaatatttctgatgcaacaatgcacacacgatatccgatatgatctacgaatttggcacagaacagatcaaccagaagctgtgtgaaaaagaagaaagtggatatcagagcaatgttaccgagagaaatatggtagtcactgtgaaatttcaaaaaaagaagcggtgcgaagtttgccgcaatagcctgtgtgataaatcccatataacaggctatttttgttttatggtagttagttttttttacagcattcattttttattttcctctccgaatgtttttaacagttttatgttcaatcttcacattcatcaatacttctacaaaaaagtctgttctgggtggtgcggttatttcaattttgtcgccctcaatgttgatctcactttcattcatccatttaaaaatcataagaatacctcttttctttttttacttgattatatagcaaatatcagatatatacattgaattaaattgtagaaatactgtataatatcgtaaaaaagaaagaacgtgatatgggatggattataataaaatacttacagacgaggagttcatggaaattaaacagcatggaagcagtgattatccattccagtattattatgataatctggaattgtttgattttcattgtattgagtggcactggcacagagaatttgagtttttatatgtcgagtccggacaagttacatgcggaataggagaaaaacagattatattgtcagaaggagaagcaatttttattaattctaaaatattgcaccgcttttacgcatcatcaggtggtatcattcctaactttgtatgtatgccggaatttattgcgccggagaacagcctgatctataagaaatatatcttgccaatcatttcatcgaatatatatttccagcgttttcagcctgatgaactatggcaaacaaagatcatacaaactatgataaaaataatggaaatacagaggaatgagaaaataagagaacttgctactttggcattgctgcaggatttatggctgactttttatgaaaatgtaaagttatctgataaaggagatgtacagacagtggatgaagttgcacagaaaagggtgcagttgatcatgcaatatatacatgaaaactataatcgcaatttgtctctggatgaaattgcttcgcatataggaatcagcaaaagtactgcacttaatttgttccaccgttttttacatactacaccggttaattatctgataggatatcgacttcaggcagcttcctggttattgaaaaatacgaataaaaaagtaaaaacgatcgcttatgaaagcggatttcataacgttgattatttttgcagattgtttaaaaaacgttatcatttaactccatcagaatatcgctgcacatgtttaaaagtgttgtcggctgatccgagtcttcagatctgtaaataaagccgatgcaggactttcggaatcctgtatcggctttgttgattttgtaaaggctttgaaaaatttacttttactggttcatcagtgctttgatatcttcttccggtgtggtgataggtgcaataccataattttcaaccagaaagttcagaatattaggagaaaggaatgccggaagagaaggaccaagacggatatttttgatacccagatgcagaagggttaacaggatacagactgctttctgttcataccaggagagtacgaaggaaagcggaagctcatttacagaacatccaaatgcatctgcaagtgccacagcaacctggatcgcaccataagcatcattacactgacccatatccatcagtcgtggcagaccaccgatctctcccagatcgagatcattgaaacggaattttccacatgccagggtgagaacgatactgtcagaaggtgtctgctttacaaattccgtataatagtttcgacctggcttggcaccatcacagccggcaaccaggaagaaatggcggatcgcgcctgattttacggcttctaccacagtacctgcatgggacaggatagctgcatgaccaaaaccggttgtcactttttttccgccgttgataccggagaacatacgatcttctttgtaaccgcccagctccagtgctttttcaataagtggtgtgaagtctttcttctcgtcaatatggacagctcccgggaaggcaaccacttctgttgtaaatactctgtcagcgtagctgctttttggaggcatcagacagttggtagtgtagaggatcggggccggaagatggtcaaactctttctgctgattctgccatgcagttccgaaattgcctttcaggtgagcgtatttctttaagaatggataggcatgggcagggagcatttcaccatgtgtatagatattgattccttttccctcagtctgttcaagcaaaagctgcagatctttcagatcatgtccggtcacgacaataaaaggccctttttctaccgtaagtgtaacatcagttggctctggtgttccataggtttctgtatttgccttatcaagaagtgccatgcacttcagattgatctctcctgttttgagtactgtggaaagcagtgcttctgtgctttcttcataaccgatcttagataatgcctcgcagaagaactgattcacttcggcatcttcataattcagaacatttgcatgataggcataggcagccattccgcggataccaaagagaataagagatttcaaggagcggatatcttcattggcattccacagctgctgaagatcatgttcctctgttctgcagtcaggaaccagtctttctttttcagctctgactttttgtatcatattttcgattgcagcattgtcaaaacttacatttgtaactgtagtaaacagtccttcgattatgatctgtccggttctttttgaaatagtttccgtgctgtcggcagctttagccagactgatcaacgcacctgtcagttcgtcctgtaatttcgctgtatctgcttttttcccacagacaccggcatttcccgtgcagcctgtacatccgacggtctgttcacactgaaaacaaaacatttttttatccattattgtattctccttttattctgtgatttttcgaatgatctttcttattattttatcctcggccggtaatatttatccttggtttctgttaggagtatagtataataattacaacgtgtatgtttgatttccaacaggaggattaattttgaaaaaatatttacccattttaagaaccagtcctttctttaaaggtcttactgataatgagatattatccatactgcactgtgtaaatgcagcaacaatctccagaaaacgggattcttatattttcagagccggagattctaccgaagtaatgggacttgtggtggcaggctgtgttcttgttattcaggaagacctctggggacatcggaatattctgtcaaaatgtcatgcaggagattttttcggtgaaccatatgcagcaagtccgggagctgttctgaatgtcagtgtggtagcagatgaagattgtgagattatttttttaaatgttcaaagacttctggtttcctgtccaacagtatgtgatcatcatcagaagctgattcgtaacctggtcggtgtcctggcaaataagatcctgatcctcaacgataagatcacacatgtgggtaaacgaacgaccagggataagctgttgtcctatttgtcggcggtatctatcagacaggcatctttatcctttgacattccttttgaccggcagcagctggcagattatctttgtattgaccgtgcggcaatgtctgcggagatatcaaagctgcaaaaagaagggcttataaaaacaaacagaaaccattttgagctgactgtctgtaatgatacggattcaggaataaaaatgtgatatacatcacggaaaacgataaactttttcattataatgcaaaaggaaagtgagactgcttaaagagattttattgttataagcgttcacacgatggtattatggtgtatgtataaagaatctatgaaatcagttattgaaaaacaggaggaaaaaaatgttcatcagaaaagcagaagaaaaagatattccgaggatcctggaattgttaggacaggtgctgcagatccatgcagatataaggcctgatatttttattccgggcacaacaaaatatacgacagacgaattgacagagcttttgaaaaatgaagaaaagccagtatatgttgcagcggatgaggctgatgtttgtgtggggtatgcattttgtcaattaaaggagcagcctttttcaaacaatatggtaccgtttaaatctctttttatagatgacctgtgtgtcgatcaggagacacgaggtcagcatattggggaaagcctgtttgaatatgtaaaaaataaagcaaagcagctgggatgctatgaagtgacattgaatgtgtgggcaggaaatacttcagcagaaaaattttatgaaaaaatgggaatgcggacaaaagaaaggcagatggaatacatattataagatgttgaattgttcaggaaaaaaacagccggctaagatacagactgagatgtctgtaccttagccggaaaatttatcactgtaatgaacatgcatggcttcccagtccataaacaatacataaaatactcttccgtattgctggctgtctacaatccttccgtgatcaagaacagaaaggtaagagccgtccgcttttcgaagatgaaagtggatgtaatcatttttattgccggcatcgatctgtttccagatgcttgcttctatctgctgttgttcatcttccctgatcaggttgtggaagcttttccttgtaaggctgaagagttcatctatatttttatatccggtcatttgaaggaactcatggtttgcatacaggagttcatcatcatctttgtccgctctgtatatgataaatgcacccggaaggtgttcagagatatccttgaatgcaaatccgagttgtttgcggactcctgaccggagtccctccctgtaagccatacatccgttttttccgtgaagctttatttcataaagtgctgcatctgcacagcgcataagctgtgaacggctggatgcaaaggttggatattctgcatatccgagagaaataaaaaacggatattcttttcccttacatgaaaatgtctttggaagcttggtaaattgcagcagcagttctcccgcttctttataggtatgatccggcagaagaatgcagaactcatcgccaccgtttcttcccagtaatgtggtttttgggaaaaaagccttcatgctatctgtaagactctttagtgccctgtctccatagacatgtccgtaaatatcattaataaacttaaagtcatcaatatcaaggagtgcggccacaaaatgcgtttttggatttttagtgatcatcctttcggctaattcatcaaatccatagcggttgtaaatatcggtgagagaatctgtgtgtgccagtatttgaaatttgtttttattttctttcgatactaaccatacccgggtaagacctgagaaaagtaaaacgacagtagtaaacattccgccgacgattaccagtaatttaaggtttctccatccgctttcaggagctacttctaatgtccagtgctcttcccctatcgtaaaaccataagaaacagtatgagttaactggtcgtctgactgataaacaactttataagtatcgctccagggagcgtcggtttttgagagcctgtattcatatccgaaatccgaaagtgcactgatcgcatctgaaaaaatgtcaggaacacgcaggataacaatggtaaatccccagaaatattcctggttgttttcatctttcaggtagattggattgcggacagcaattccacaaccaccctgttttaaatcgaaaggaccttgtgtaatgatcacgtgattgtctcttgcgtaacaggaaattttgctgcaatctttatcctggagcagatcgatcttactcgcttccgttccctcagaaggataaatatctgttacattaccatccggagcaagctgtatgctttcaataacgtcagacataatattttccgcaattgtgtcaaactgactgatctttccgttttcactgatcaggatctgctttagcgtatctgtgatcgcaattccatttgtaatttcattttttatacgttcgccgtaagttgttgcatttaattgtgctgttatgtgtcgttgttcagtttcatgagagtctattttgtatacaattaaaccaacaaggcatatgcccagtaaaaaaacgataagaggtacaattgtttttttcttcacctggttcacctcgttttatttagtttcacaataaaatattatatcatagaagtaaaaaaatagaatgattttttgcgttaaagtgatattgtttttttggtgtacaatggaaatatgaccagagggcgaaatatagtatacaattaaggaatatattggaaagaatactgaaaaagactcgcggttttgcagggtatatgatatactgtcctttataagtaaatatcttatcggaattcactgaagaccggatcggtgctgcaaaatcggtcctgagcagatgcgaattcccttccacttaatgacaggatggagctgtattttgaagatttctatatagacagattgcttgcaaaatatgagaaagacaggcattttgccagatatgccacaggtttataaattctaagaactaaggaagaactgttgtatgttaaataaaaaagatttcttgaaatatgcatcaaaattagcatttccgatcatgatccaaaatctgatcggaacattagtaaatgttgcggatactgtaatgctgggatatgtaagccagactgccatgtcggcttcgtcccttgccaaccagtatacatttattcttttctgtttatattacggtatggctacaggtacttcggttttatgtgcccagtactggggaaagggtgataaaaagacagtagaaaagattctcggcctggcggagcggatctcactgatcgtttctcttgtatttttcgttatctccttttccatgccgactacgatcatgaagatttttacaaacagtccggatacgattgctgccggcagcgagtatttgaaggtgatctcattttcctttatgtttatgggattctctcaggttttcatgagtgcccttcgaagtgtcggaaaaataatgctgccttctgttacatacattgtatcgctttgcgtcaatgtattttgtaatgccacctttatctttggcctgtttggacttccaaagcttggtgttaccggtgttgcccttggtactgttattgccaggatcgcagaggtattgatctgtctcatctattcattaaacagctccgatgtcagatttcggataaaatatttctgtgcgaaatctggtattctgttcagggactttatgaaaattgcttctccggctgtgataaatgatgttgtctggagctttgccagttcagcgttcgcagcgatccttggccacattggcgatgatatggttgccgcaaatgcagttgctgttatggtggtaaacattggtgccatcgcctgtcgcggttttgccaacgctactaccattattatcagccaggagcttggtaaagatcacaaggatacagcaagagaatatgggaaacgtatgctgagaataacaattatcgtaagtctcatcggatgtgccattattctggcagtccgccctatgatactggatttctaccgggataaactgacagagacagccatttattatcttggtatttttataatcatgacaacctggcgtcttgtaggagagggtatcaatacctgtcttatatgcggatgcttcagaggaggtggcgattccaggttcggaatgatcgtagattccatatttatgtggcttgttgcagttcctctcaccttccttgcagcatatgttttaaaactgccgcctgtctgggtatattttataatgaccctggatgagttcgaaaaaatgcctgtggtgttcatccactatttcagaaataaatggcttacgaacattaccagagattttgactgattatgtaactaagcaggaggtttttatagaaatgaaatactttgaggcaaaaatgtcttatcctcaatttttaaaatatctggttccatcagtgctgaccatgatctttttatcattttatacaacgatagatggattttttgtatcacggtatgcaggctctgacgcgcttgcaggaattaatattgttattccgatcacctgtgttattttcggaacatctgtcatgcttgcaacgggatcaggtgccatcataggagagaggatgggacaaaaaagagaacaggaagcaaatgagatatttacttttatgacgatcgtgctgctcgtactttcggttgcttttacagctgtgggaatccttttcctgaaaccgatttgtatttttttgggaagcagtgagcgcctgatggagcatgtggtgccatacgcatttgtcatatttttaggatcggttccgatgtcattcaagctatttttcgaatatcttgtgaggacggatgggagatcgtacatcggaatgatcatgtctctgaccggtctggcttttaatattgttttcgactatatttttgtggctatattcggactgggaacgcttggagctgcgtggggaacatttctctccattacggtaagcatgttgatcggctttatttatttcctgaaatacagccatataaggttttgcagaccgaaggcagatgggagtgttcttctgaaatcctgcaccaatggaagcagtgaaatgctgacggagatgtctaccgggatcactacatttttatttaaccttattatcatgcaatattttggtgaagatggagttgcggctgtgacgatcattatgtatatttactatttcttcatcgctttttatatgggaattgccgttgcagcggctccgatcataagctataattatggttctgaaaatcatgacaagatcagagaaataacacgatatagttttattacgattgccatcagttcagtattgatcctcgcagtatcacttgtatttggaaaacagatcatccatttattcgtcgggaacggaaatgtatttacattgacatgggatggcctgaagctgtttagtccggttttcctgtttattggtttaaatgtatttctttccggatactttactgccctgggaaatggttttatttcggcattgatctcatcaatgcgttctttgatcctggtggccgcgttcatactgatccttccgaagcttataggtgtggccggtgtctggatgacgatgccgctggcggaagccgtgactatttttatagctgtttatctgtatcgaacatacgggaaaagtttcatgcaggaaaattccagagccacgtcttaatgatattttgcaaaactctaacgaaaaagaggccgtacttgacggcctcttttttcgttatggctttatcatgtcatgggagtatttataactcctgtggagatatttccaggtattcataggatggctggaaatcatggctgtcacactgacggtaatattgggtgaaaatacgttctatgatatcagggatatgtgtttcatcaggctcaaacagtatgatgagatactgcagggaactgtagcgtgtacagatatccacacggcggatattctgccggatggcctgttccatatattccagagtctgctcaatggattcgatatcaggaactgtatccacaagtgtctcgatggtgatcatcgccagataacatctgcactggctgcgtgtgacaagctgactcatgtattcatactgtcgtgcgaaatcccggtaattcagatcaagggcacctacatagacgccgcttttctgaagagactctgccacaagctccagatcttttccggaaccggatgccgcaagagtgctgcggtcgatctgctggtagaaaaagaactggtttttgccgttttgttttacgtaatacagagctttatctgctttggaatagcagtcctcaaaggaatcatcggtgctgcacagacacagacctgcggacagtgtggcaaaccggagttccggatcatcggtagtgatgttgtgaaatttctggaacagatcgtccatctgcagagacagggaatcaggatctgtgtccggaaggaacatcaggaattcatcgcctccaagtctgcaggaaattccttgatctgcccgtttctgaagcagctttccaagacatttcagcgcacggtcgccggctttgtggccatagatgtcgttgatctttttcaggttatccatatcaaggaatatcagacatccatcatgcgtctgcataaattctgcggtaagacgttcgcccaggttacgcatgggaagaccggtaaggaaatcatagctttttgcatcttcctggctttttatggtggccattatgtcagagatgaatttgctgacggtaagctgcatatccggaaggttataggtgtccggttcttcctgggaaggatcccactgaggcagtcgcttttcgttgagtagtttcagaaaaatgtcggtgatcttcgggtcgaactgtgtaccacggtttttacggaattcttcgtaaataacttccggtggaagcgcattacggtagattcgacgggagttcatggcatcgtagcagtctgcaacagccacgatgcgggcatggatggggatctctgttccggccagtccgtccggatagccttttccgtcataacgctcatggtgacttcttgcgatttctgccgcatgagggatcagggttatgtccttcagaatctcagcaccgataacggtgtgtttttttataaggttgtattcatcatcagtcagctgtgcaggtttgttcaggaacggatccgggatgccgattttaccgatatcgtgaaggtgagtagcacgtttcagattcaggatttccttcggtgtccagcccagctcctctgcgatcagggctgcatattgtgcaacccggtaggaatggccgcaggtgtacgcgtcctttgcttcaatggtggtggaaagggtctgtatcatctgcagagacattttttcattctgttcctggtttttgcggatttcgatctgctggcgtttcagttccatatcctggacgtttttgatggctcttacaatattgacaaaaagcaggatcaacatgccggcgcccacaaacagtccggacatcgatgtgacaaagtatacagaggttgcttcaacggcaatacacaggatcgctgccagcagaccaatgagcaaaatccggtcggccttgtttttttcggtgcgtatatattggaaaaggtgtacaaatattgtggcaacggtgattgccaggattccgtgacttacaggcatagtttcgatataatctgcgataccggcagcagtgaggatcgtacagactgcaaaatttaccattgcgatgcttccaagacagacataaaatctgtgatgcagccctttctggagactgtccgcaaaaaacaggatcgggagcggacacaaaaggatcataacgaagcacagagatccgagagcggaagcgttggggaccaggaactgacggagcttggattcacccagcatccagactgcgcccataaccatgcaccatccaagatattccatgtcaaatcgtgtatgatagaccagtcccagagcgaaactgaacaggatcgtgacgattccggcaaacaggataaaaaaagcaatataggtttccagtccgtatctgctgaaaatatatatccagatatctgccttgtctccgcagtaaacaggattgacgactccggtgtagttggaggtgtaagtggtcagttcaatacggagctctttgccggcatcggaaacataaaccgggcagaaaacataacggctggcggagtttttgcccacaagccttgttttatgcgtggagtagctggtcctgaggtcgtcccctacataaaaatccacatcctgcaaggaagaacggatggcaaagcaggtatctgtaagatcatcgggaagctggatggtgaggaccatcgtgtcaccgacgggaaccttgtaggtgcccggaacggagatttcctgggtggttccatccggtttctgccaggtaacggtaccggaatagatcacagaggctgctgaggtgtcggaagaacgttcatccgcaccaaagatctgcataaaaatgaaccagccaaggatggcgaacatcagaatataaaagaaatatctttttccttggttaaaggtttcggttttttctttcatggcaatatgcctccttgtaatgggaaaggagtggtttgtaaattgaaaaactcctttagatcgattataccagaccggagtggaaaaatcagtataaacagactaagacgggtaatttggtaagattttaccaatttttttatgatttcgatggtattatataaagcagatagaaaacatatccgatgcatctgcgcgcaggatatggtacaatgggtaaatgtggagtatgacatgtaaagcatgatatatgcaggataaaggatcagaataaagaatgagagtaaagcgacaggaggaaggatcatgagtaagatcgtaaatatcacatcaaaagaggacaaagatcagaagctgcaggacattgcaaattcactggaagagctgaaggatgtaatggctgaagtgatagaggcctatgaggaagaaaatgcggacagccggaagatggacacgctgacagaggcactggatgcgcttgaggacgcttatgaggccgttaacgatgtgctgctggaggaaatttgatcatgcagtacaaggttctgaagatagaagaagacatggatttcggctgtgaagagcggcagccgggtgaagcacttatgtcagtagtgctgatggaagatgaaaatagaaatgaaacaagtctgcgacatgatgacggtctcctttatgaaagagatatcaatgagggagattttgttaccatggacgggcagcatcagctgtggaaattgtaaaacagaaagggacgtacatcattggattttgtcatgactgcgttgtttgtggttatgttcattgatcagtgggaagatgcacaagatcataagccggcgctggtcggaattgtatgctctgtgatctgcctggtgatctttggaagcgggaagtttatccttccgtcaatggcatcgatcgttttatgcttcctgggaatgaagaagcatgaggagaagagaaaaaaagaacgtatacagaagtcaggagaatatcaggcatgacagttgggatatagccggacaggagagatacggaatgactatgacaataacacagcagatcataacggttgtggtagtggtcctggggactatgacaacgcgatttttgccgtttatcatattcccggaaggaaaggaaccgccggctgtgatcacctatctgggaaaagtgctgccctgtgcagtgatcggattgctggtggtattttgtctgaaggatgtgccggaaagtacgcattacggactgccggagatgatcgcaatgctgttctgttcattgtggtattacataaatggaagaagagtacattgctcagcataggagggggaacggtgttttatatggtgctggtgcagaccatatttggttagtcagaaatatgcgaaaaacagaaaatgaaaagctaaggcaggatacgataaccgtatcctgtttttttgattgctgcagtaatttatgaaaatgctgtagatcagataagcaggcgcaggattgtatgtaaaggtgcaataagccgtgaaaagaagcgagcggtcgcgaaaatgagcgcgtccgcgaaggacgcacagatgtattcccttgttcctggaaaatacaaaggaaatatgccgggatcagaggaatctgtaattgtaacagaacaacgataccccttacttgtctgtgaatccgattgcacaggtctaaaagcctcagcgtagctggaggcaataaatagtgtgtgtggaatggtgtgttatgaaaataacaaaaatgagtaacttttgctctcacaatggaataaaaaacaacaagacactatacggctttatggctgtaaatgcatacgtttcaaaagtttatacagggaacatggaataccatgaaatgtgaataaattaacacataattttgaaaaatatactcaaaatataaccatactatattgacaaaattaaaaataaatgataatctgtgaccagaacaaaacgagaatgactaaaatttttatgaagttaagaataaaaaggtaagcacgaaaggagtatcctaaaatggctgagatcaaaaaaatgggttactgtgtaaacggtgagtggaaagagtcaaaggcagagaaatacatggatgttacagattccagtacaggtgaggtgatcgcgcaggttccctgctgtacaccggatgaggtagaagaggcgatcgcttccgcacaggctgcattcccggaatggtcctcgctttctcttgcaaagagacagcagtatatgttcagatggagagatgttctttatgctcataaggaagaactttccgtactttgtgcaaaagagctcggaaagaacatcaaagaggcaagaggagatgttcagaaagcaattgagcctacagaagaggcatgtgcacttccgacaatgatccagggcgatgctgcaatgcaggtaactacaggatatgatacagctacatatcgcaaaccacttggagtaactgctggtattgttccgatgaacttcccggcaatgatcccatggggctggatggttccgctttccattgcatgtggaaatacagtagtactgaaagcaagctcccagacaccacttacagctatgaggatcatggagctcttttatacagagggaggattcccgaagggtgttgtaaaccttgtgacctgcagccgtgtagaggctgatatccttcttacagatgagagagtaaaggctgttacattcgtaggaacaacaggtgttggtaaacaggtatattccaaggcagcagctcatggcaaacgagttcaggcacagtgtgaggcaaagaaccatgcacttgtacttgaggactgcaaccttgaggctactgttaatgcgatcatcaactctacatacggatgcgcaggtatgagatgtatggctcttccggttgtatgcgtacaggatagtatcgcagacgaatttgtttcacttcttaagaaaaaagcagaggctatgaaacttggctgtgcatatgatgaagataccgatctcggcccggttgtaaatgcaggccataaggagaagatctgcaactggatccagaagggtatcgatgagggtgcggagcttgtacttgacggacgtaatgtagtagttccgggatatgagaacggattcttcgtaggaccgacaattcttgatcatgtaacacctgagatgacagttggaaaccgtgagatcttcggaccggtaacctgtatcaaacgagtaaaggattacgaggaaggcatcgcagtcatgaatgccaatccatttgcaaatggttcctgtatctttacacagagcggatattacagccgtaaattcgctatggagacagatggcggtatggtaggaatcaatgtaggtatcccggttccgacagcatacttcccattctccggaaacaaggattcctttttcggtgatctgcacgttctcggaaaagatggctatcgtttcttcacaagagcaaaaacagttacaacacactggttcgatgaagctgccggaaagagaaaggtcggcacatgggaaggaagtactgaggcttaagaaagcttcataaataaatttatgacactgtaaggcagatcgggtaagatctgcctttcagataaaatcctctaatgaaatgagcatattcaaaaacggtgcatctgctggatttccggcagatgcaccgttttttagggccaatatccgatttaatcgatcgtcataacacggatgccgtgctcctggcagaagctgtcgtattcttcgggaagtggctggtcggttacgatggcgtccagcttttccatggaagaataggtcataagcgagatccggccgaatttggaatggtctgcaagaaggatcatgctgttggcattctctgcaatggcttttttggtgatgtattcctcggcgctggcattggtaagtccgctcttcatggttacacctgtgcaggccataaaagccatggaaatgttgtaggtctgcagataatcattgatatccggtcctgtgaaggacagggtcttgcggttcagctttccgggaacggaaatgatatccaggttcggataggatgctgccttgttgaaaataagcaggctgttggtcaggatcgtacagtgcttatctgcaataaaatcaaccaggttcaggcaggttgtacctgtatcgatatagatggtatcgtcttctgccacaagctctgcggcacggcggcagatttctttcttttcgtcaggaaaacgtccgccgcgctcttcgtaagacagaaggggaagagtctgtggagtttcgagtgctgcgacaccgccatatactttcatgatactgccacgtttcagaaggatatcgacatctcttctgatggtgtttttggatacgttgaatttctcacataatgtatcgagagaagcgttcttatgctccagcacatattcttcgatcatgtccagtcgctgtgatttcatagaggtctaccttctttctattggttaagtcttggttatattttatcataaaagaagggagagataaagtgcttttataagaacataccaaaaattatttcccttcaaaaatatcttgacgaaattcttatttgaatgtaatatgaaaacggttttcaaattcaaatctgccatgtaaggtgcagttgatagaagagagtaggaaatataatggaagaaaaaatgaaatacagcaccaggcagcagaaaataattctggaatgcctgcaggaatatggagatacattttataccatagatcagtttatggagctccttcgtggaaaagagatccagatcggaaggacaacggtatacagaggactggagcggctgcagaaggagggagcggtgctgaaggttccgtctgtggagggagcgcctgcccagtatcgttttatacgtgatgaggagcggaagaattacggtaagcttgtgtgtctggaatgtgggcatacgattcctctgcagtgtggatgtatcgatcattttgtgggacatgtgctggatgaacacggatttgagatcgatcagagccggacgatcttttatggatattgtgacagctgcaggaggctaaaaaaatgaatgttaacagagggaagatgacagcggcagcagttctggcggtgacgcttcttgttgtgggcggtgtgaccggatatggtttgtacagggccggaacggtgggacagccatttgtggaggatggccgactgaaggtgatggccagcttttatcccatgtatgattttgcccggaaggtagggggcgacaggatccaggtaaaggatatggttccggcgggaacggagcctcatgactgggagccggcggcaacggatatccggaatcttgaggatgcagatgtgtttgtctataatggtgcggatctggagcactgggcggaggatgtactggatactctggagaatcaggatctggttgtgtctgaggcatcggatggtgtggagcttctggatggaggacatgatcatgctcatggtgatgaaggaaaagatcctcatgtctggcttgatcctatgcgtgcaaagcaggaaatgaagaatatcagggatgctttggtaaaggctgatcctgggaacggtgattattatgaagcaaattatgagaaatatgccggtgaatttgatgagctggatcaggagttcagagatggtctgaaaggtacgaagagccgggatatcatagtggcgcatgaggcttttggatatctatgcaatgcctatgatctgaagcagctggctatcgaagggctgacaccggattcagagcctgatcctgccaagatgcaggaagtgatcgagtatgcgaaaaaatacgacatccataccatattttttgaggagctggcaagtcccaaggtggcgaagacagtggcgaaggaagtggatgcggtgacggctgtgctgaatccgatcgagggattaagtgaggaggatatagaggccggagaggattatttttctgtgatgaggaagaatctggaggcactcaggaaggcattgaactgaaggtgcaggacagtagctgtaacaaaaaaggagaaattatgggaattttgatagaaaatctttcgtttcactatacagggacacctgtgctggatcaggtgaacctggaggtgaaggatggcgattatgccatccttaccggtgaaaacggaagtggaaaaagtacatttctgaagcttcttctgggcgaactgaaggcgcaggagggaagtatcactgtaaatggaaaagatatttctgccacattcggaaagggagatctgggatatgttccacagaacagtatcagcagaaaccagaattttccggcgactgtggaagagatcatgatgacaggtgtgtattcctcttcctggaaggcacgtttccgggcaaaaaaagagatcccgcgtttgaaagccgcacttgcggaaatggaaatggaagagttctggaaaagaaggatcggagatctttccggaggacagcagcagagggttatgctggcacgtgcgctggcaggaaaaccgaagatcctgatcctggatgagcctaccacaggaatggatatggtttctgtgaaaacacttgcagaagttctgaggaagcggaatgaggaacaggggctgacgatccttatggttactcatggaaattccggtgagtttaaaggagcaaaccggttctttaaagcggaagaggggaggatcgacgaagtatgagtattttacagtatggatttatgcagagggcttttctggtgggaatccttctggctgtgatcacgccctgcatcgggatcaccattgttctgaaacggatgtccatgatcggagatgcgctttcccattcttcactggccggtgttgtgctgggactgatacttggagtgaatccggtagccggtgcagtagtgatgtgcatcgtagctgctcttggaattgaggctatccgcaaaaaaatcccgcgttattcggaggtggcgatctccatcgtcatgtctgccgggatcggactggccggtgtgctgtccggctttgtggaaaacggtgccagtctgaacagctttttgttcggaagtattgtgtccatcagtgaaggagagctggcgctggtagttgtgatcagtgtgctggtactggcagcagtgctgtttttttacagggaactattttatatcggatttgatgaaaatgcggcaaggatctccggtgtttccgtgcggaatattaattttctttttactattctgacggctctgacagtttccattgcgtcccgtacagtagggaccctgatcgtttcctccatgctggtagttccggtggcgtgtgggatgcagatggcaaaaagctataagggtacactgatctgtgccattatcgtggcggtatgtaccaccattgccggactgtttctttcctattatgccggactgaaaccaggtggaatgatcgttcttcttgaggttgcgtggtttgtagttgtgatgacagtgaaaagttttaacaaataaaacacatttttcccacaaagtaaacacaattaacccatatactttgaagcatcaaaaggaaacagagaagaattttttcccagggaggatttaaccatgaacaataacagaaaattaaaaataaagaaaatgatgaaaaaaggtgcaaccatcagcctgtgtgcagtacttgctggcggcattggagttggtgcatatgaaggtataaattatttctccggtgcacagtccgtacaggcggcaaccgacagctccgagaatctgactcttatgaagtctgataaaaaatcaaataaagacagcaaagatacagaggctacaaaatcctccgatacaaagggcagtctggatgtatcagatgttgctgaggaggcaatgccttctgtagttgccatcacaaccaagtccgttcaggaggttcaggattattacagcatgtttggttcccagtatgcgccgagccaggagcaggaagttgaaggaagcggttccggtattatcatcggaaaaacagattctgagctgctgatcgccacaaactatcatgttgtggatggtgccgataccttgtcagttgcctttgcagatggtaatgcttatgaagctacggtaaagggctttgatgaaaacgaggatcttgcagttgtttctgttgcaacgaaggatgtttcggatgatacaatggatgcaatttctgttgcaaagatcggaagctctgatgatctgaagatcggtgagcaggttgttgccattggtaatgcacttggctatggccagtccgttactaccggtattgtcagtgctaagaaccgtacgacagatgcatcaggccagatcgagtctggtgattctacagataacagcagcagtatcaacaagggcgtgaacctgatccagacagatgcggctatcaatcccggtaacagtggcggtgcgcttctgaatatggatggtgaggttgttggtatcaactcttccaagcttgcttctactgaggttgaaggtatgggttatgccattgcaatttcagatgttgcggattctcttgagaacatgatgaatgccaaggcaagggataaagtggataatcatggtatccttggtatcacaggcagtacagtaagtacggaggcagtacagatttatggtatcccacagggtgtatttgtttcggaggtaaccgagggaggccctgccgatgatgcaggtattaccaagaatatggtcattacagagtttgatggtaaaacgatcaccagtatcgatcagctggttgagctgcttcagtattatgagccgaaggaaaagatcgatgtgacggttgcagttctggatggtaatgaatataaggagaagacacttactgtaaaacttggtaaagatgacagttccagcaaggatagcaaggacagctctgaggatagcatgtcccaggattcccaggatgcagatatcccagatatccagggaggacaggatgactccgatcagggggatgcagatgcatttgctgatgatggagaagccagcctgttcagagattttgagcagaatggcttgtatgactgatcatgccctaaattatagatggagagcattttcgaggtgaagaaccgcaatcagttcatcccttccatgaatccgcaggaaagaaaccagaaatacagcgggtggaaaaacacagtagaaaaagttcttgtataacaaaatgggagtttcaggcagcggcaattgcttgaccccatgtgtatgtcagattataataaaataacaggcatttccggatgcactccagatgtatcggaaatgacggaaagccggtctttgccagtatcatgtgcagaggccggcaaaagttatattcagagataaatgatcatccatttgcagtagctgtgcagtggcatccggagatgatgtatgattcttcagagcagctgaagcttctccgggcatttgcggaggcagcagggaaggagacaggattatgaatatttgtatctatggagcgtccagcgcagagctgaaaaagatctattatgagaaaacggaagagctgggacagctgatgggaaagcgaggacacggccttgttttcggaggtggaaaagagggactgatgggggcggcagcccggggcgttgacagagaaaaaggctatatcctgggtatcgcaccgagattttttgaccagccgggagtgttgtatgagcattgtacagagtttatttttactgaaaatatgcgtgagaggaagcacctgctggaaagccgctcggatgcgactatcgtggtacctgggggaattggtacttatgaggagttttttgagattctgacattgaagagtctgggacggatcgacaggccgatcgttctttataatattcagggatattacgacagcatgcaggcactcctggaatacacagccggggaaaaatttatgtccagagatgttgtgggtatgtgccggttcatgaaagacccggaggagatcctggattatattgagaattaccggaattatgggggaaggctataaataaaatacagtacggctgatacaacagccctgtatataagatcgtgcgaaggggatttttacaggagaagatatattttatgaggaaaataatgttaaatggccagtgggagctggcagaagcaggaaatgacagattatgtgaggtacaggttccgggatctgtgctttccgggctctatggtgccgggaagatcgaagatcctttttaccggacaaatgaggatgtgacaagggaactgttccggaaggattatgaattcagcagaacatttgtggcttcagaggatatcctgaaagaagaaaaaataatactggtctgtgaggggctggatactcttgcagatatttatatcaatgggcaaaaagccggatctgcagataacatgcatcgtacctggaagctggatgtgaaagaatttcttcattccggggagaatcagatccggatcgtattccggtcggtattcaagtatatcgaagcttatgagtatgaagataataaagagatccactatgttccctgcggtggaatgaaaggaaaccagctgatccggaaggctcattgtatgtttggatgggactggggcccccagaccattgatgccgggatttttcgggatatttatctggaagcatacagtcatccgagaattgaggatgtgaagatcacacaggtgcatggggataatgctgtggatgtgtgtacaactgtggctgtaagcggagatgctgtggataagtgtcaggtgagagtgacgatccaggaggatgcagagagcgtctgtggacatagaacaggtgctaacgaccgaaaaacggaagcccatgtatgcaaagtgggggagactgtatcagcgaataataatccagcagtgctgacatcctcgatccacaacccgaagctctggtggccaaacggctacggcgatcagccgttatataaagttcaggtggaacttctggacgagtatggcacagttctggaaaccataacgaagcgcatcggtctccgtacccttaccatcagccaggaaaaagatctctggggaaaagagttcgcgttctgtgtcaatggcgtgaaaatttttgccatggggggaaattatattccggaggactgcatctattccaggatcacaccggaggtccagaagtatcttctggaatcctgcaaacgtgccaattttaactgtgtccgtgtgtggggcggcggttattatccttcggatcatttctatgatctttgtgatgagatgggactgatcgtatggcaggatctgatgttcgcatgtaatgtttatgatcttacagaagaatttgaagataatatcacgaaggagatcacggaaaatgtaaaacgtctccgtcatcatgcatcccttggcctgtggtgcggaaacaatgagatggagtctgcctgggatcactggccggaggtacagagtgagtcgaaatatctccgtgcggactacataaaaatgtttgagtatgtgattccgaaagcagtgagggaggcagacagcgagacctttttctggcagtcttccccaagctccggaggctgctttgatgatccggacgatgagaacagaggagactgtcactactgggatgtatggcatggtcagaagccttttacagattatcagaagcattattttcgtttttgctcggagtttggcttccagtcttttccgtgcctgaaaactgtggagagctttacggaagagaaagacaggaatattttttccagggtgatggagaaacaccagaag

SEQ ID NO: 203 - DNA, 103446 bp, Unknown
  gut microbiota DNA sequence
aaggccgctgctttctttctgtcattcccagcagttaaaggcatggcggcccacgggaggacgccaccatgctgttttactatcattataatctaatccacttctaccgcttaaaaaagccttgccccgccacgggaatattccggctatgagtatgaactataccatgtaagaaaacaacaaaacgcttcaaatcgtcgcccggtaggtttacgacctgccgggcgttttttgtcgattttcgcggattctcatttccggcaaaaaatcagatggaaaaggaggcggtcagcagaccagggccagcataggcccctgacaacggacaggatcatcctgctcactccccacggaaagggggtgagaagatgaaagttacccctgatgattacgggaggcgctgccagtttgaccatttttgcaagctggtactgtaccctgaagccgttgactacttccgggaaaggaagcgtcagcgtggctgggaaacatcctttgaaatgctgccgctttcggaactggacacgctatgcacgatagatcagtaccccagcgacagttttatatttccggcctatacttgccaagttgctccatctgctcaccggatttataggtgagattcaggatcagatatccatttacattcgtgtacgttatataaataggacattcgcaatccgctttcgctacttactcatgaatgctctcatcacattttctttaatccactttcaccatgaggatttcattatttactacattccataacaagcttctcacatctgccatatccaagctgtgaactattcagacacaacgtataattactggcctttccccatttctgatcggtgtaaaaattataattcgtcatacgccttttatctgtatctgccatcattttgacagcttccttctctcctacattatacaaacccataatacgctgtgttttttccggcatattcccatggataaatacattcagtacatcatccctatctttcagaatataatctgcatttcttccgataattacacaagattccttatcagccagttctaagataacctttctctgtgcctcatacaccatgtcttctactgattttcctgtgatatcacgtccggcaaatgcatatgcaaacaagccttttttcggagacagttccgcactttcctgaatatattccggagataaaccagacttttctgcgatctcattgataatgtttttatcataataagcgagtcccaattttttcgctaattcttctccgataaaacgtccgccgcttccaaattctctactgatcgtaatgattctttttgccatttccagttcctctctccttaattcaaaacatctactttattttttctgattctctttaaaaacacatatcctacaaaacaggaaactatttccgtgatcggaaatgcccaccagatcagtgaaactcccatctgatcatttctgacaaacatagaaaagattccagccagcggcaggataataataaactgtctcaaaagtgaaataaccagcgattccacaccaccatccagtgcctgataaatgccctgataagcaacattgattcctgcgaacaggaaacttatagaaatcactctcattgctccgataaaatattctctcgactgtcccgcattaaacagcgttgcaaatgccccagggaaaatctctgtgattgcaattcccagaatcattaacacaattgtatagatcagaccatatttgatcccatcctgaattctcttcttacttctcattccataagcaaatgcaatgattggggtgattgcatctcgcagaccaaaagcaagaaacaaaacaaactgctgtaccttatagaacagaccataggccgtctgtgctgacggatcgaactttaggatcaggttcattacataaaccataatggacatcagcgcctgagcaatgattgccggaagtccgattgcatagatctccttgataatttcgccatccggcttcatatatttcgccccatgctcgaattccttatttaatttgatatgaaaaatgaacagtaatactgctgacgctacctgtccaattacagttgcgtaggctgcgcctttcactcccatttccggacaaggtccaataccgtagatcatgatcggatcaaggatgatatttacaaccgctccaaccacctgaccaatcgtggaataaagagaacggcctgttgcctgaagtaacttttcaaatagagaaaagaaaataataccaaaagaaatcacgcagcatatcctcagatagctgacccccatctcaagtacttctgtatctactgtctgcgatgaaatatatgctttcaccccaaagataccaaacaataagcaaaccgcataaatgatcactcccagaaacagactgtttcctgctacctttgcagcttttttactgtttccctgtccaagtgtccttgcaagaagtgcattggttcctacaccggttccaatccccactgccaccataagcatctgcaccggaaataccagtgtcaaagcatttagtgctgtctcactgcctgctttcatatttcccacaaatgcactgtctacaatgttatagactgcctgcaataccatagataggatcatcgggattcccatttggaccatcagcttatttaccggcatctccttcatcttgttgctttccgccattttgttttaactcctctcttctttttgtcacaaaaaaagtgcgcaccctgtcatataagctggacttacgctgacacgctacacactttttcatggcgatattcatttttgtaaaatgaaaacgagtagccggtaaactggatttacgcttacttgctactcgtttcttgtaattatattgcctctttttcaaaaagtcaaacaaaatttttcttacattgccgcaaccaactttcccgcagtaagtgcagctccatatgcagcctcttcttcatattcaggaatctccatcggcattttgaacatttcttctgccagtcttctcatcagcgggtttcggcgaattccgtttccggagccagtcaggcgtgtggccttttttccggtgagctgacacatctgctcatactgctcatgcagttcgttaaggatcccacagatcacaccgaccgtcagtgcaccaggatgaaaattctctacaccgattcctgcgatcatgcccgtgtgagacggatcacttcttgtccctgaaaaagctgtatctactttccatgcagcttcttttccgtatttttcaataaatttttctgcctgctcctgcatccgggaatacagtctttcttcagtttctgcagcttctctgtaaaactgttccagcatcgcatacgcacgaccaccacacagggaagctcccacgaggatatagctgttttcggtacaggggcgaagctccacactgccgctgcattctataaacgtctctgtcactaaggaaacctggctgccggttcccacattcaggagtacggtatctttaagatcccggacggaaccaaacagactcgcctgattgtcaccgatcgatcccattaccggcacaccggctcttgtttctccgactaaaaaatgtccctttcttacttccggcagataagaagtatctacgccggcctgctccagggcttcatacagaaactcctgttttcgcaggtcaaagcagccccagcttgccgccatgtcaagtccaataacagggacagtattttcacacagccgcatagcaatataatcactgatcgtcgtcatccttacagcatccttcgggatctgatctttcttctgaagataaaaatgtgtcactacaccatatccggacgctgccgcacctactccctgcaaaagctctgcacaggtttttccgttttccagcggaatctctccgcttccatcctgccaggtatagagaggactcactgccttgccggaagcatccacatacaacattccatgcatctgccctgtaaaccctattccatctggcaaaccattctccttctgctgctttataagaagctcccggacgatttcatagatccgttccggatcctgcagcttctgttccggcttactgctccgcagaaaagaattatgctccactgtttcctttgcaagcagctttcccgtttctgtatctgtcattacgacactgactgttgttgtgccgatatcaatccccatgatcttcatcgtctgtttccgtccttttctgtgatctttactatagaaaaaaactgtcatcatatgagatgattatattatcgtttgaggattaatgctatcttttttggtttcctgctcaggtttctcgattctgagcatgcgatatccgattcctatgtgcgtctggatatattgtacaccgtttttttcaggctccagttttttccgcagtgttgccataaaaaccctgagagaagcaacatcgttttccgcgcagcgtccccagatctgctgagtaatatatgtatgtgtcaatacttttccaacattacgggataaaaggcagagcaacttatactcaatgggcgtcagatgcagttctctatccttcaggaatgtgcagccagccgtgtaatctatctttaatcctccattttcaaaaacagatgtttccggctgttttcctgcctgcgttatggcaagccgcctttgactgacacggatacgcgcaagtaattcttctactgaaaatggttttgtgatataatcatctgcacccgcatccagtgcctctattttgtccatatcttcacttctggcactgatcacgatgataggcatattcgaccaggtacggattttctttattacctctactccttccatatcaggaagacccagatccagaagaacgatatccggattatgtgatgaagcctccaaaatggctgaagccccattttctgcagccagatatttatagtcatgtgtttttaatgtggtaacgatcaggttccgtatgggtctgtcatcctcaaccaccagaattaatgtcttattcatttaatgtcacctcgcttaatggtaaagtaaaagtaaaattacatccatgcggagcatgatctgaaagaaccagtgttccatcgtgagcttctatgatagagcggcaaagtgccaggccaagccccagactccgttggctgtctgcaacggtcgttttccctgtataaaacatctcaaaaatatgtggcttcatttcatccggaattccggggccgttatcttccacgcttatctgcgctttcccggcttttttgaccccccgaatgctgatgacagagcctgacggcgtatattttatcgcattatcgatcaaatttaccaacacctgtataataagatgcacgtccatacgtgtaagaacaagttcttcacagtccgccacgatcttatactcatcatgcttccggctgatatgtcggagtgactctgctattacctcatccaaaagctgatccgtaaatttaaacttcaatcttccatcattgagcctggtaatggaaagcagattttccacaactccgatcagccactctgaatcctcatgaatgtccgtgtagatctgataccttgtagcttcatccagacggtcactgttactgagaagcatatctgcatttcctgaaatggaacaaagcggagtacgcaggtcatgggagattgcccgaagaagatcgccacgcagctgctcattttttgctaaaaccgcatttttttctttttctatggcattttgtacattctccattgcaagtgcacattcatttattacagacagcaggatgctgtattcataagagtccagtgtttctttctgcagagggatcccgattacgccataaacattattcccgcttcgaattgccagatataagcattttgcctgtgagaaatactgtgtggatgcgccggcacgctgtctgttttcataagtccatctggccgcctgttgttcttcctgtgtcagaaaatcctctgtgctctctttttccccggaaaaaagctttccttctgataaagttccattttccacaacatatgccgtgatgctgcggtttaacaggcgtatcagctgtgtacaggtaactccgaggatttctgtctcactttttgccttttgcagcagacgatccgtatcaaacagaacctgtgtgcgaaaggcaatctgtgaagacagctttgcatgcattttcagctttgccgcaagggttcctgtaagtacggacgaaataagcattatgaaaaatgtcaccggatatcccaccgcatatatctcaaaagacatccttggctccgtcaggaaaaagcaaaataagaatacacttaaaaaggagccggctacactgcaaagataaccatctgtcacgatcgaagtgatcaatacgcccaaaatgtatatcgttacaatatttgtatctgtaagatccagtttctgaaacagcaggccgatcaaagtgcatactgcaaatataaaaaccgtcagcaagtaatcttttgcggacggtttttccacataccatgcaaatggccgtttcggataggttctgttttttactgtatcctccattttcaagctcattctgtcattctccttctactgctgttttctggaattatatcacgcagctgttctgtggtcaaaattttttcttcatggcaatgagctatatacggaagcacttctgaagagctctgtactctcctaataccagtaatttatcattctctgcaaaatacgtttccggagaaattgcaatactgaattcctcttcattttttactgccaagatattaatattgtagcgttttctgatgtcaagtccgcccactgtttttccaacccattcttccggcacttccacttcaaaaattgcatgggaagcgtccacctccatataatccaggatatgatcatctgtataacggatggaggcccattttgccacctgcttttccggataaactaccttatcggcaccattgcgtaaaagaaatttttcctgaacatcacgttcagctctggatatcaccaattttgcgcccagttcttttagaagggatgttgtttcaagagaattttgaaagctgtctccaatggtcacaaaacaaatgtcgtagtttccaattccaagggactgtaaaaattcagcattggtactgtcaccaatctgagcattcgtcacaaacgacagtactttgtccactctttcttccttccagtcaactgccataacttcatgtcccagctgattgagctgcatggcaatatgtattccaaaccttccaagtccaataatcaatacatttttcataatattatttttctccttcttatccaactgtgattttttccagaggaagctttgcatttcccttatttcttccggaaaataccgcatagatcagggtcagaccacctacacgtcccaagtacatcagtatgatcaacacgacttgtgaaaaaatatgaagttccggtgtaattcccagagtcagacctaccgtaccaacagctgaagcagcttcgtacagacaatctaaaagtggaaggccttcgtacacactgatcgctattccgccgccaaagaacaaggcaaaatataacatggctattgtcgctgcattttttatcacatgatattcaagtcttcgcccaaaagctcctgcattttcctgacttcgaaatgtcgcaattgcatttaaaataagtactgaaaaagttgttgttttcattccacctgctgtagatcccggtgaaccaccaattagcattaacaatatcataactgcttttgatgcctcactcatctctgaaatgtttatagtattaaatccggcagttcttgtcgttaccgattgaaacgttgctgctaacaggcgttttcccatgggtaattttgtcagatcacagatatagaaaaagactgccggaaataagatcagacatgcggtagtcatgagaatgatcttgctttgcatgcggtagcgtttaaagttcagtttgtttgtataaatatcatcccatgtgagaaaaccgattcctcctgtaatgatcaacagcataattaccagatttataagtatatttcctgaatacccagtcagcgatggaaacatactggaatctgtccccagaatatcaaagccggcattacaaaaagcagagattgaatgaaaaactgacatccagattcccttttttccataatctcccataaaaaccggcagcagcaacaccgtccctgcagcttcgatcaaaaatgttcccctcaaaataaaccttgtcagtctgacgattcctccgacttttggagctgaaattgcatcctgcatggtgcttctttgcatgagggatattttctttccggaaagaagggaaacagacgcagccacagtcactactccaagcccacctgtttgtatgagtgcaagaatgatcgtctggcctgccagggaccagtagcttccagtgtcctttaccacaagacctgtaacacataccgccgaagtggctgtaaaaagtgcctcatgaaatggtgtgatcactttctccgcagaagaaaatggaagcatcagcagaacggttcccaaaaggatcactcctgcaaaccccatgataatcagctgaaaagatgtcatatgttttttcttatatgatttttccggcataaatgatcagaactccttatcaatacttttaacagtgctatcctcgtaatgcattttattatatataactactttcaaagatagtataaaattctctgcttccgtattaagattttataaagatatgatattgaattgagaattattttaaccgaatcaaggaaattacctgctttgatgatcctaagcattaccttaatactacagttttttaattgtaaactcattttatatttgtagttgacattcgatatttctctgtgataaagtgatacccgtacaaaaaaactcaaaaggaaggtattgacatgaacactgcatcatgcgaaaaagaagctccatcgctttccagagatgaagccattgcaattttagatactccggacgaagaactcgaggcactgatcaaccgtgccagcagtttacgttacaaatataagggaaaccgggtaagcatccacatccttaccaatgcccgcagcggaaactgttcccaggattgtgcctactgtgcccagtcatgtcgttccactgccgatattgataaatacaaatgggtagatgaagacaaattatatcaggacaatgatttcgtaaatgagtatcatttatccagacactgtatcggcctgagtggtatgaaatttacagataaagagatcgaggagctggcccgcaggatccgcaaaatgaaagaacacggaactcatctctgctgctccataggctttctcacagagcaccaggcaaaaatgctcaaggaagccggtcttgaccggatcaaccataacctgaacagcagccgttccttttatcataatatctgcagtacacatacctttgaccagcgtgtccggaatatccatatgcttcagggacttggtttcgagatctgcagcggcggtatcattggcatgggtgaaagcaaggcagacgttgttgacatgcttctggaattacgtgagatccagccggaagcactgccgatcaactttcttcttccgatcaagggaactcctctcggaaatgcagatatttcccagctgacaacagaatactgtatgaaggtcctctgcctggcaagacttcttgtacctaaagcagatatccgatgtgctgccggaagagaagtttattttaaaggcgaagaaaaaaaactgctcagtgttgtagactctatttttgcttccggttatcttacagaaggtggtcagggaatcgaggacactctgaaaaccattacggatgcaggattcacctatgagattgaatctgcgtaagcatccttctgtacatatgacctgtcatacacacttacagcatttcattgcttacccaaaccagtaaatatattacctttttcaaaggaggctctttcaatatgaaccagacaaatactgtctctgcaccacgtacaaaaacctacgagatcaccatgaccgctcttatggcagctgtcacctgtattcttgcgccgctgtccattccaatcggtccggttccgatctcatttaccaatcttgccatttatctgtccctgtatcttctcggatggaaaaaaggaaccatcagctatctgatctatcttctgcttggacttgtaggtcttccggtattttccggatttaccggcggccctgcaaagctggccggtcctacaggcggatacatcatcggctttatcgttatggctgttattgccggactggtaattgacaactgccataaacctctgatccagctcgttggtatgatcgcaggaacaattgtatgctatcttttcggaactgtatggttctgcatcgttgcagattccactttcaaagcagctcttggaatctgtgtaattccgtttatcccggcagatctcataaaaatgatcatcgccatgatcatcggaccaatgataaaaaaaagaattcgctaagctgaagctctgatactccaaaaaaggcagcaggaaatgttggaaatttcctgctgcctctttatcgcgtttcatttttcttatctgagttttttcttcagttcctggatcagttcaaaataatctctgtgcttcatctccgggaaagccttaatgattcttccctgaccgaataccgtatggtttgtgatagagcttgacagctcatcaaactgtgcctgaagctccgctttcttcatccgaagcatttcggcagatctttctttctgagccacagtcgcatctctgagctctgccttagcaagagcaacctgaacctttccttctcccaccttctgtgctgtatcaatggtagttgttgccagagtatcactgagcttatcactcacgatccgcagatccgcacgtaccttatccagtcgggtaagcttcttattcagtccgcggatcaccgccactgttacaataagatctgccagatacaccgcatacagaattgccataacaacccattccagtgtggaaggtgtatgagaagcctgacgctccacatatttctgaaaaacctttacaaccatcacaatggcaagtccccatatcagggaaaactcaagacagatatagccgtgaaaattcagcggcttatttgaataatcccaccatcttgcatggaagcatacatccagaagccatccggcaaccagctccaccgcagttgcaagaacgattccaaacagaaagatcattccctcactcatctgatgtccgccgctctgaagcgtattaagcaatgcaaacacggaaagtacaccaaatccgtacaccgggcataccggaccgttgagaaatccccggtttataacctttcctaaggttactgcatggaagataacttcaacgacccatcctccaaaagaataaaacaaaaaatacagacatatctgaaaatacgtcatcccgcaaatcatcctgtactcctcctttacagctgtcaagattccggcagctatttcagggtcagtaccatcacctctgccggggtgattttgattatatcatatcacccctctcatttacatccctttatccagtcattcttccgaaacaatttcttttttcacacgggtaaagtacagaaagaatccgatgttcagaatgattcccactgtggtagataccggtgctgcaagaccgatctttgtcaggctggcatccggctggatactcataaagtacgccattggaagtcgtaccagaagcgtctggatcaggccctggaccataacccatatggtctggttgtttccgttgaaatagcctatcatactgaacagaacagccgttaccagtgtctccggagcaaaccccttcagataatcaaagcccttttggataacgccggcatctgttgaaaagaatcctgccagcacatcacccttcagcaggatcaggataaataccaggcatcccacagacagaccaactccaattcccgtaagcatagattttctcgcacgtttcggctttccggctcctacgttctgtgaaacaaaggaagccatggactgcatcagagagcttggaaccagcatggcaaagtttacgatcttacatgcaactccgtaaccggaggatgcttccagacccaggcgattgacaaatgcacacaaagcaaggaatgaaatctgtgtcaggaattcctgaagtgccagcggcagtccgatctttagaaaacgtctgcactggggattcagccggaaatctttctttgtgatggtaaacggaagctccttctttatcagaagaactactgcaaatacaacacttagggcctgcgcagaaaccgtagcgatagctgcacctgctgcatccatatgtaacccggctaccagtatcagatctccgatcacatttacaatacatgccaccagcacaaacagcagcggagatttactgtcaccaaggccacggaaaatagcagacagcaggttatacgcaacaataaagaaaattccacttccacagatccgtacataagatgcagtcagcactaccgcttcgtctggtgcctgcatcagcacggagatcggatgtgcaaagcctaccataacaataaacagcacgacagatatcatggtaaaaacgatcgcagccccaccgataacagagccgatctgctccggtcttttttctccaagataacgtgcgatcagaactgtgatacccatagcaaactggatcactacaaaggtaacaagattcagtacctgacttccggtggaaaccgctgacagtccggatgtggaaccgaatcttccaactacaagaagatcgaccgcaccataggcagcctgcaggatcagcgcaccgagtaccggcatcataaatgcaaccagcttcttcagaatatttccctgggtaaaatctgccttatcacttgtcataatgttccctcctgtcacacataatctgataaaatttcccgatggtccggatcatactgtctgcttcttcttcggaaatctctgaaagatagggtgccagactgctgaaataatcctggtcatactttctggaaagattctctcctttttctgttatagagatgtaagtaacgcgcccgtcatccggagacatgagcttctgaagatatccctttgcctccatttctttcactgttctggtgacaccgggacgcggcaggttcatggcgtcactgagatcggaaatcctgatatcttttttttccttctgcagagagtggatcacatccagatattgaatataggacggcatcaccccttgcggcagtggcggaagcatatcccggatccgcttcgcctgataaaacgcatcaaacatccgcttgatcttttcatttgtcataaaaaaactccttatataattatcttagttaattactattgataattatatgaggaatttatggtttgtcaagtatgttttatttttctgttgcagagtaacgttctattaatctatgcttccaatgcctctttcagagagtcttcaaagatctcaagacctttctccatctgcccatcggtcatggtaagcggtgcaaggttcagatatctggcctgtgccatcacacgctctcggcttaaatgttctgcatccagaatagaggaagacagctgctctgcggcgtttctgtccttttcctccagcacgagtttccggctgtcgttggtgacactgggatttgtcagaactacgaattctcctccatggatatagttattcaatcctgtattcacttttgatgcactgcaggcagtctgcaaaatagccccatcgtacagactactccagaccgttttcccctactttcagcttcagaacttctgtaagctccgggatctgcatcatatttctacaattcataaaacactactcctcccactgatactgcttcatatctacacatccatttgccttaaactccacaccctcgtcttccagaagcatcttctgctctctccagcctggtgcagtacgccctgcatggttcacaactctgtggcagggatacttcccgtaaaattctgccatacctaagacttttcctacaagacgtgaatttttatcccgcccgatcagccgtgcgatctgcccgtaggaggccacttttccctcaggtatctcttccaccacggacagtatctcgtagattaaatcttcatccagtatttttcccataattattcctccgaaatcctgctggcaattttcatagcatgttttcataaataaaatatctgtcttttcgtggacgcctgcaccagaccgtcctctcagcctgagttttacagtgcagttcctttctttggaataaacaaacggctcatatctgtatgttccagcttgagaagtgaaatttttttgtcaattcctccggcatagcccgtcaagcttccatttgttcctacaactcgatggcagggaatgataatggaaatttcattatgtccaaccgcaccgcctactgcctgggcggacatatgggaagtgtttttcatcactgcaattctgcgcgcaatttctccatatgtgatcgtctgtccgtagggaatctccagtaaaatctgccacactgcctttctgaatgttgaaccgttcggatgaagtggtggagtaaagttcggttcttcaccggagaaatatacatccagccatctttttgcttctgtgagaatttccgtctcctgttggatatggtctttgggaagtgtatttgcaaaatatttctgtccttcaaaccacagaccggtaagtccgatttcatctgcggcaagtaaaatatctccgattagcgatttatatttacatgtgtataccatattttccccccatattcatttatctctataatttttctataggattcctcttaattaacgcaaatgtcacatgcacgtcccctctgcgatttcctcgacattgtgagttttatcccaacaagcagcaggagattgctgacattcttgacaatttataatattataccatttttgttttgaacatgctataaacggaacaaaaccccccggaagtctcgaccacttccgggggttttcgtatcaaattcgtatcacgggatcgtcaaacccagtgtttttcctgcttttaaaagtttttcaatactctctccacaacaatataaaaagcggcagagcctctatttttgcaggctctaccgctttttatctgaattcccctcaaaaaatctctatacgttatatcagaacagtcctgtgatcttaccgctctcgtctacgtcgatcttggttgctgccggtactttcggaagtcctggcatggtcatgatctcacctgtcagtgcaacaataaatcctgcacctgcggaaatcttaagatttcttactgttacctcgaaatctgtcggagcaccaagctttgtctggtcgtctgttaagctgtactgggtcttagctacacagatcgggcagttgccaaatccaagtgcctccagctgtttcgcctgcttctgggcatttgctgtaagaacaactttctttccaccataaaccttctgtacgatctggttcagcttgtcctcgatggatccttccagttcataagcatatgtgaagtcattcggttcttcaacaagacggatcacttcctcagcaagcttgattccgccttcgccaccttttgcccatacctcagaaagtgctacgtttacgccaagctccttgcattttgcttccacaaaatcaagctctgccttggtatcggtcgggaatgcgttaatagctaccacacatggaagtttgtatacattcttgatattacttacatgcttcagaaggttcgggatacctttttcaagagcctcaaggttttcattgttcaggtcagcctttgcaacgccaccgttgtatttcagggcacgtacggttgctacaataacaactgcacttggtgtaagacctgccatacggcacttgatatccaggaatttctcagctccaaggtcagcgccgaaaccagcctctgtgatcgcataatcagcaagcttcatagccatctttgtagcggttacggagttacatccgtgagcgatatttgcgaatggtccgccatgaacgatcgccggaacatgctccagtgtctgaacaaggtttggtttcagggcatccttcagaagtgctgtcatagcaccctctgcgtggagatctcctgctgttaccggtttctgctcagcaaccttgccgtaagtatatccgatgatgattctggaaagtctctccttcagatctttgatatcacttgccagacagagaactgccatgatctcagatgctacggtaatgtcatatccgtcctcacgtggcataccgtttgttcttccgccaagtccatctactacattacgaagctgacggtcgttcatatccacgcaacgtctccaggtgatctttcttgggtcgatgttcagctcatttccctggaaaatatggttgtcgatcattgctgcaagaaggttgtttgccgcaccgattgcatggaaatcaccggtaaaatgaaggttgatatcctccatcggaactacctgtgcatagccgccgcctgccgcaccacctttgaccccgaataccggtcccagggatggctcacgaagagctaccataacattttttccaagtctctgcattccatctgcaagacctaccgttgtcgtagtttttccctcacctgccggtgtcgggttgatagctgttaccaggatcagctttccgtcttttttgtctgtttctttcagaagattatagtcgatctttgctttgtacttaccgtactgttccagatacttgtcatcaatacctgctttctccgcgatcttggtaattggctccattgtgcactcctgtgcaatctcgatgtcacttttgaatcccataatgttctcctttctccgcagcaaccgtccggatctttttatcccataaaaaagagcagtatctgaatttcttcaaatactgcccagacggtcgactcatcgaatctccggctccctcgtggttatcccacaattccgtcagtcaccgaagactttattaatttgataattgaatactaacatatttattagtacttgtcaagaaattatcaaattatttttttcacttttaaagtgaactaagtctaattttctgaatcatttccgttctatgtattagttttctctccaacattcgtacatatcttttttcatcaaatcctctgttgtttaatcgtatattgtactggtcatccgttaatgcgactgtccagacgccataaacatattaccacacttatgaaatcaaatctgcaaatcctgtagataccaggaataatatcagcattacaaccggcactacataacggatcataaagcgatataaccctgcccgtttaaagtgttccccatttcgttccacttctcctatgatccaatcagggccgatcacccatccgatcagaatacttgtcaaaagtgagataaacggcatcagaaaactgttgctgatataatccatcacatccagaagctgtccaacagaaccatttggcagcttaagttcaaaatacagtttgttataaccaaggcagatcagtactgctgtaacaagagaatagattccgacagcaccacacattttcttacgtggtttatgataaagttccatgcagtttgcaaccagtgtctccatgacagatacgcaggaagtcagtgccgcaaatcccatcatcaggaaaaatgcaattgccaccggacggccaaatactcccatggcatcaaaaacctttggcagtgagataaatatcaggcttgggccggaagccattccatcctttccgagaaatacaaaaacagccggtatgatcatcattcctgcaagaaacgcaacgccggtatcaaagatctcaatctgatttgttgctttatttaaattaacttcatttttcacataagaaccataagtgatcatgattcccatagatacacttaaggaaaagaataactggctcatcgcatccagaaggatctccaggaagcgttttaccgtcagtccatgaaaatccggtttgaggtaaacagccagcccctgcataccggtgcggacagttccatccgtatcagtatgggacagtgtcagtgaaaaaatggcaatgatcacgatcagaagaatcagccccggcataatgatcctggaaaacttttcgattcccttttccacaccacgaaatacgatccaggcagtcagggccaaaaaaatcagcataaatacaacgggtgcaatatctgatgtaataaatgatgtaaagtatccatctgaagccgcatctttcccatcagaaacaatataagtaaaaaaatattttgcaatccatccaccgataacagaataataggtcatgatcaatgccggaaccagaaacgttaaatgtcctaaaaatttccactttggattaagagcttcaaaagctctcaatgcatttttctttgtctttctcccaagtgctacatccgttgtcaacagtacaaatccaaaagtcagtaccagtaccagataaaccagcaggaaaagtcctcctccatctttggcacagagatatggaaatctccagatatttccaactcctactgcacttccggctgccgccaggacaaaacctattgagccggaaaagctgcttcctttttctttcatttcaatttcccctcttcaagtatatatttgatataggctgaaaccttcaacctaacagctatatcttaccctaaataaagataagtgcaaatggcagaagtttctttttacgaaattttatttcaaaaaagtttcttgccactttacaaagaacctgtttttccgatataatcgtatacaatgaaaattaataagaaaaatagatagtatgaggaaacaaaatgagtgattttacctgttatgtaggtgaacaaataagaaaataccgaaaagccggaaagatgactctgcaggatctggcagatgccatccataaaagccgagctaccatatgcaaatatgaaaacggagatatctccgttgatatcgaaactttatatgagatcagccagattctccaggtatctatgtcccagcttaccactggtcttcctgaaacagccagtgaaccgtccaatgcaccgggaaaaggacaaaaaagcccattttttcaggcccagaggctatatttttacttttacgatggacgatatcagcgtacaaaggatggcgtcatcgatatttatgaaaaaaagggcgaatccggaaaatatgaagcaaccttaacgatctgttctgtttctgccaacggaagaagcagtgagattttttacaccggaaaagttctttacagtgatatgctgatccgtttttcctttgtaaatcagtataacccactggaagaagatctcctgtacatttttaatcctctggagcttcgagattttacaacaggacttttgtgtgggatttccagtgcggatctgatgccctgcgcattcaaatgtgtgatcactttaaaaccgcaggagcttaccgaagctttccgccaccagcttctttttacaaaaaaagatctgaagcgctgggaacagctgaatatgttactgatagataatatggaaaagtagtttactgtctcaaaaaacggtacatcttatattttataagctgtaccgttttcgtatttttctgtatcaggattttcctgcaaacccacaccggattgcctgtgtcggacatatctttttacatcttccacatcggatgcactctgtactgttgggatcctctgtcggatcgacctccatctggcagatatttctgcattttccgcagtgaacacatttttctttatctactctgtaacgaaaaacggaaactttattaaataccgaataaaaagctcccagcggacagatatacttacagaatggccggtatatcataattgataagataatggtgatcaccaggatcgtatttttccacatgtacagccagcctactgcacttcgcatggatttattcagcagcaccagcgggatacctccctccagcgttcctgccgggcagatcagcttgcagaaatatggtgctccctggcccatgatatctactacaaacatgggaagtatgatcacaaatacaagaaagatcacatatttcagttttcgcagaagcttatctccacgaaatgtccggatcttctttggaaaaggaatcttgttcaacagatcctggatcagtccaaaggggcagagaaatccgcacaccagtcttccaagcaacgctcctacaaagatcagaaatccagctacataatatgccattttgaagttccagcttccgatcacagcctgaagagacccaatggggcaggcccctcttgccccggggcaggaatagcagttcagccccggaacacatacatttttcagttttccggtgtagatcttgccagttataaaccctgatatgtgactatttgtaagggccgcccacaatgcctggatcccatgccgcggccattcatttattttcatcttcttattatccaatgcctatacactccatacagatgttgatcgcttttgtaaaaactacagatacctcgcccctgcagattcccagtatcatcagtaaaattcccaaaaccaccagagcaggtccgatccacctggattctgttatttttcgaatcatttttccactctccgtaatgatcatgttttactttgaaacgtttttaagctctttttccacgatttccttccattcgtccagtgtatggcttcctgtataggtatcgcctacaatgtttccatctttgtcaacaaaaaatgtttcaggaaatgcggaaatcccctgcagacggccgttcatcatagtagtatccggtatcaggaacggatactctgcttttgttttttcctgaagaatgcctgctttctttacagcctcctcgtcctggtttcccttttcatctgtagtatcaagcactacgcctgctactccgacgcctttatctttcatttctttatagagctcctgaagttccggaatctcttttacacatggtgagcaccaggttgtaaaaatatttaccagcgtcaggtcatagtcactgaatactttttctgtatatgtttttccatctattcctgttgtttcaaattttcctacagattttacatcctccgggttgacgctggtatcctgtggctgttcaaacacggaaatattctgatatggtgtcatttccgtaatgtcggttttgatcttttccagctcctttgtcagcttttcatctgcatctttgttggtgctcagataatatttgtatttcccgtcactgctgcttccaagctctttatgctctgtacagcctgtgatctcatccagctttttctgtgaagcttcgtcataaacgccaattgtaccgattctgtccagacctgccacccagtcgtcatatcctgttcccatcttctgtatttcggcatttttctgttcctctgtcattttgctccagcttacgtaggcatatgtcactgcattggtctgattctcaaaatcttccgtggtaagcattgcaatgctctggtccttgatctgctttaacagctccttcgaaagtgaaagcttcagtcccagaaacggatattcataagaatcctgtgccttgcaggttacgtcggaaggcttaaatgtacctgctaccagatctgatgaaactgcctctccatccatcatcattgccgctccgggatctgctgtttccgtgctttccgccgctgttaccggaacgcttccaaatgcagatattcctaataccgcagctgccataagtgctgttattttctgtgttcttaatttcattgtttatattctcccttctgatagcaccggcccatatccggaaccagcatatattttatatataaattttgttctctgtagccttactatatcatcccctgtataaaatctctgttaagaaacaaaaaaatttacaggaattttatgctatacatgatattatagataacaaagcaaaatcaactgtttttttggaggatttattatgcatatattgataatcgaagatgaacagcagctctgccagtctattgcggagggacttcgtatggatggctatgaagcggacacatgttttgacggggatgaaggactggaattatgtctggtggaaaattatgatctcatccttcttgatctgaatcttccaggcgttgatggtctggaaatcctgcgccagtttcgggaatccgatacttccactcccgttttgatcctctctgccagaggacagatccaggacaaggttgaagggcttgatctcggtgccaatgactatctcacaaagccttttcattttgaagagctggaggcacggatccgaagtctgacacgaagaaaattcatccagcaggatgtgtgtctgcaatgcggacgtatcagctttgatacccgtacaagaaaggccagtatcgatggactccccctttctctgacccgaaaggaaagttctcttctggaatatttccttcttcatcagaaccgtatcataagcccggaagaaatgatcgagcatatctgggacggaagcgtcaacagtctcagcaattccattcgtgtccacatttcttctcttcgaaaaaaactgcgcactgctctcggctttgatccaatacagaataagatcggccagggttacattttaacggaggatatgcaatgaaaaaaataaccggaaagctttctcttcaatggcgtctgacactgatcactgcgctgcttatgacagtcacctgcattctgatgtatttttttatcagccagtccgcagttgccggaatggaggatctgggagattacatgatacggatcgataacactgattctgctcccatcacctttaatatgaatccctccgtcttatttccggagctttccaatcagctgcagctaacaaaaaagctttttctcaccaaaggactcatggtaacaggaatcatcatccttctcagcagtatctgcacatattttatcagccgtcaggcattacttcctcttcgcaggctcagccaggaggtgaacaaaatagaggcccagaacctttcgaagactcttgaagttcctgctaccaatgacgagatttcccgcctgacaatttcatttaacaaaatgctcgcacgtctggatgaagcttttactgcccagaagcagttttctgccaatgcagcccatgagctgaggactcctcttgctgttatccagacaaatctggaggtctttgcccgcagggaaacacctgatttaaaagattatcaggagatttttgccatgctccaggaacagaccgggcgactttcccatctggctgagattctcctggatatgaccggtgtacagactgttgaacgttccgaaaggatctctctggcagcactgactgatgaggtgttctgcgacctggcttccgtagcggaacagaaggatgttgaactgatccagcaggagggagactgcatcattaccggaagctatctgctgctgtatcgcgctgtgtacaatcttgtggaaaatgcgatcaaatacaatcactccggtggaaaagtaaccgtaaatatccatctttccgaagaaataacagatacatccgcatctgtcaattacgtctttcttgaagtctctgataccggaatcggcattcctcccgaatatcaggaaaaaatcttcaccccgttcttccgtgtggacaaatcaagaagccgcgctatgggaggtgccggcctgggacttgcacttgtcagtgaaattgtcagacagcataacggacaggtaaaagtactggaaagcagcaaaaaaggcagcatgatcgcaattatgcttccagtctgaacatgtttgtattacacttgtctcatatttcgatactctgtaggcgaaatcccataacagcttttgaataccttcgaaaactgaaacggatttgtatatcccacatctgaggagatatccgatatggaatattctgtggtggccagcaggatctttgcctgattcatccttactttacggagatattcccgtggtgactggtcgtattccctgcggaacaatgtgctgagatagtttggatgtacatggaggattcctgccacatcctggatccggatatcccggctgtacatgcggtccatatagtttttggcatccttggccagatttttttcttcttttgtcagcttttttatatcgccctgtgtttccagaagtctggcaaaaagatgcagcattctgctgtttgcttccagggatgcggaaaaattccgtatggaaaaaaactgtgctcccggaaaatcttcttcctgataaatggccacatcctgaagtcttttatccatcactgacaaaatcgacaggatttctttttccagttctttggccggaagtgccagatccaggatctcattttttccaaataaaagatcaataaatttatttccattgtctgcataaaatccgatccaggcatatttccagggattctgcagggaagcgatgtatttgccttccattcctgccggtataaaaaatgcctgcccggcatgtacattcagcattctgcctgagatctttaaactcccttccccatgcagtacaaaatgcagcagatgataaggccgtgcctgaaactgccacatatgtcctttttcacactcctggataccgcagtggttcatctgcataaccgacaattcccgctttgcccgatccagaaaaatatctttacttccaagcatggactcacctccccccataaacgatctttaattcccagcactttcatatcttcccagtccacgtttcaggcacactgctgataaccacagcatccctatgcaaacaggaaacagtaacagacatcctggcagcatgtccttttttcctaacagaaagcccgccggataatagctgatatatgcgtaaggtatgatatatccaaagattcctttcagtaatcccgggtatatgataagtggatatttcgccatctctcctacagaaaggaccagataatttaacgaatttttcggtccctgcatccagaaggacatacagcttgccagccagatcatgcaaaaacggatcatagatgctgtaagcagagatgccacaaaatacaggatttttatgatcgtccagtttattttacagttttttattccaactgacaatattcccagtgctatgatcattttatttaatccgtcaaaatcaatccgggaagctgccatctgcattcctgtcggaagcggtcttacgagaaaccggtcgatttctgatttatttaccatctgtgcaattttccaggaaccctgaaagaagaagttcacccatccttctgaaaataacagatacccgtataacaataaaatttcccatacagaccagccgccaactgtgggaatatttgtatagataattccaacaactgccagatttgatacctgggacagcaatgtaaaaaatgtcatcatcagaaaatctgctcgataatacattagggattttatattcatttcctgcatcttccggtatattttgaaatatttcctgtatctgcccatctttaacctccatataatgcgataacggaagatgcttttttccataagatgcttccaaatgcaaataatattacattccacacgctctggaacaaaagtgcttcccagcatttctgccagcaaaatattccatcaaatatgctgcatggaatatatacgatcccggaaaaaggcataaccgtaacaattttctgcaaaaatccaggaaacaatgccagtggaaccagagctcctgaacagaaatttgtcagaacttctctcccttttacaacaccatacgcattatctgtataaaaacagaacatggaaaatatatactggatgttaaatttgattcccattcccaaaagtatggagaaaagcagaaggagaactcgccacacctctatattctgcattccgttacacattaccagaaaagtactgcaccataaaaatgtgatcagaaattccattcctgctgttccaacagctttaaagaaagtcaaacttcggtaactcagcggtttcaacaaatctgtgattatatttccactgataatactgttggctgtctgcatttcaaatccaaaagaaaacgtactgttgcacaaaaaagaaacgatcacatattttttcataatttcccatgtatatccattaatctccgtatgatataaaaaaatacttttccatacatagtaaaaaactacaatctgaataaaatttgcaagcaaaccggtcaggaaattttctttataagcaattccttccagaaatcccccttttatcagtgccagatattttctcatatttgctctcctcagaaaaacaaaatcagacggttaattcttcgtatttccattgaacagttcaataataatttcttccagtgtttctgcttccggataattatcaaaaatttttgttattttatcatcaaataaaatttctcctttttccagaatgataagtctccggcacagccattccatatctttcagatcatggcttgtcagcaaaatcgtggcctttttttctttatttatgtattgtaaaaactgatatactttctgtttgactgccacatccagccctattgttggttcatccagaaataaaactggcggatcatgtaaaagagctgctgctatatctgcccttactcgctgtcccagggacagctttcttgccggctggtctataaattcttccagttccaggattttcttaaacagatccagattttctccataaacattgtccgggatttcataaatactatgcagcagttcaaaagaatcttttaccggaatatcccaccacaactgtgtcttctgaccaaacacaacgcctaggttcccggcatttctgattcgttccctgaatggatcatttcccataacggaaatctttccatctgtcggtttcatgatccctgtaagcattttaatggtcgttgattttcctgccccgtttgcaccaaggaaagctacacattcaccctgctgtatggaaaaagaaattccttttacagcttccttctctttatattggggatggaataagtatttcaccattccgataaaaccttcctgccgctgtgaaatcttatattttttgtacagatttttaacctctatgctatccatatgcattcttctttctctgtattttgctctgttgcggtatgcttggttactgtctatacaatagcatcgtatattttatccgtacatgttcattgtataaatctttatgtttataatataattttcactgcaaaaaaagctccccggaaaacagctttttactgatttcgggaagccaatatcttttttatttacgcaagtactctgatgacagattttatttatacagaggtgtcacatacttacctgatactatctttacaatgcctctttatacagtgccaggatatcctcccgaacggttttctgaggattcaccgcaatgtttccgcttttcatggcatcctctgtcatctgcgcaaaatactcatccgtaacccctgcgtgggataattttgcagggattccaacctgtgtattcagttcacggactgcctgttccagcattccttttgaaaactcagactcacatttcttttccgcggaaatataattatagatcttccgatattttccgaaggctgcctcttcgttatatttcacgatatacggaaacaagattccgtttgcaacaccgtgcggcacattgaaaaaagcactgaccggatggctcatggcatggatatttccaagtcttgcccatgaaaaagcaatcccggcaaacagagagcctgccagcatatcggaagctgcttccagattgctacggtctgccacgtaggtgcggatgctccgcccgatcagctccattgctttttcgctcatggcctcggaaaatggggatgcgtccagagaaacgtaagattcctctgcatggatcagtgcatcgatcccgcaggcagctgccaccgaagccggtgcggaggtgagaagcagcggatccagaagtgcataagccgggatcagcttataggaaaatactgtaagcttgtaatttcgtctgtgatcggtaataacagaaaaagccgtaacctctgaaccggttcctgctgttgtaggaatggcgatcagcgggacgatctccccaggaaccttgtctgcaccttcatattctgtgatgctgccgccgtattttgccacaacaccgacagcttttgccacatccataggggaacccccaccaagagcgacaataaaatccgctccgcttgcccggaacgcttctgctgcacgttccacagtctccacggatggatttccttctgtatcacagaaggtgctgactgcaatgccggcctgtgtaaggatttcttcacactgccccactacgccaagtctgttcagtgtggggccggaaatgataaagccatgttttcctccaagcttcccggctgccccgggaagctcctttaatacaccttcaccaaaaagaatattctgcggtacagaaaatgtaaatcttttcatgctgtccatctcctccgcttattctgaaagtgcttttactgtctcttcaatgatggcagccgcctgatcacagttctcctctgtaatgatcagcggcggtaccatacggatggtatgtactccgattgcagtgatcagaagatggctgtccagacagccatgctttacatccacaccgtaaatagcatcatcaaattccacgcctaccagaaggccctgcccgcggacttcttttacatgagggatctttgcaagtttttccataaaataagtacccattttttccgcattgccagccagatctctgtcgagaagttcaccaacctctgcaagtgccgcagcacaggaaaccggatgtccgccgaaggttgttccgtgggaaccaggtgtgaatgcttttgccacttcctctgtagcgcagatcgcgccgatcggcatacctcctccaagggcctttgccatggacacgatatccggtttgatcccgtaatgcatatagctcatcaccttaccggttctgcaccagcctgtctgaacctcatcaataagaaggagcatatcgttctcatcacaaaattcccgaagtcccttcataaattccatggttgccggatggacaccaccctcgccctgtacaggctctatcataatggcaatggtattttccgtgcaggcatccttgaaagcctcaagatcattgtacggtgcataggaaaatccgtaggtcataggaccgaagccaacctggcatccgtttcccggctgtccggtggcggacatggcaccaaaggttcttccatggaatcccatttttgcagttacgatatgataacggttcggaccatatttttcgattccgtattttcttgccattttgatcatagcctcatttgcctctgtaccggagttctggaaaaagatcttatccattccgatggttgtgcagaccttttcagcaagaagagcctgaggaatggtatacggatagttgaaggtatgcatcaatgtctgtgcctggtctacaaccgcttttactaccttctcattacagcttcctgcggagtttactgcgatacctgcataaaaatccagatatttttcgcccttctcattgtagatatactggtcttttgcactttctgccagaaaatccattctctcataggtctcgatcatgtatttgtttactttttccttgatatcctcaaatgtcagtcctgtttcttccagcttcatttcttttcctccccttttgtgatctgttctgataagatctgttcccgcgtgatcagacccttcatcaccagatattcttcaatcatctttacgcatcctgcaattccgactttttcactgttcaacgtcatatcgtaattgacgggattagtccagtaatttccttttgtataatatttataatagtccgccctgtacttatctgtattctcaatggtggctgctgccacatccgcagatactttcatccgctgcatggtacgggccagacagaaggcacgtggagcttcgatatagatgctgaccacattttttctgcccttcagaacatagtccgcacattttccaacgatcacacaggattcctgatctgccaggttccggataatctgtgactgatactcaaacagacggtcatccgaaacaaacttctcatttctcgcaatatactgtctggatctgggcagacccttaagaaatccggtaaaacctccattgtttcggatccgctcattgatatccagaaacagcttttcctccagtccgctcatttggctcgccagcgtcagtatacggttttcataacagtggatccccagatcttttgccagcatggaagcgatctcttttccgcctgttccgaaacctcttgcaaaagttacaataaaattttccatttttcctgcctcctatcctgccagatatctgcttaaaaactctctggtacgggcgtttttcggatttttgaacagctctgccggaggtgcgtcttccacaatgtaaccctgatccataaaaatcgttctggtagaaacatctctggcaaacgccatctcatgggttacaatgatcatggtaagtcctgtggttgccagttctttcataacatttaagacttctcctaccatctccggatcaagggctgaggtcggttcgtcaaaaagcaggacctccgggttcatgcagagagatcttgcaatggcaaccctctgcttctgtccaccggaaagctgtgtggggttcgcattgataaacggtgccattcccacctgtttgagatgtgtgatcgcccggtcaaaagcttcctcttttgacagatggagaacctttcttgtacagagcatacagttctgaagaactgtcatgttattaaaaagattaaaagactgaaaaaccatgcccacctttgaccggtaatcattgatctccttctgtactgccccgatctcttttccgtggtatcggatctttccgctggtctgggtttccagtttgttgatgcagcggagcagcgtggattttccggaaccggaggaacctacgatacagatgatctctccaggctccacattgaaatcaattttccgaagtacctcatgctgtccaaaagatttacttaattcttcaacggatatgattgcatcacccataatttctccctccttacggattgtccatatattccactgcaagtgcatagttctctgtttttttcattttcttctcaaggaaagtaaacagacggttgaatacaaaacagagtacaaaatagatcactgcgatcacaagataggattcaaaatatttataataatttccgcctactgtctttgctgccataaacagctcctggactgcaataacattcagaacggaagtcattttcagatttgtaagaaatgtatttgccatctccgggatgatatttttgaaagcctgcggaagtaccacgtagatcatggtcttcataggtgacattcccatggcccaggcgccttccctctgccccatatcaatggaaccgatgccggctctgacagtttctgccatgtaggctccggtgttcagtaccgttaccataacacctgcaaacaatggtgtaatattcacatttgcctgacggataccataatacaggaccatcgcctgaacgatcataggcgtatctctgaaaacctccacatagatcctgcagattgcctttaaaattttaaaaattccttttttcagaatgctgtcgccttcattgatacggatatcctggatgataccgatgatatagcccagcaggaaaccaagaatggttcctgctacagctatatagagagtcagccaggttccttccagaaacatgccggaatatttttttgccagaaagatcatccattccagggaattagacggatctgtaattgaaaagcctaacatatctccacctcacttggactagttcgctgccggctgctgtgtcagaacagtatccatcagctcatccattttctctttatcgttccagccgatgtcatccatggcaccctgcagcttatctctcagctctgtatcatcttttcttgttgcgatgcagacattgaccatttcatcatcatttttaaaggtatccttctcatccaggttgatgatcttcagatccttgtttgtcagtgctgctgattctgctgtaggaacatctacaacgcagacatctgcaactccgttagagattgccataaagcactctgatgttgtctcatagtttccggactgctctgcaccgtcgatctgatccagaagcggtacccatccggttccaagctgtgtggtaaccttgcagcctgttcctgcaagatcggaaagacctttgacatcgtcatatttgcctcctgcctttaccacgatacagttatctctgtaataatatggttctgtaaatgcatatgatttttctctttctgccgtttttcccatgccagcgatgatacagtcataatcgccggcatccatggagattccaatggaggaccactcaaccttatggatctccagcttcattccaagctgatctgcaagcttctgagctactgccacatcgtagccatatgcgtaataatcactgccgtaaataggttctgccttgcttccgtccggagttgtatctgtatcctgggtccagttgaatggtgcatatgcacattccatgccaacccttaacacatccttatctgatttgtctgctgcccatgtggaagccgctgtagatgctaacattgctgcggaaataatacctgtgatcaccattttgcctaaaagattttttttcatattcgtttcctcctcttctacatagctggcacaaaacatatttagctggtcgacctgaacgttttcgcctgtaaacaacaagggcgctgaaagaaatttttcatttccttcaacgcccttgttgtttgatagacttcattatactcagaagaagcttttcgtcaacttttattttgcacaaattaactgttcattttgcacagtgttgtatttatatgaacctgttcttcaggaaaacatcagctgcttgatcaggatacagtttatcatatccagatattccatatagtcatccagttcaaaatctatcagctcctggatcttattcagccggtactgcagagaatttctgtgaataaaaagttccttcgccgtttttccgacgctgaacccgttcatgtaataggcaagcagggtatccaggagaaacgttccgttggcatgatcatattcctccagctttcccagccgttcattgcaataattcaggatctcatcatggttgtcgttgttgaacagatactgataaattcccatggctgttgcacttaaaactttcttgtgcttgggatttggaagtatgtcttttttggggatcagacgctttgcctcctgatagctggtgccgaaatctgccggattggtgtagataccgcccaggatacaggtgcttcggattgttccgtgaaactgcggactggcatcgatcttctgcagaaccttctccagctcatgttcaatgcttttgtctttttttgcctcaaaaagaaggacaaatttgttgagaaaccgaaggaacatgggctttccttccattgccatgacttcctggttcagataattggcataatactcgtagatatgctcatcctgctccagattgatgccgtacttccggtcagccacaatgatccctactctgcaaggtgtggtaaagttgatcccgaactgctgggagattttttcgatatagcggtcattaatatcatagccaaacagaagattataaagataatctcccattcgcctgttctgcatttcatattccaggatgatctttcccacactctgggcaatatccacaaaagaagctcccttccaccggatgtaaaacagcgggagctgaagcgcattggctttgtcgatcatctccttcggaacgggttctttgtcatcggtgatagaaatcccaaagccggaaattccaagcccatacagttcttccatggctttctgtgcttcttccaggtcaaaccggacatagtctaccacacaaagggcaaaattcccctggttcatatgttcctcaaaaggccgggtctgcaccatataggtccatgtgacaggtcttgtgagacctttttccccagcaatcagctccactccgtccagctgcagctccaatatatcctggcaggtgatcatatacatcaactccttattattgcagtatttcacacactctcttccataaacaggcaaaaacaatacctgattttctcatccttcagttatcctagcagaaatatctgatccctgcaactcacaattccggagctttcagcactaaaaatattcagttttccagagacggctcacatttttctttctcagatatgtccgtcttttttctttcctgcgcaagattccgtccaagcagagtcaggcatacaaatgcaatccctgcaaaaacagctccgattccaaataccacattcatctcatagcatttgctgctcaccagaccggagatcgccggtgcgccaaaggttgcaaatacgatgccgaacatgacgaatccgtaattttctccggtgtgcttcattccgaaaacagagcttgtcagagacgggaagcttcccatgatacctccgtagcagccgtacatcagaacaatggcaaccgttactgccagggagcttgatacagcgagaactcccatagcgatcaccgccacgatcagcactcctttgatgcagacgatcctgcctgctttatctgccagtgttggaagtaccagtcttgctcccgcattgacaatggatccaagcataacggcgctgactgccactgcagacgggattccaaggtcgatctggtaagtctgggataccggtgaaaccataaaataagaaatcagtccaaagaacatggttgcaagaagaagataaaaatttcttgtccgcatcatctctccggatgtatactgcttcatctccggtgtcccggactttgccgcagagccacctgcgttcaccagactcttaacgggtgcctgaaaaaagatgccgcacaggatccaggaaactgcgatggctaccccaatgatcaaaaaggttttctgcacgccctctgcctccagcagctttcgactcagcggcgccaggaaaaatccacaaagtccgttggcagttaccacaacgccggaagcaaatccggtacggtccgggaaccatctctgcacggttgccaggatcaccgtgtagatcattccctgtccgaatccctgcatcactccataagagagatacataggaagcggtgtgggaacgatcagaaatgcggatgccaggattcctgccgcaaagatcccgcctccgatccatacgatcgtcttttccttaaagcggttctgcatccttccgcctacgatatttccgaatacaaaggtgctcagtgccagataaaagcacatggatgcctgtccctgactccagcctgcctgctccatcacatagggctggtaaatagaccatacatggggatatccggtaaaaaagatcgcgaaagctccgaatatcatagtcagcaaacgctgttttttctgtattcctgtcataatttcctcctctgaaaaagatttccggcctgctctgtactctctgctcacagaatgcagcctgtttctgtactcacgatctgcacgttttcatgcacattagctctgcttatccctgatattcttttatttgcgtgccattactcttcatttgcgtgtcaaatgcgtgttaattatgttgtgtgtatgttatcacacgcaatcttattatgcaatataaatttacagctttttctgttttctcgtttttgtccaaattttcctgttatttctttgtatattattcacaatgctcgtcttttaggcacgcatatacacgcatatattttttatttaaaataccgtttttatccgttttttctattttatatttcttaattcgtgcaaaaagcacgccatgttacaggcgtgctttcgtgattttatataatttctgttgcttatttgattaccttcagctcatattccctggttcccaggccgatcttttctgcctgatccagagttgccttccactcaatattcggattggaatccttaaaatggtcatgatgacagtgccatcccggctcggccagatgctctccaagctggctgttggcgatcggtgttgccttcaggcaggcatctgcacaggcctgatccaatgcaaccgggtcaaagcttgcgaacattccgatatcaggaaggatcggcgcatcattttcaccatggcagtcacagttcgggctgatatcctgtaccagtgcaatatggaaatgaggacgtccgtgacagacagcctgtgcatactctgccatcttgcggtcaagaagctcgtttgcactgctattcggattgtatacggcatcatagctgcaggccccgatacagcggccacagcctttgcatttatcgtaatcgataactgctttcttgtttacatatgtaatcgcgtcacttccgcactctttcgcacagcggcggcagccacgacagacatcttcatggatggccggctttccgctggcatgctgctgcatttttccggcacggcttccgcagcccataccgatattcttcagggcgccgccaaagccggttgcctcatgtcccttgaaatggctgagactgataaaaatatctgcgtccatgatagcatgtccgatcagagcagttttgcagtattctccgtttactaccggaacttctacttcatcggttcctcgaactccgtcaccgacgatgatctgacatccggttgtgatcgtgttaaatccgttaagatttgcacagtccagatgctccagtgcattctttctgcttcccggataaagagtattacaatctgtcaggaacggcattccgccctgctccttacaaagatctgcgactacctttgcatagttcggacgaaggaatgccatatttccaagctctccgaaatgcatcttgattgctacgaattttccatccatatcgatatctttgattcctgcggcaacgcagagttttttcagtttgtccagctggctggttcccaccggacaacgaaaatcagtgaaataaactgttgatttctccattctggtttccctcctgtttgatcatttcaaaataaatttacccttttcctgacaatatgtctagtttttatacaaaaaatgtataaaaagatgcgctgctctactctcgaaaaagaatctgcgaaaaataccggaactttccatcattggtccagcactgcattcccacagcatctgccatcttctgcgcatccacacaataggcagacatacaggaattatgcttgtacggtccggcgctcatgatcagaatatctgtttttccgcactctttcatcttctctgagagctgctctgtcagcttattatgtgcaagcttggcttttttgtaatccatgaatctgtcctgcgtcgtctggagcaccagggtgttctcataatccagggcacgttccttcatttcttccacagtcccgctttccggtggacatgcaggatttttatcataattaccacaggcattttcttcacagaaaacacggtattccggcacaaacaccagcttatcggttttcatgaccgcagcatcggaaaagccaagcttctttgcttcttcaataaaatccatttttctctcctgtttttttcttttatagtgccacattttatttgtttttacaagctctgactttcactctgccgccagacggataaactcctccatctctcttgtcttaaacttatttttatggtaaaagatctgccggtacatggatatctccacatcttccacatgtaaaagagcaattcttcctttccggatatcccgctccacagccagatagggaagaaaggaaagtccgtggttcttttccagcatgcggatgataaaagcagtatcgctgatctccagcaccggtgacagggcctgcttcttaagtgccagctgctggtccagagcctgtcgataattggcattcttttccgtgagaaaaaaaggctcttccagaatatcctccatcttcagcgtctttcccgcaaactccgaatctgcagaggccacaaatactaccggctccgccttctccatgaccttcatccagttctgctcccaccttggggtatccagtatataaatcagatccagcccgttatgctccatcatccgtatcagctgctccggcgtatcaatagtcacctgcatatttactttcgggtgaagctcacgaaatttgctgagaacagccggaagctttgctgtgcagagagattcaatggtcccgatatgtaatggatttttcagttccgcatcatcattcattgacttttttgctttatttacgtcatataagatccggcttgcatgctccataaactcttttccggacggagtaagcaccacacgctttccggttctgtcaaaaagtcttgtttccagctcattttccaaaagacggatctggacagtgatagctgactgggtgtatcccagaacctctgctgccctggaaaaactctgaagctgtgctacatgtacaaacgtctccaactgacggatttccattattttctccctttttctatgaaattttttcatcgtgatgatgaaatctgtgaatttgctttatttttatgtcaatgttacaatacaatcacgaggacgtcaatcgtatttttgtgcaaaatgaataaattcatacttaggaggaaagaatccaaatggaaaagaaaaaaatcaagatcggacttgtgccgaagctgatcattgccatcatcataggtatcctgttcggccagttccttccggaaggcttctgtcgctttgttgtaaccctttccggatttttcagtacctttctgaaattcgtcatcccgctgatgatccttgcctatgtgaccatgggtattgcggatctttcacagggtgcagggaagcttctcctgatcacagtggctctggcttatggctccactctgatcgcaggttccgcatcctatctggtatcatccagcctgtttccgcactttatgagtgaaggtgcactggatcagatcgcagctaccgcagacgcatccctgacaccgtttttctccatcacactggagccggtcatggatactctttctgctgttgcccttgcctttgtcatgggactgtgcctctcttccatgcgtggaaaagaaatgggaaacagcctttataacggaatgagcgacttttccaagatcattgacaaagtccttcataccattatcatcccgctgcttccgctttacatctgcggaaccttcacagatatgactatttccggaaaaacctttgccatcttaagcatcctctggaaggtattccttgttgttatcatcatgcacctgatctgcattacgatccagtttgtgatcgcaggtactgtcagcaaaaagaatcctttcactctgatcaaaaatcagatcccgggatacacaactgctctgggaacccagtcttccgcagctaccatcccggtcaacctggaatgtgcaaagaaggatggcgtatgtgagcagatccgcaacttcgtagtaccgctctgtgcaaacatccacatggccggttccatgatcaccatcacagcctgtgctactgcagtctgccttatgaaccagctgcccatcagtctcgggatcatcgttccgttcatcatgactctcggtgttgcaatggttgcatctcccggtgctcccggtggttccatcatgactgcccttccattcctttacatggtattcggagcagaagccggtgatccggacggtgccatctgtgctatcatggttgccctttacattactcaggattccttcggaactgcctgcaatgtatccggtgacaatgctatcggcgtgatcgttgacactatttataagaaatttattgcaaaaacaccacaggagatttaagtaaaatgtcttttatcagtgtatttgacgttatggggcccaacatgatcggcccttccagttctcataccgcaggggctgcgcgcattgctttcctcgcccagaagatgatcacgccacccctgaaaaaagtggaattcatcctttacggttccttcgccagaacatacaagggacacggtacagaccgtgccctccttggcgggatcatgggcttttccacagatgacatgcgtatacggaattcttttgatattgccagggaacaggggatcgacttttcctttactccaaatgaaacagaaaccgatgtccatcccaacactgtcgatatccacatggtcaatgaccagggacaggaaatgacagtccggggggaatcgctgggcggcggcaaggtccgcattgtggagatcaaccacgtaaaagtggatttcaccggcgaatacagtgctatcatcgtgatccatcaggatactcccggtgttgtggcctacatcaccaaatgcttaagtgaacgtaacattaacattgccttcatgcgcctcttccgtgaatccaaaggaaccacagcctatacgatcgtggaatccgacggtcatctcccggaagatatcgtagaaagcattcaccagaacaccaacatccatgatgtcatggttgttcagatgtagggaaagggaggatgtgttttatggatttcaaaaatgccaaggaactccttgctctctgccaggaaaaaaagcttccgatttccgaagtaatgcgccagcgtgagatccttctcggtgaaaccactgctgaaatcgtggaccagcgcatggaccgtgttctggagatcatgaaggacgctgctttttcccccatcaaagatcccgtgatatctatgggcggactgatcggcggtgaagcccgaaagctctgcgaatttcatgacctgggaaaaagcctgtgcggaaatgttctcggaaaggggatcacctacgctatggcaacccttgagaccaacgcttccatgggacttatcgttgcctctcctactgccggcagtgccgggatcgttcccggaatgatgcttgctcttcaggaggtctacggcttttccgataaaaaaatccgccaggcactatttaatgcaggcgcgatcggctatcttgccatgcgtaatgcaacagttgcaggtgctgttggcggatgtcaggctgaggtcggaatcgcttccgcaatggctgcttctgctgctgtggaacttcttggcggtacacctcttcagtgtacttatgctgcttccacggttcttatgaacatgcttggacttgtgtgcgaccctgtaggcggcctggtggaatatccctgccagaaccgtaacgcagccggtgtttccaatgccctgatcgcagcggaaatgtcactggccggtatcccccagttcatccctctggatgagatgatcgatgccatgtatactgtgggcaaaaagctccctgcagagcttcgtgaaactgctctcggcggttgtgcagccacaccgtccgcctgtgaaaagtgtcatctttgcagctgatcaacagagtataacccataataaacagagcccgactgaaatgactcaaacaacaaaacggagaattcccgaacttctttttccaggaattctccgttttcttttgggcatgcggacattttacagccctgctgttttttctgctgccagcttctgattttctggttctattggctccggaactctgctctgctctgacttctgagccggagcatcctttttgggattctccttctcctgctcttcttggtcctgttcgaatccatctttaatagatttctgtttttttcttatttttttctttgatttcttttttgtcatatctgccttatctattatttttagtttttgtgtacttcttatatattataccagccacatgatatttttcatcaaatcaacgtaagactattattaaatctgtggtaaaaaagtcctccgaaaaatctcaagatcatatctcctgatatccctgtgatttcctgaaagactctttcacacataatttacatattaataaaacaatttacagaaattccgactgcagcgcatcgtatccggtctcacctgtacggatacgaacagcgttgcgtatctcatagctgaagatctttccatcgccgggatcaccggtaaacgctgctttctgcacagcatcaataactttgatctcccaatcttccgatgataccacaatttcaaacttgatcttcggtttcagaaatacatcgatcttggaaccacggacatactctgtgtaaccacgctgtgttccgcaacccatgatctgggttactgtaaaaccgttaacctggatctcatttaacgctgcttttacatcttccattttttcttctcttacgattgcttctatttttataagcatacgatttcctccattttcacacgatcattgccggacaaattcttttatcagtcaaatccattaaatgacggatatgcattctctccatgctgggatgcatccaaccctaccatttcttccttcggatctacacgaagcggtgtaaagatccgcacgatcccgatacagatcagcgttcccacaatagcaaccgcaatggtgatcacaatactcaatacctgcgccaggaacagacgatgatctccaaacacaaggccgtcccattttgcaacggaattgatcgaagattttccgaagagacctgttgcgattcctccccagataccaccgataccatggcagccaaaagcatccagggcatcgtcgatcttcagcttctgtttcagaaggatcacagtaaagtaacagatcgggcttaccaggatcccaatgataaaggatgcccataccggtacgaaaccagctcccggtgtaatggctaccagtccgataacaagacctgtggatgcaccaaccagtgtcggttttccctcgcggatcacctcgatcagcatccaggtcagcagtgcgcaggcagaagaaatgctgctggtcataaaggcatgtgccgcaaggccgtctgccttcagcgcacttcctgcattaaagccgaaccatccgaaccacagcatagctgccccgagaaatacaaatgggatattgtgtgtgcgataggttgcttttgcatagcctcgtctctgtccaagataaatggcaagaaccagtgcactgacaccggaactgatatgtaccacgtttcctcctgcgaaatccacggaaccgatggttgccagaaatccaccgtctccccagaccatatgtgccattggataatacacgatcaaagaccagatcgcaataaagaaaaacagcgccttaaaacgcattcttccaaccacggcaccggtgatcagtgccggtgtgatcatggcaaacatcatctggaacgccacaaataccaaatgcgggatcgtatccgcataaggtcccggctcccagcctacgccattcagcgcaaaccagcgcaaatctccgatgatcccgccatgatttcctccaaatgccagcgaatatccaaacaatgtccacataactacggacagtcccatgatcgccccacaggccatcatggtatttaccacatttttcctgcggaccagtcctccgtagaaaaacgcaagcccaggtgtcataaagaacacaaaggctgtacaaatcagcataaagccggtatctcctgcattcatcattcatttcctcctcgattccctcaattattctgcaacgcaaaaagcgcctggaaactcaatttccagacgcctttgtcatgtcagttagcatagcagataatttgtgggttttcaagagttttttcgctatttttctgttttcttacagaattactatgttttatgtggatatgaaatttattttcggcaatctatccggttataaatattggagagattttattttatctcttactgtactataacacggactatgctcaggatcagcagatgtgccggataaaagatatagaaaaaccacttggaaaacttcggtgctttttcggattttttgccattatagaagcacaggatgatgattcctgatgctacgatccctgctgccgaaagcagagcatggatcattgccggtccggctgccattttttccacataggagctgtagttaaacagcacaaaaagggcagcaccgactccgtacgctgttatcatcctcttcctgttcccccagctctcatggaaccagatggtaaaaaccggtgccaggatcgcccagtccgaacaaacggatagtaaaaggagcaggatcagaagtggaattctccatttacttgccatcatcctttcctgaacaaccaggatcataaaacagataaacagagtaaagatcatattcagctgtggattcccaaaagccatcatatagggaacctgggagatcccggcaaagatcagaagcctttcaccgtattttctccgggaatgtgtatagtaaaaaccttccacaagaaaatagcacatggtaatggctgtgaagtagccaatgtctataaacacttcccacaggatcgtgttttccggcagaagcacgttggcgatatgattcagaagcatggtaaaaattgccagatatttaatggcatcccgggtcagtcccggcttttctgttgttggcatgatcttctccttctgtgcagaaaaattttcagacctttcacatcttctgcacaatataatacatttatcttacactgattttctgactcatacaactttttttgttattgctggagttgcctttttcttaaggtaagcttatactgtagaaagcgtgctgtattttatatggcaaaacttctcagcaaacactgtaaaacaataaattcggaaaggaattatcgatcatgatccaggatatcgcaccacatacctatcacaacgagtacaaacctgtggccccggataaagaaagccacatcctcgcctatgaagaaggaaaaatccttatgaaaaaagatggcgagactatgactcttccaagctttggagagctggaaggaaaagttgaaaatctctatgagaattatatctatctcttctccattgacgaggagcatttttatctgatcccggatcttgacaccagtctccttcctggttatcagtttgagatcacaagagttctccgtacagcggagccacagtatctggctttcgcaggaatcaccggatatcagctctttcagtggtacagcaagcgccgtttctgcggctgctgcggcaaaccgatggtacatgataaacatgagcgcaagatgatctgccctgcctgtggaaacggtgaatatccggtgctttctccggctgtgatcgtaggcgttaccaacggtgacaagctgatcctctccaaatatgagggccgaaatcacacccgctacgccatgatcgcaggttttgccgagattggcgagaccatcgaggagactgtccaccgtgaagttatggaagagatcggcgtaaaggtcaaaaatctccgctactacaagagccagccatggtccttctccggaacacttctgtttggcttctactgtgatctggatggcgacgacactctgactgtagaccacgatgagctttccatggcctcctggttcaaccgggaagacattccggatgaaggagataatatcagccttaccaaggagatgatgatggcatttaagcatggaaaagcctaaagtatcgcttgcctgattccgtaaacaatttttcgcaaccaatttcacaaaaaaacaccgaccattcatctgtaccatgtcctgtccaggctgccagatcctctctgacatctcagccccagtacatattccgatgaatgccggtgtttttattttctatttttctatttttcttccgagtcggagcaatctgcctaaaaccgttttatttctccggtgtcagatgccagatatctctgttgtactcttcgatggttctgtctgaagagaagtatcctgcttttccgatatttacaagcatcttctctgcccatgcggttctgtcctcataatcggacagtgcctgatctttcaccttcgcataatcctcgaagtcaagaagagtcatgaaccagtctttgcttacgatctcatgatgcagtcttcttaaatgctcctcacttccaatagaaagaagctcgtttcctacgataaagtctactgcacgacggatgcgctcgtctttctcataaaaatctctggagcagtagtcagccttttcatagtgttcgataacctgctcactggactctccgaagatatagatattatccttgcctaccagctggctgatctccacatttgcgccatccatggttcccagtgttacagcgccgttgagcatgaacttcatgtttcctgttccgctggcctccttggaagcaagagagatctgctcggagatatcgcaggcagggatcagcttctctgctgcacttacgttgtagttttccaccataacaactttcatgtacggggaaacctccggatcattgttgataagctcctgtaagcagaggatcaggtggataatatcctttgcgataacgtatgcaggagctgcctttgcaccgaagataaaggttaccgggcgctgcggcttctcacctgccttgatcttcagataacggtcgatgatataaagtgcgttcagctgctgacgtttgtactcatgaagacgtttgatctggatatcataaacactgtgtgtgttgatttcctcacctgtattggctttgataaactccgcacatctcttctttgcatcctgcttgatcttaaggatatttgcaaggacgtcctgatttcccttgaagccaagcatcttgtcaagctcaaaggaatcctttcggaagccgtcaccgatcatggaggtgatgtactctgtcagcggatggttgcagtgaaggagccatctgcggaaggtaattccatttgtcttgttattgaatttctccggatagatctcatagaactgatgaagctctgtctccttcaggatatcggtatgaagggatgcaacaccgttgatggaaaatccgtagtggatgtccatatgtgccatgtgtaccaggtcgttcttgtcgatgatggcaagattttcctgcggatattttgctttgatacgctcgtccagcttgcggatgatcggcatcagatgcggaacaacctcctcaagataggagatcggccatttctcaagtgcctctgcaagaatggtatggttggtataagcgcatacatgagatacgatctcgcatgcctcctcgaactcgattccacgctctgtgaggagacggataagctccggaattaccatactcggatgtgtatcgttgatctggatcactgcataatcggcaaggtcatgaagattgcagccttttgctgttgcctcatccaggatcagctgtgccgcattgcttaccatgaagtactgctgatagatacgaagctttcttcctgcatcatcgctgtcatccggatacaggaacagtgtcaggttgtggagcagatccttcttatcaaaggagattccctcgcccacaatactctcatctgcaatatcaatatcaaaaaggcgaagcttgatcgctttgttctcatagcctgcaacatcaatatcatacagtgtggatttcagcataaagcccttaaacggcacgtaataggaaacgcctgcatctgtaagccagctctccggctggatccacggattcggtgtctcaaactgaagatgatccttaaactcctgtttgaaaagtccgaggtgataattaagtccgattccttctcccggaagtcccaaagttgcgatggaatccaggaagcaagctgccagacgaccaagtccgccgtttccgagagatggctccggctcgatctcctcgatcatggaaagctcttttccgttttctttaagatatttcgcaacttcatcgtaaacacccagattgatcaggttgttggaaagaagcttaccgataaggaactctgcggaaatataataaattttcttttttccttcctggtagccgcggcccttcagctgctcctttgtccaggagagaagtccgtgatagatttcctcgtttgtacaatcttttacatttttgttatatttgtcttcaaatactttgcttaatgtttccattttgatctcctttcatggatcttgatgggatgaaatatgtttttacaaggttgtttgctttgtttttgatgatattaggatatcacgcatttcttttcaaaaatataacaatcctgtcatgatatgcaagatatttgtcagactgtttttcactttttactgtagctctggataaaaacgtagccgatacatatgcggttgcttcgggagctttctcagatctgtctcatactcttcctgtacttatgcggtgaaaccttattggactgctgaaatttctttataaaataacttgtactgttaaatcccacctgcatggcaatctccgtcacaggtgcatcggaatgcgtaagaagatacttcgccttctccatacggaagtcattgatgtattccaccaaggtttttcccgtatactggcggaaaagcttcataaaataatactcactgtaattggaaagtccggaaagctctgaaacggtaagattctcctggtagtgaaggctgatatgatccagcacttcctttactgctgcaaggctcttgttctgctctgtacttaccgggataatataatgcttcgtcagcatctcataaaagaaatcaaagaacagcattttcagcttcacatagaaatatggcttcttctccgtatgacagtcatggatctccagaaaaatttcccgtagcttctcatatccggaatctccttcttctatatgatggcagaattctgccttgttttctattaatggtgataccacacattcctggcagatatctcccggctgacctgcaaggaaacccaggctgaaaaccacactcttataataaagaggcttcttaagatccgtgcgcatactatggagaactccgcagttcacgatcaggatatccccctttttcaggcggatgctctcccggttcagtctggcaaagccactgcctttttcaatatacatgatctccatctcactgtgccagtggtcatacagtgcatgaaagatctcacagttcgccatataggtttccaccggcagctcaaaggaaccgtgagggcttaattcttttaaattatcatccacttcggatacgtgaagaggattttttgcggatgtgtctgtttctggcatgatttcctccgtgatcaatatctatcctgcggacatttgccttccgctggatatccaatccttgcataatgattctgtttgactcccttagtgtaaaggatatttacaaccatgacaatattatatttcctgttttcttttttatgacgttacggttactctgttctcagcaacacgcttcgcgatgcacttccataaacggcaatcttgacttttccccttccaactgctatatataatatttagaataaaataatttgactttaaaaggaaagaaaactaccatgaatccattaaaaaaagcttactgccgggttttccagaatgtctttaaattcgcccttccactgcttccttaccgcaatccgaagatcatcggaagcgtcaaaggtattccggaagttctggaaaaaagaaactataacaatgtactcatcatcacagatgcagggatccgaagccttggccttacagaaagactggagcagacactgaagcgaagctgcatctcttaccacatctacgacaaaaccgttgccaatccaacaaccgtcaatgtggacgaagcccttcacatgtatctggacaatgactgccaggcgatcatcggcttcggcggtggttccagtatggactgtgcaaaagccacagcagcccgcattgccaagccacaccagtctcttgctcagatgaagggaatcctgaagatccacaaaaagcttcctcttctcatcgccatccccacgactgcaggaacaggaagtgaaacaacacttgctgctgtcattaccgatgcagaaacacggcacaaatatgccatcaacgattttccgctgatcccacgctacgcagtccttgacccgaaagtgactttaagccttccgccgtttatcacagctaccaccggcatggatgccctgactcacgcagtggaagcctacattggaaattccactacacctggcacaagaaaaaatgccctggatgctgtcagactgatctttgaaaatctggataccgcctacacagacggcaataatattgaagcaagacgaaatatgctccgcgcctcctatttcgcaggctgtgccttcaccaaatcctacgttggatatgtccacgcaattgcacattccctcggcggaaaatataatgttccacatgggcttgccaatgcagtgatccttcctatggtactggaaacatacggagattccatcactcacaaactccgcaaccttgccgtaactgccggtctctgcgataaacatgaggacgataaaactgctgcccggatgtttattgatgcaataaaagatatgaaaaaacgctttggcatcggagactatatcccggaaatccaggaaacggacatcccggagcttgcccattacgcagataaagaagccaatcctctgtacccggttcctgtgctgatggatgccggcgaacttgagacactgtattacagactgatgcctccggcaggcaattgctaaaacagccattggcatagaaagattttttcgatatttcgaatacagttttttcagaaaggactacaattccatggaaaaagaacagatcaaccagcttttagataaacagcgccagtacttctactccggcgcaactcttgaccttgattttcgcatcagcgccctgaaacgtctccgcgcttccatccggaaacacgaagatcagatccacgccgcgctgaaaaaggatctgggaaaaagtaatttcgaaagctatatgtgtgagaccggactggtactctccgagatcacacatatgctgaaaaatatccgctcctacgtaaaagaacagaccgttccaactccactggcacagttccattcccacagtttccgcaaaccatccccctacggtgtggttctcattatgagtccgtggaactatccgtttcttctcaccatagaaccactggtagacgccattgcagctggaaacacagtcatcctgaaaccaagtgcctactcaccggcaacaagtgaagtgatccgtcttctcatccatgaatgtttcgatgaaaaatacgttgcaactgtcacaggcggacgtgcggaaaacacacatcttctcagtctgcactttgattacatcttcttcacgggaagccagtctgtgggaaaagaggtcatgagaaaggcttccgaacacctcacaccagtcactctggagctgggtggaaaaagcccctgcatcgtggacaaaacagccaatctccgccttgcggcaaaacgtatcgtattcggcaagtttctgaactgtggccagacctgcgtggctccggactacatctactgtgatccggagatcaaagaagccctagtcgcagagcttcgcagacagatcacacgccagtatggaaaagaaccacttaagaaccgcgactacggaaagatcatcaacgaaaaacatttcgaccgcattaccggacttattgattcctccaagctcatatgtggtggcaaaacaaaccgcgaaacacttcagatcgagcctacaatcatggatcgtgtgactttcgatgatccggtcatgcagcaggaaatcttcggcccggtactccctgtcctcacctacgactctctaggaagtgccgtcaccaggatcaattccatgccccatcccctggctctctacatcttcaccagcgacgaaaaaaacgcccgggaagtaacttcccggtgcggtttcggcggcggctgcatcaatgatgttctcattcatctcgcaaccagcaatatgggcttcggtggcttcggagaaagtggcatgggttcctaccacggaatcgacggtttccggactttctcccattacaagagtattgtagataagaaaacatggattgatctgcctatgcggtatcagaaatatcggaagatctatgaaacaatggtcagaatgtttatgcggtaactatgttctttcatataaaaactgccagagtacagtacctgaaaatactgtcccctggctttttttaattaccgcttcctgtgcggaagtttactttcttctgtatctgatgagccatcccataaccataggttccataaacgcccgtatgccagcccttcgcctggccttccggatcgtaatgataactatgtctggtatatccatcccaggctccgtcatctgcttgatgacggggcagcattctttttgtgttctttagattattttttctgtaatttcaatacttcctcaatcggtaatcccgagaacttggaaatatcttctgtagaaaatcttggattttccaacattcactgtgcggtaagcaaagcctgttcctgaagacttcttggagctgtccaggagtccgttccgaaatatacgactaccgttatgactggtatcagccgatcattactgtaaaatccggtaagatattctccggaagtaggagcccgttgatcggcttctctgtgtgatctttggtgatggtatccttggtacccacaggtttcatcacctttgatcttgttatgtaatcagatgctattttctatctgatccacatgcagcgtaacataattttccctttctgaaaaggataatatttcccaaccttatcagaaaatgatcggtatgatatagattccaagtgctataacagttgcaattacagtagcaattttccagatattatattctttgtccattttggctttttcttctggtgatggctcttcgatgattccgatttcttcttcaatgcttggtatcttattttcatgttttcttgtaaagattgcccagtaaatgattgctgcgactgttacgactcctgatgtgataagagctactttgtctgcaaagatcagcataaatgcgtagatcacaatggtaaaaatacagccaaattttccgcctggggctacatatggacgtttcatatccgggcagtgtttcttaagtcccagataagccagacatccgatgatgtagcaaagtgccagtgagatcagtgatacggatgcaatatagttgatggatcctgttgcgatcaggataatgttgatgatacctacaacaagaactgccatgtacggtgttttgtattttggatgtactttgcagaggaatgacggcaatgatttatcttcagccattgtgtaaatgtatctggccggtgctgcaattccagggttaatggtggaaaggtcgccgccaaatgcaataccgatgcaaagaagaatgatcgggaaaccgacaagtccggctgctttcaagccttctgcataaggtgcatcagcaactgcaagcagatgataatagttatgcggtacaagacctaccagaaaccactggaacagtgcgttacacacaaatacaagaaatacggaaatttttaatgctcgcggcagtgtatactgcggatattttgtctcagctcccatggatacgcaggtttcaaaacctgtgtagcaccaccatacaagaccgaaaatgtacatcatttctttgaatggcggcagggaatccattgcaatgcctccgaaatattccagatggatcttcggaatcatgtacaggaaccatgcaatggcacagccccagaaaaagaagataaatcctgtctgagctttgcctgacatctcaattcccctaaagttcagtaccaggaaaaacagtaccaggataatggcaatgatacgagaatccacgccttccaggttgattccaaactgtccgaacagtatcttgaaatagttggaaaatgcaagtgtctcaccagctccgataccaacaacggaaatgatgtaatgccaacctgcaagattggcccatacacggttcaggccacgttttgcatagttgtaagttcctcctgcacaaggcagtgcagctgacatctcaccgtagatcaggcatggccagactgagatcagaagtgccagaaatgtgatcacgatgatccatgatcctacgtgtccgatctgagctgatccgcatgtaaaaagtcctacaccgacaaccgttccgatggtcatgctgatagattctttcaggcccagggcccggactaactgtgtttcgtttttttccataatgttgctcctcctttgttccctcgtgcttcaataataaagtctttttatatgaagaaaaggagcccggatttttttcattccgtgctcctttgcaaccgttactctgcgtttgaaaattcaacgccgcttttctttttttcaagtatctgtgtgatcagatcaacgatatgtgctgccgcctctaccggcggcactccgtgcctgctgatgttggaaacaactgtgtattccgattccagcatatccggccttgcatgataggcaatgtaagctgacatgctttctgaagtgagaagtccgggccgttctccaattagaacacaggtaacttctgctcccagaagcggccctatcgtccttgcggtattaactctacagtaccgtacaaaaaatggtgttcccactgtgatacctctgtcttccagacccatttttatagtaggaaaaagatccgggatattggctgcgatagatggtgaacagagtccgtcaccaaaataaatctggacttttggattatgtacacagttttcggagatttttttccgggcatccggaagaaaaatccttccccagtcaggccgcagcagcatctcgtgcttgtcagaacattttgtacgtacttcaaaaactcccagttcttttacaacttcctcgggtacttcattgaatactgcatcattggcagctgcatgagaagccagaaaccgaagctgtgcttctgttgtatatcttggaccgcaatggccgattccaattcttgcaggagtggcatgtttcattttccacatttccttgagattatggggatgatctacctgcatgtaatccataatatctgttgctgtaatatctcttaaacatcctgctgcactgctcatatcctgcacctcctgtttattctatctcatatcaaaaaacatggacgggtctccggcattttttcccagatgaccgttttcccagaatcctcttttttccaaccattccctaaattccggaatgggctgttttttcagaagctggcgtacacttgccacgtcgtgataactggtagactgatacatcagcataatatcatctgcctgcggaagtcccattacataatggacacctgctgttccaagaagcgtaaggatcgtctccgaatcgttctggtctgttggcatgtggtttgtatagcagacatcacatcccatgggaagcccgtggagatgtccgcagaacacatcttccaatgctgcccttgtcagctgcttggtgtcatagatgtattccggtcccatgaaacctactactgtattgatcagaaatggatggtaatgtcttgccagaccgtagcacctgcattccattgtctgctgatctgctccgaaagctgcggaagaggaaagctctgaaccctgtcctgtctcaaaatacattacattcggtccttttgcatggcctctgtctttaaaaagtgcgtctgcttcttccagcatgaaagtcgtcactccaaatgcggacaatgctgcttctgatcctgcaatggactggaaacagagatctgcacttccctgtccggatcgtaatgcctccatctgggttgtcacatgggaaagaacacatgtctgagtcggaatctcatatttatcacgtatatctccaagtactttccagatggccagtgtgctgtccacggtatcaattgccggattcagaccgatcacagcatcaccggaaccgtagcttaaaccttccagagtacttgccgcaacgccctctgcatcatctaccgggtggtttggctgaagtcttgctgccagaacattttcacctccaatggttgtgttgcaggtagctgtgatatgaagcttgcttcctgcaaggatcatatccatatttcccatgatcttggaaattccggcgatcacttcacttgtcattcctctggacgcccgcaggatcatttcacttgttgtgctgtcacttaagatccactccctcatttcctggatggtttttcccttgatttccgcatatacctgctcatcaatatcgtcctggatgatccttgttactgcatcttcttcatacgggacagaaggatgattccggatatctgccactgtcagctgtccaagaacttcttttgctgcaattcgctccaacgtacttccggcacatacaccggcaagttcatcacccgattttttctcgcttgctttcgcaagaagttcttttacatctttaaattcatatgtctgacccagcattactgtttttaatatcattctcaacacctacccgttaaatattaaagtttttacaactgccggaattacagttcctgatgctaccggctctcccagatcaatgaagtctccactttcacagtggatcccgtcaatacagataatatcccgctttcccttcagcctgtgccccagagcctgacctactgcttttccgatgtcttcttcaaacactacgatcagcggctgcttttccctgcattctttttcatactgggaaacgatcttctccgcgatttcctgtacctgtttaaaagacgggcatttcagacctttcatggatatggcggtctggcggtcttctgactgtttttccatgtaaagctgcatctctctgtgaatgcttttgtccagatccgggatatcctccggtctttccagcaacggccggactaccgggatatttttcattggaaaaagatctgccgtatattcaatggtactgcctgaaatatccatgctgtaatttccggctccgatcactgtagcccgcatggtctctctggcatttctcacgtccgcactctgaaatgaaggatttttcctgatggtctgagccaggagtataccgatatctccatatcggaaaacatcttcctcttccccgaaacatgctgctacgcctcctgaaaaagtaaggatctccggtttcttccggtagctgatcagatgattggttttcatatgttccagaagattctgctgtgtttcggatatttcatttatgcctactgactatgccaggatctctgccatggcatctgtcagaattcgcaattctctttcttctgcctgttttccttctctgatatcaagttccagcttatctgccagccaccggatcttcggtgccacatatgtaagaagcccatcctgtatctgtaccagtcttccgccgatatccagacatgctgtgtcaagcatatgcccgtttttaaaaaaacagatgttgctggttccgcctccgatgtccagattcgccacaatgcttccggtatcctttgaaagctgtgctgcacctgagccttttcccgcaagaacagattccaggtctgcaccagccgtagcaactacgaaatctcctgcaattcctgagatagcttttaccacatcttccgcatttttctttctggaggattcacctgtaataatcactgctcctgtactgagatctgaagccttgatccctgcttttttatattctccgtcgataatatcatgaaccttttctccgtcgatctcatctctggacagaagcggtgtgaaatataccttgcttctgtagaacacatccttcgatatcactttgatctgcgggattctgccgaatccgcctgtattctgcaagagcatgcggctgaaaaccaactgcgtggtggatgttccgatatcaattcctgcactcaggatttcctcttctttcacagtttcacctccctgatctgtcccagaaaaccttaacgctgatcatatacgtaaaaagagcaccagccttaggctgatgctccgttgcatattctctgattactgttcattcatttttatgtctttcaagaaagtaactgcattatagcatagcatttcctaacctgcaatttgattttttcacaaaatcagagaacatttttcatatttttttgtaatatcatgacaaattgtacttttttattaaattatactatttcagaaatattttccgaattttctcactctagaccacgaattgcgtccttcatctctttcacataagccttgactttcggcacacagtccttgccgtaagctccgcaaagcttcacaatggcagatcctacaatggcaccgtctgactgatctgccattttttttgcctgctccggtgtggagattccgaatcctactgcacatgggatgtctttctgggcttttaccagcttcaccatagctccgatatctgtggtaatgctggtacgcattcctgttacaccaagggaagatacgcagtaaacaaagccttccgcctcttttgcgatcatggcgatccgctcatgggaggtcggtgcgatcagggagatcaggtcaaggccgtactgtttgcacacaacatcaaactcttctttttcctcaaacggaacatccggaaggatcagtccatccattccaacttccgctgctttcttgataaaacgctctgttccgtaagaaaatactacgtttgcgtaggtcatgaataccattgggatttttgtatttttacggattttttctaccattgcaaaaactttatctgtagtcacgccacctgcaagtgcccggacattagcttcctggatcacaggtccctctgcggtaggatctgagaacgggattccaagctcgatcagatctgctcctgcttcttccattgcataaaccagctgctctgttacctccagagacggatctccgcaggttaaaaaaggaataaatgcttttccgtttgcaaatgcttctgtaattctcttattcatgaatatcctcccctctgtagcgggcaattgccgcacagtccttatctccacgtcctgaaatggtaactaccatgatcttgtcctttccaagtgtcggtgcgatctttttcgcataggccactgcgtgggcactttcgatcgcaggaatgattccttctgttctggaaagatattcaaaagcctctactgcttcgtcatctgtaacaggaacatactctgctcttccgatatcataaaggtgtgcatgctccggacctacacccggataatcaagacctgcggagatggagtataccggtgcgatctgtccgtattcatcctggcagaagtaagatttcataccatggaagattccgagacgaccggttgcgatggttgccgcagtctccgcagtattcacgccacgtcctgctgcctcacagccgatgagacgaacgtctttgtcctcaatgaaattgtagaagcttccgatagcattggagccgccgcctacgcaggccaggacaacatccggaagtcttccctctttttccagcatctgttctttgatctccttggagatcactgcctggaaatcacgtacgatagttgggaacgggtgcggtcccataacagatcccagtacataatgggtatctgcaatacggtttgtccactcacgcatggtctcggaaacggcatcctttaaggttgcggttccgcttgtgactgcatggacttttgctccgagaagacgcattttgtaaacattcagtgcctgacgttccgtgtcttcttttcccatgaatacctcacattccattcccatcagtgctgctgcagttgcagttgcaacaccgtgctggccggctcctgtctctgcgatgacacgggtcttgcccattttttttgccagaagcacctgaccaagtacgttgttgatcttgtgggctcctgtgtggtttaagtcttctcttttcagatagatcttggctccgccaaggtcctcggtcatatgtgccgcatagtaaagacgggatggtcttcctgcgtattcattgagaagctctgtgagctcacggttgaattccggatcgtttttgtaatggttgtatgcttcctcaagctccagaacggcgttcatcagtgtttccgggatgtactgtccgccatggatgccgaatcttccttttgacatgttatatttcctcctttatgttccttactgcgtatactgcttctaatattttatccgggtctttgtgaccgtcggtttctacactgctgcttaaatctactgcccaggggtgaagcagatgtatggccgattccagattttcacagcccagacctcctgccagaaaccagggacgtttgatcgccggtaccagactccagtcgaaagtttctcctgttcctcctacgccctgatccagcagaatatagtctgcttccgaacggatcgctttctttatatctgcttctgtttttatggaaaaagcctttatcagaagctggtctgtcatggtcttaagctgtctgatataattctcgtcctcctgtccgtgaagctgtgccagtgcgatggttccttcgtttaaaagctgtgcgggaagctccaccggtgcattgacgaatacgcctaccggcaaaatgctatcatccagttcttcccggagacccttcaattgctccacggtgacgtttcttctgctttttgggaattctacaatgaatcctgcaaagtccggtttagcctggttcacggcctggatatcttccgggcgggtcaggccgcagatcttgatcctggttctgctcccatgtttcaacggttgttctctcatattcagccaatcctgccctttctgtctgaccctgccccttcctgtttcgttactatttgctgctggtcagctctgttacttatttgctctattctttcgtttggcctttatacaagcgctccaccattcagattttccaatgcagctttcttatccgggcttcgcatcagggtctcaccgatcaggactgcacctacccggtttctttccaggatatcgatatcacctgcatttttgattccgctctcagacacaaataccacattgtctgatgccaggtttcgaagacggatgctgttattcatatcaaccttaaaggttttcaggtcacggttgtttacaccgacgatctttgcacctgtctttaatgctcttgccacttcattctcgtcatgagcttccaccagtgcatccattcccagagcttctgctaactctcggtattccaggagctcctggtcatttaagatagcacagatcagaagtacagccgatgcgccgaatgcttttgcctgatagatcatgtacttatccaccgtgaagtccttccgaaggaccggaatatccactgtttctgtgatttcacggagataagtgtcacttcccatgaaataaaatggctctgtgaggcaggagatcgcagatgcacctgctacctcgtattctttcgcaatttccagatacggaaattccggtgcgatcagccccttggagggggaagctttttttacttcacagatgtaggacatacccggctttttcaacgcttccagaaaggacggctgctgtggtgctttttctgccagggttttcagctgatccagaggaaactgacgtttttccttccggatacgttctcttgttttttctgcgatttcctccagaatgtttttttcgctcattctttgtttgtctccttgatatttcagttcaactctcattcggcaatttcaagaagtctgacagattaatgtttccgttcgtatctcttccgatagggattgccgatttctcttctgccgctattattttcaaatctcgttacttaatttgataaattccgcaagcttggcagcagctgcaccactgtcgatcaggttttcagccatcttcacgccatcttctatagtcttcgcctttcctgcgatataaagtgctgcacctgcgttcatgcagaccgcctgacgcttcgggcctttttcggttccgtttacaatggcttttgtgatctctgcgttctctgccggtgtgccgcctgccagatcttctttgctgcagcgtgtatagccgaactgctccggtgtgatctcataggactggaaccatccgtccttgatctcgcacacagaagtcggtgcgctcatggagatctcatccagcttatcctgcccgaaaactaccattccgcggttcacgccaagcttcatcataacctgtgccagcggctctaccagagactggtcaaagactcccatcagctccatgtttgcgcctgccgggttgcttaatggtccgaggatattaaataccgtgcggattcccagctctttacggatcggtgccacatatttcatggcaatatgataattctgggcgaacaggaaacagatgttgatctttttcaggatctctgcacttttttccggcggaatgttgatctttacgccaagtgcttccagaacatctgctgcaccgctcttggaagatgctgcacgatttccgtgttttgctaccggaacgccacctgctgcgatcacaagagaagatgtcgtggaaatgttaaaggaatttgctccgtcaccaccggttcctacgatctccagaacattcatatcgtggagaagcttgatgcagtgtgcacgcattccggctgctgatgcagtgatctcatcaatagtctctcctttcagggaaagtgcagtaaggtaggatgccatctgtaccggtgttgccgctccgtccatgatctcattcattacggcttctgcttcgtcatatgtaagatcttctttttttgaaagcttgatgattgcttctttgatcattgttgtttcctcctgttctgtaacgattctatcttttatagtttgctgttctctgtcttatctgtctctgataaccttcataaagttctcgatcattgtttttccatccggtgtcataacagattccggatggaactgtaatccgaatatcggatattctttatgctccagtgccatcacctctccgtcctcagactcagcggtaacaaccagtttctccggtaaagtatcccggatagctgccagtgagtgatatctggctgccggaaaagtttccggaagtccttcaaacatccgactctttccaactttatgtatctctttctgctttccgtgcatcagctcttttgcgtaggatactgtccctccgaaggcttcacagatggactgatgtccaaggcagatacccaggatcggcagcttgtctttgaaatattttatggattcaatacagattcccgcatcctccggttttcccggaccaggggaaaggatcaatgcctccgacttcatggcctccagctctttgatggtcacttcatcatttcttaccaccttgatatccggctccacagaaccgatcagctggtaaacattgtaggaaaagctatcataattatcgatcagtactatcattccagtccctcctgtgcagtttcgattgcctgtacaacggctcttgccttgttgcagcactcctgaaattcactttccggaatactgtctgctacgatccctgctcctgaccggatacagatctcaccgtctttcttataaaccaggcgaatggcaatacaggtatccaggtttccggcaaaatccagatatccgatagcaccgccgtaaatgcctcgcttgctctgttccagttcctggatgatctggcaggcacggaatttcggtgctccggaaagtgttcctgccggaaggatggcatccactgcatccaccgcatccctgtcatcccggatctggccggtaactgtggaaccgatatgcatcacatgagaaaaacgctcgatgcacatatatttttctacgttcacggtaccgatcttactgatctttccgatatcatttcgaccaagatccaccagcatgttatgctccgcacgttctttttcatctgccaggagtcctttttccagcgcttcgtcttcttcttttgtcttgcctcttggtcttgttcctgcaagcgggaaggtacttaattctgttcctgcaagcctggcaagtgtttccggggaggctcctgcaatctcaatatcatcactggaaaaataaaacatatatggagaaggattggtagcccgaaggacacggtaagtatcaaacaggcttccctcggcttttgctctcataggattggagaggactacctggaaaatatctccttcatggatgtaatgtttcgctttctcaaccatctcacagtattttgctttcgggaactgcggctcaatggaagatttcagtttcaaagacggaaattccttctgttttccgtttcggatcagatctgccatctcttttaattttgcttccgccctctgataggaattttccggatcatccgtcatcacaccggtgatcagaagcaccttctgtctgtaatggtcaaaggcgatcacctggtcaaaaagcatcagatccatgtcccggaaatcctgtactgtctcgtcggtaagctccagcttcggctcgctgtacttgatgtaatcgtaggaaaaatatcctaccagacctccggtaaaggtcggcatattttccagcaccgggcttttgtattctttcaggatctcccgaatagcatctcccggatgcttcacctgctgtacggttttttcttccgttccgtcctcatggatcctgcggatctgaagctttccgtctgtacaggtgatctccatggatggctcatatcccaggaaggaatagcgtccccatacctctgtctggctggcactttccagaagatagcaatgtctgctggctgtgcgaagagtccgcatcacttctacaggtgtatagcggtcggaatacagttctctgcatacagggattcgccggtattcgcctgactgtgcgagttctttgattttttctaatgttggatacatatacaggccctcctgagtttttcattccttaccggaggacgggacattcgtgatctgcattcgctgcttgctcataaaatcaagaaaagcccgtctccgacagaatctggttctgtcagggacgagctctaaattcaaaatcacccgcggtgccaccctgattcacggtctgacccgtgcacttggcggaatacctgcatattcccggcaactgacgtatgccctcacgtcacagaatacttgatacccgaaagtatctttccctgtgccctctacggtccatttgataaactgcctctcgacccggctctcaccctcccggactctctgtgcgcgcatgaatatctttatctccgcttcaacggtttagtggtttacttaattaaattttttctataaaatagcatagcttttctgatatgtcaatacaaaagttgaaaaaaatgtcattttgttctataattgtataaaagtaattgttataaatatcacataagaaaggagtttcaccagaaaaacactatggctgaaagaaatacaaacacctggctggatacccccgatccgcaggtttttatcaaaaattccgcaaaatttaatgatctgatgatgatgtatcgatgtacggtccgtgaggtacgtaccaagctggaagtcctcaacgatgaattttcattggaatataaacgtaacccgatctccttcatcaaaacaaggatcaaaaagccggaaagcatttacaaaaagctcaaaaagctcggctatgagtttactgcggagaatattcagaatcagctgaatgacgtggcaggcatccgtgttgtctgtgcctttatcgatgatatctacactattgcagacctgatcaccaggcaggatgacattaccgtcatccaggtaaaggactatatcaaaaatccaaagccaaacggctaccgcagttatcacatgatcgtggaaatccccgtattcttctccaagggaaaaactcccatgcgtgcagagatccagatccgtaccaacggtatggatttctgggcaactctggagcatcagctgcgttacaagcagaatatcgaagaaatggacggttatgaggatgtcagcaatgagctgctgaactgcgcccgcgctgtgatcgatatggataacgaaatgcagcggattaaaaacaagatcggacaattccatgatatttaaaaaacaggtgaggctgttacagcctcacctgttctttctcactgtttttcacccggaacgcccgcggtgtcatgtgataatgttccttgaatacccgatgaaaataactgttattttcatagcctacagctgcaatgatgtcactgacaggaagatctgtttcacacatcagctctacagccttgttcagacgctttctctgaagaagttccttgaaattaaaccctgtgcttttcttgatcatcttactgaggacatgcatgggaagatgcagacgaccacaaagctccgtcagcgtggcagtccggtatttctgttcaatataatccagtgttgtcatggagatcatattttcgtactgattgggcagacgcatctccacatactgcaccgattctaccagatacataaagatcaggcccattgtggtctgattgatccgctctctgttctcctcaccgtttacaagagaataaatgatattttccagaagattctggatctgcagcacttccgcaaccttaaaatgaagatattccccacgctcttcatcctgacgcaggacattcaccagaaaatctgccagcatattgtcattgcccgccatggaataggccacatcaaaaaactccggcagcaccataaaattgatcgcaatatcattctgccccgctttcagaatctcatgcttcgtaaactgattgagaaaaagcagctcacctttgttaactatgactttttttccgtcaatgatattcgtcagagatccctcacacacatacagcacttccacaaaattatgcctgtgagacggaaaatacacaaaacgggtgtgtgtacgcacagcgatcagcctgccttctttcagcatcttacggctgtccacggtaaagtcccgaccggatgtgtagagatctttgtctacctctgcctctccgtccagaattctcctctcttcatctgtaatttttctcagctgatccagtaatgcctgctgcatgtattttgctcctttatctgttcatggttttctgttctgctgtcctcattttaacactgcagccataagagtacaaccagaatcagaaggcggagattttttcagaaaccttctatacacgaaatccaaacatacaaaacgggcggagcccgaagactccgcctgttctgaaaggatttatcatatgattatacaatcaatctgaggattgattagtacagcttagccatctcctcgatgttgcttgtatcgaatttcagaggtgcgccaagaacaacttctgtaccgccgtcatcagcatctgttactgtgtagtcaccaaggtcaccagctgtgaacttgtcatctttagcacctgtgatgtcgccgttgatcagagagattgttgtgtaagcactgagttttccaaggccctgcatatcccacagatagaagtacgggcaggaatgagaatcatcatcacctgtgtactcctgcatctcagatggaagtccaagtcctgtcagcttgcaggaagatccgttatcctgaagatatttagctgctgctgcgataccaactgttgtaggtgcgcaaataactttcagatccttgtagttctgaagaagagctgctgtctggtctgtggatttctgcggctcatcatcaccatatacaacgtctacaagctcaagcttgctgtatttttcatcgccttccatgatagtcttcattgcatcgatccatgcattctggttagcggactgagatgtagcggaaaggatagcgaactgtccctcaccaccggaaatatcaagaactgcatccataagtgcctgagcaacttcttttgtaccagcctggtttacgaaaatctcacggctgtctttgttcggtgcggagtcgaaagaagatactttgattccctcatccatagcttcctcaagcttagcctgaagagcgttaacatcgttagcggaaatacagattgcatcgaagtcctgggaaatcaggttgtcaagaaccttgatctgtgcatcagctgtagctgtctcaggataaacgacctgaacctcgccgccttcagcctctactgtctcctggaaagatttcgctgcgatctcgaagaatgcgttaccggctgctttaccaaccagagcgatctttttgccttctgcggaatttccagctgcttctgtcttagtatcttcggatttgtcatctgctgcgagaaccgggcaaactgtaccaagaaccattgctccacaaaggattgcgctaattaccttttttttcattgttgttcctccctataagaatataatttttttatatgcagctgcctccgctacaccactggaggcagctaacaatcatatgggtttcaaaagtgatatttagtttttcttcattgcgactgcttttttcacatcgccgatgatattcggaagagctactgctgctaccagaagtacaccgatgatgagaaggatcacctgtgcatttacgttcttctgtccaagaccaactcgtaagcatacgatgatgaatgcagaaatgataccgccggccaggttacctttaccacctgtggatgagatacctccgaatactgccattgcaatggcatccatctcaaatccgttaccggttgttgtatttgcaccgtaggaagaggataccaggaatactgcacaaagtccggacataagtcccataactgtgtagatgatgaaacggatcttctctacgtgaacacctgcgtaataagctgccacacggtttgttccgatcgcatatgtacggcgtccgaatgtgctctttccaaggaagattgcaaaaagtacaccaaggatcagcaccagaaaaagaatatatggaatatttccaacctttccaccgatagcacggaagccatctgtgtttgtgatcgcaatacttccgccggctccaagtgtaacctcagcgataccacggaagataatctgtgttgccagtgttacgatcattggaggcagctccttgaagcgggtaaggataaatccgttaatcgcaccacagagggcaccaacaaccagtgctgtaagtactactacaatgaacggagcgtttgtgttgcagaccatacagcttaaggtagcggagagacacacgatcgcacctacagaaatatcgatctcgcctaataccaggatgtacgccattgggaacatcatgaatacctctgcaaggtaaaccggcatctgacgaagaacactcttcatattataaaactcagaaaatgatgcgcagaaaatatttaccaggataaagagaatgaccaggatgccttcccaactgaatatgatgtgtttcatcggattttccggcacattgttaatacttcttccagattttccagccatgatttacatctcccttccctttaatgcgtttttatctgcgattctctgcagaacaacgttgatcacaactactaccaggatgataacacccttgatcatgttctgccacagtgaactgatacctacaagcggaagagcttttgcgatcgttgcaaggataatggaaccgaggaatgcacctactacggttccacgtccaccgctcatgcttacaccaccgataacgcaggctgcgataacatccatctcaccgccgtactgcatatcaggcattgcagaagcataaacagatacctgaagtgctccgccaagacctgcgaggaatcccatgatcacatatacaagaaggttgatattctttgcattgataccggaaacctgtgctgcgcttgcattacttcctactgcgtagatccttcgtcctgttcttgtccatttcataaagaagaagaataccacatagcatacgatgatcacccagataaccttgttgatcccaaggaagctggttgttgcaaaattcttaaactcaccaagagctgcggcacttgcccactcaccaccgtgggaaacaagataacccattgctctgtagatgtacataaagcccatggttgcaatgataggcggaacgtttgctcttgagatcacaagacctacaaccagtccgcaggcaataccgatcgccattgcaatgatgaaagcaagtaatgtacttgtgatatgtccgtatttcaggagcataccgatggacataccggaaagtgccagagttgacatgatggaaatatcgattccgcctaccagcatgacacacagcataccaagtgacattaccattgttactgcattatttttcagcatctccatgagtgacttcggcgtaaggaatgacgggctgatcactgtgacaacggcaaacagcacgaccacgataattgccagcagagcctctcgggagcctgtaatcttcttgataacagatttcttttccattatttagtcccctttccagtgctcttttccatggacagctcaaggattccttcctgtgttgcctctcccctattcagttcacctgtcttacggccgttgcacataacgatgatacggtcagacattccaaggatctcaggcatctcggaagagatcaggatgatagcatagcccttcttcgcaagatctcccatgatcgcatagatctcggcttttgcaccaacatcgacaccctttgtcggctcatccatgataacgaccttcatttcctgagcaagtgccttggcaacaacaaccttctgctggttaccaccggacagtgaacttgcaggctggaaaatatcaacagccttggtatctacttcttcaagaagcttcttggaaagctctctttctgctttctcgtcattgaatccggattttgcatatttgctgatgatcggaagggttacgtttcttccaaggccccagctcatgacaaggccctgcttctgtctgtcctcaggaagaaggatgatacctttttccattgcttcggaaggagtcttgatataaacctcttttccctcaaggaaaacctttccttcgtccggatgggtgattccgctgacagcttccataacctctgtacgtcctgcaccgaccagaccggtaagacctacgatctcgcctgcacgtacattgaaggaaacatccttgaaaaatcctgttctggaaagatgttcaatacgaagcatctcatctcccagcttaacctccggcttcgggaacagatcattgatctcacgtccaaccattgccttgatcagatctgcgtttgtgatcccgtttacatcataggttccgatatactgagaatcacggaatacggtaactctggaagccagacggtacatatcctcgaaacggtgggaaataaagataatggaaacgccattctctttcagcttatcaaccagtgtgtaaagcttctccgactcgtttctggtaagtgctgctgtaggctcatccagaatgatgatctttgcatttgtggaaagcgctttggcgatctcaaccatctgctgctgtgcaacagaaagagttcccatctcagcggttgcatcaaaatctgcatccagctcacctaagtacttgttcgcctcctgattcatctctttccactggatcatatgatgtttgatgatctcgtgacccataaaaatattttctgcaactgtaaggtgcggatatgatgtcggatgctgatatacggctgcaatacctgcctcctgggcatccttcggacccttgaagtcaaccttctgtccgttcaggaacatctcaccttcttctgctttatgtactccggtaataaccttgataaacgtagatttaccagcaccgttctcacccatcagtgcgtgaacctcaccaggcttgagctggaactgtacattattcagagctttgacaccggggaatatcttcgtaataccttttaattcaagaacatattctgacacggctctttctcctccctttcctttaatctgattatattctatcatccggcccacaggttgataatgggaatatttttggataagggtaaaatattcttcttttccctgtaaaatattactcataaaccattgtcccattctcgtatttctatatactttatgctataatgataacgctgacgttacagttttctgggaatataaacagagctgtaaacgtccgatttacgaagctataaagctatgctcgattggagaattgtatatgaaattactgatcgtcgatgacgaagaacttacgcgtaccggactgatctcatctatcgactgggattctctggggatcaccgagatccttcaggcagatgatggtgtgaacggactggaaatggccagactgtataaacctgagatcattctctgcgatgtacggatgccgcggatgacaggcattgccatgctggaacgtctggagaaattcctgccggacagtatccctatctttatgagcggatattctgacaaagagtatctgaaagctgccatcaaactaaaagccatcaattacatcgaaaagcctctgcatcccgaggaagtacaggcggcagttctggaagcgcagactctttacaaacaaaagctccgctcccatcgtggcgaagcgatccattctcaggaaatcgctacccggctggcacaacagctgactcttccaccttccgataacaacaaaattgcagatctctgtctggaactggggcagccggagcttcttgagaacggcatgaattttacctctgtgatcgtaaagcttaatgaatctgtggaggcttccggtattttcctggaagatctccagaacgacatttcctgttttctggagcattaccatctgaaatgtctttttgtggaaaaaagggttcagtatctggtccaccatatatatggaaggaatgccctttccccgactaccctttccgcagtgggaagctatatttccagacaatatgacacctgcggaaagcatctgatcgcagccggaaataccgtaacggatattttcagggtttatcagtcctacgcttctgccgtgatccttctgcagaactgttttttctttccggaaaaaacatttctgacggaaaatgccatccgcctgctttccccgaagggaccggttccggattccctgcattcaccggaaaatactttttccaaatatctcctggccggagaagaagaaccctgttttcagtttcttgatgagcttttccggtattatagctgcaatcacacatttatgcctaaccagatccgtgatctttattaccagctatttaatacactttcggcttcccgtaaaaaaaatcagctggaaaccgaacttcatgaaaagcaggatctgatcgtagatacgttaaacaacgccttcacctacgaagagcttcacaaagctctgaaagaaaaaaccgcccagtattttgaagatgcgaaaaattcccagccggaaaattccacaatctttatgatcaaggattatatcagccggaactatatgaacgatacactttccgtaaaagatatcagcggccatgtatacctttccgcatcttatgtatgcacttttttcaaaagtgagaccggacagactctcaatcaatatctgacagaataccgaatggaaaaggccaagcagctgctttccgatcccagatacaagatttccgagatttcttccaaggtaggctatacggatggcaattacttcggaaaaagcttcaaaaaatactccggcttttccccgtctgaataccgggagaaaatgtcatgagggccctctggcgccgtttcaaaaacggctacctgaatttaaacctgcagacaaaattcaccattgccctaatcagcattgtggtagttcctgcctgtcttaccgcctttcttttttatggacgactttatagcatggtggtttccaataccatccggcaggaacaggacgcctccgcaaaaactgcacctctgatcgaacggactatggatacgatcctcgctactacccggaatattacaggacagaatttttttcaggaacttttttatatgccggtcagcgattcagcagaacagcttgcaacatctaaccatgccactgattttaaaaatgccgttcagcgtctgaccacagattccattgttaccgatgtacagatctatgtggattttcctgatgatctgaagacactggatacttatcccaatactgagaatatccttgctcccttaagtcaggcgaaaggtacctactggtacggtatctttcagggaaaccggaacacccaggaaatgttctgtccttccttctatcttggtaccagggaaaaaaagaattatggtgatatggcatatatctgccctttaagcctttattatcactccactgcctataaggcttatctggcagtgtattattccgatgacaagcttacttccattctttccgacaatctatctctggaaggaagtgtttcatatattgtaaacgaacgtgatgccattgttgctacctcagatctgtcattatccggaatctaccaactggattacgacaccatcaaggcttcctttatgtcttccaataacttcattgagcggaacattctggacacaaaggtttatgccggtttttacagcatttccaatacggactggtttatggtgacggtccttccttccccaccgctgatccatgcgagcaaccgactgatgatccagatcgtactgatctatgcagtttttctggttctggcacttatttttgccaatgtactggctcattccattaccggaagactttcttctgtgatccggcagatgcagaccgtccgccacggcccgcctactcctatggaaagtccacaggcacatgatgagatcggtaatcttatcgatacctacaactatatgactcgaaaaatggaggaactgatggagaagcaggctaaagctgcagaagatctccggatcgcagaattcaattccctccaggcacagatcaatccacattttctttataataccatggatatgatcaactggatggcactgcagggacagaccaatgagatcagtcacgcagtacaaagtctttcccgtttttataagctgactctgagccgcaaaaaaggaatctctaccattgcaagggagctggagcatgtaaccatctacgtgcagcttcagaatatgcgctaccacgacagcattgagctgatcacggatatcccggatgagctttcagaataccagatcccgaagctgactcttcagcctgttgtggaaaattccattcttcacgggatcctggaaaaagaatcaaaatccggaactattgttattaccggatggatggaaaatgaggatattgttcttctgatttccgatgacggtgttgggatttcgccggaaatcctgtcaactatcctttccggaaagggaaaaagccagtccggcggcaccaatatcgcagtttataatacccaccggagactccaaattctctatggaaataattacggactcacttattccagcaagcctggagaggggacggatgttgagatccggttccctgcacatcgtgaaaagtaacttacgttccaaaaaaatctttattcagaaatgaggtatgacactatatgaatacacagccagaagctcttttatataattttaacgacccggaacggcttcgccagatccgccgctatctgaaccgtcagaaggttaagacacggatcgtcactgcgccggaatttcttcatccgctgggatatctttttgagattcctggatttcatccctcctcacagtttaatctgggaagcaatttcagcgatgagatgatcgtgctgaaggatttttccagtgcacagatggatggttttcttgcttttttccgtgaaaaccagatcccgcctgttgcactgaaggccatgctcacaccggtaactcagcactggtcttccatccagctgcacgatgagctttccagggagcacacacttatgcataaaaaataaataaaaatccaaagctttgatctgccgaatctgcctgctgcatttccggcagatcttttttatcttatttttcccactgaaaaaggagaccgctccgcgcagtctccttttttgaatatgttttaggttgaatacataagaaagaatttatcttgtcacgatatctaccggtacgttaaagatttttgcaaccttcaggatcgtatcgatgtgtcttcctgtagcagctgccatatgatgtgtcgggccagcctcgctccagcggttaacgaactctcttgctccgcatgtgaagcgtgttctcatgtttgtatcaccgaaggaaaggatcggtccctcctcgtttacgccctcagctacaacgaatttgaagtttccgtctttatcctgagtgatcgcaaggtaggtcaccggacctgtgtacggatagaactgtgtcagatatccgccgcctgttttgccatggaatacttttacgatcttcatggttggcttcttgtcagagatgtccgcgtcaccgcttccggaatgtccgatgatgcagatgtcatcgttgaagtcgatggagtacatctcagaaagctgacctgtaccggaaattgtctttaagatactcattgccatggcaaccttcatgtcaccctctaccgcacatgcagtaccctgtttgatcagcatggagaatgccgggatcagcatactgtcaaggacaccggctttaccctgtgcaaatccgtcgtaatgggaagcgatcattccaagatgctcgtcttttacccatttctcaaaagcaacaacgtatttggccatatcccatactttctcgatggtgccgccgccctcaatatcgaatgtatcaaggatatcctgtgcctttgcacggattgcttcctcgtctgtgatatcatcagcgatcgcccacatcttctcccagtcgaactgttttgtgtagaggaacattctgttatagaggtttgtctcatcaatatacagatccatcatacccggatatggtcttccgatctgtgcaatgttagtctcacggaatcttcttcttacctgagcagccttgcaccagtcttcgatctcagcctgaactgacggatctccgccttctacaacgcctgtgataaccgcatgtctcttgcctgctctctcaaggtcagcaactgcctcgcctacagcaccgcatgcatagccttcacccagccaggaggcaatgtcagtgtgctcataatccagcgctttgatcttctgaacgttcacaagaacaaccggaacatccagatcacggattgccggaagcatgttgtaggatgttgcgtatgtcagcatctgaagaaatacaaggtcaacatctgctgcacggaacttatctcctgccaccattgcctgctcttttgttgtcaccattccgccgtcaacgatctctactgtatccgggatcgttttcttgaatgcgtcgtactgtgcctcaaattccggcaccagtgacggaaactgcggaagatatgcgcctaaagcaattgaaaatacaccaacttttgcctttgtgttaactaacataataaaacctccagttatttttatttatgctttgtatactttgataccgaaggactcatggatggttgtacgagcctcctcgatcgttttaaactcctcggccttcagcatctgtgctgtgatattaccgattgcagtagcctcaccagggcctgcatggatttctttctttgtagcttttgcagtcagctcatttaagtatcctgcattggaaccaccgcctacgatatggatacggctgtaggttcttcctgtcatctcctcgatttcttttgcgatcttagcgtagcaatctgcaaggcttgtatagataacggttgcaatctcgccaagagtttccggaacctgctgtcctgttctgcggcagtagtcctgaacctcttttgtcatgttctcaggagaaaggaagcactcatcgtttgcgtttactcttgacgggaagtcttttgcctcctcagccatctcgcagatctgtgcaaagctgtacgcatcatcaaactcatgacgtacagactggatcatccagagacccatgatgttcttcagataacggaaacgtcctgcatatccaccctcgtttgtgaagttcatctcacagctcttctcagagcagtctgcttcttttctctcgattcccatcagagaccatgttccggaactgatataaatgaaatcgtcatcatttgcaggcacagccagaactgcagaccctgtatcatgtgtagccggtgctacaacctcaagatcaaagccaactgcttccttcactgcgtctgttaaatgtccgatgcttgtgctaggcatgatcagcttctggaatatctttcttggatatcccagcatatcgatcagctcataatcccagtccttggttgtcgggcatacaagctgtcctgtggttgcctctgtgtattcacaggttttctttcctgtaagaaggaaatggaaataatccggtacatgaagaagtgtctctgcctgctccagatactccggatgtttcttcttcactgccatcagctgatatacagtgttgtagattgctttctggataccggttcttgcatacagatccttcagagaaattgtcttataaacttcctcatccattccctctgtacgatgatcacgataacctacagtatttccaagaaccttgtcatccttgtctagaagcacgaagtcaacaccccaggtatcaacacccatgcttaccgggatcttgccgatctctttacatttcttaagaccatttacgatctcgttgaaaaggcggtcaaactcccagcagagctctccatccttcttaaccatgccgttctcaaaacgatagatttcttccaggatcatttttccgttttccatatgtcccagaatgtgacgtccactggatgctccgatatctactgctaaataatatgttgccatttttaaatcctcctcaatatgtaagcttctgatcactttcatatctgatgttgtatttatcatacatcaggatccttccggtgataagaacctcttttgtcaaaaaaagtgtctttatttgccaataatacagcgattatttatgaactactacattatttgtttaaaaaatccgctgactgaatcagccagcggatctcttatttcatacgtccgaacgcaatccgcgttcattataacttcacgatcttatcaattatatgatttgattagtcataaaggttaggagcgatatcctcgtcttccatatttgttgcatcataccagtaaccgtctgtaggaacatcctcaagctcctggccgtttgctgctgctgtcagagcgtagattgcatagtatcccatcataagaggagactgtgtaacagcaccaatgaatgtgccatctttaacagctgctttgatgatagaaccagcatcgaaaccaacaccaactacatcaccgtttgccgggtcagaaccaagaacgttaaggttagcatttgctgcaagaacaccctctgcagaaacctggttggaaccgaatactgcgatacagttctcctgggaaaggattgcctgagcctctgtggagcaaagctctacagttgtctgtgccggaacagctacctggataacaacgtctgcgtctttagcatcagcatcagcaccctctgctgcgttaacatagaactcgttaccgcttactgctacagtcttgccatcagcctgaagaagctcgatcatcttgttgatgaatccagtaccacgctgctgaatgttctgagctgttgcatcctggttaacctcaccgatgataacctgtccgtcagcatctttaacaacgtctttaatggagttgtacatattctcagctgctactgcaccagcctgtgcgttgtctgtacaaacctcgcatactacagatccttccggagcatcagcgatacctgtatcgaaagttacaaccgggatacctttttctgcacatgtcttaagagcatcctgaacagaagatgtatcgcaagctgcaagtcctaatccaacaggattggagccgatagctgtgttgatcatgttaacctggtcagcgatatcggactcactgttcggtccctgtgctttataagtaacgcccagctcctcagatgctttcttcataccttcctgagctgcatcccagtatgtagactggaaagatttaaccatcatcgggaactcataagcttcgtttgctttcagtccgtcgaactgtgcggtaggatcctcagctgctgtggaatctgcggattcctctgttgctgcatcttctttctcctcagctgcaaaagctgctgttgcgctcatgcttgttaccattgctgcacagagcattaatgccataaccttttttgctttcatataatatttcctccttaaaatatattatatagttttttatgttcatacgccgttgctaccccttggcgtttcacatctttgattatcgggtgctgttcacatttctctgtaaacagcacccttacttattatacacacttcttaatatcagtgtgctgcttttttctctttcaggatatcgatcagaacggctacgatcagaacgataccagtgatgatctgctgccagtttgcctgcaggccgatatatggaagacctgttttcagaagcatgatgacgaagataccaacgaatgtaccgatcacggaaccatatccaccagtagctgctacaccaccaacgaatacaccaccgatagcatccatctcaagtccggcaccagtaccaggctgtacagtaggtgttactgctgcgtatgcgattgctgcaagacctgtaaacagaccgcagacaacgtataccattacgtgatagaactttgtattgattccggaaagggctgctgcctctttgttggaaccgattgcaattgtgtaacgaccgaattttgtgtggttcagaatgtactccataaccagtaccaggatgatcatccagaggaaaccaagtggataacgggaagcgcttcttcctgtaccaactgttaccttgaagatggtatggaaccatccgcccggctgtgtaagtcccggccatggtgttgcgctgcaaagagagccggcaccacgggtaatcatacaggtacaaagtgttgccaggaatggcggcaggttcataacacctatcagtacaccattcagtgcaccaactgcgataccgagaacgatacagacgagcattgcaagtgccacagggcagctgttgtttctgatcagtgttccggcgatcagtgcgtatgctaccataccagttccgattgacaggtcaacaccaccagtgataagcgggaatgtaactccgatcgccataagaagatcgtaatatgagaaatccagcatactcaggatcgtggtgtactgtctgaattctttactcaagcctgagaatattgcacacaggacaatgataacgagcaaaacaataaatctctgatcacttaaaatactttttttcttcttagtcatgactttcctccttaatcgatattccgtgtggccttgtccatgatgttttcctgggttgcctcggagatatcaatacatccggtaactttaccctcacacatgatgatgatacggtcactcattcggagaacttccgtcatctcagaagaaatcatgataatggatttgccttctgctgccagtctgttcattaatttgtagatttcgttcttggcaccaacatcgatacctcttgtcggctcatcgaaaataaggatatcgctgtctcgtgtcagccatttagcaataacaaccttctgctggttaccaccagaaaggtttactaccagctggtcggtggtcggtgtctttgttgcaagctcatttacatatttctctgcaacctgtttctcttttgccttgttgataaaaataccattggtaaactcttccatggttgccagtgtagtattttctgttacagatttctgtacaacacagccatatcttcttctgtcctctgacagataaccgataccgtatttaacagcatcctgcgggctgttgatggttacctcgtgaagctgtccgtctttacccataacagagatcttaccactctgtttcgggtctgctccgaacagtgctctggctgtctcagtacgtccggcgcccatcagtcctgagaaaccaaggatctcacctttcttcagttcaaagcttacatcctgaaccatcttgcctgcattcaggtgctcaaccttaagaactaccggtgcatctgccggaactgcactctcctgcttcggatcctcataaataacacgaccaaccatcatgttgatgatatcttcttttgtgctgtcttttgtgatgagggttcctacataaccaccatctcgcatgactgttacacggtctgtgatcgttttgatctcatccatacgatgtgagatatacacgataccgagatttttcttacgaaggtcacggatgatctcaaacagatctgcgatttccttctcggtaagcgctgcggaaggctcatcgaagatgataacctcagctttatgagagattgcttttgcgatctcacacatctgctgttttccgactgtcaggtttttcatcttttccttcggattgatctcaatgttcagatcctggaaaagctttttggaatcctcgatcattttcttatcatcgatggtaaaaccttttttcggctcacgtccgatgaagatgttctgagcaacggtaagatcacctaccatgttcagctcctgatgtacgattacaacgccggcatcctgtgcctcacgtgtattgtggaattctgtttcctgtcctttgtaaacaatggaacctgaatccttctgataaataccggtaagaaccttcatcagtgttgatttaccggcaccgttttctcccataagtgcatgtacttcgccgcgttttacttcgaaattaacgtgatccagagcatgaactccaggaaaggacttatcaatgtccttcatagttaaaataacttcacccattgtcgcatcctccctctaagatcagttctttctgcgtcttgcagaaacgtcgatataaactgcaacgataacgatgatacctgtgatgatcatctgctgtcctttaccaaggccaaatgccataatgccctgctgaagaagagagatgataaatacgccgattacagtaccgccgatggaagcaagtccaccaaccatggatgtaccacccataacgcagcctgcaatagcctcattgttgtactgatcgccataacctggctgaacagttgtgtatgtagctacaaagaagagtgctgcaatacctaccaggaatccgcagatcatataagcaagcatttcccatttctttgtgttgacaccggaaagacggacagcctctttgttagatccaaggcagaggatgtaacgtcctggttttgtgttgtaaagaacgataccgcagataactgccattaccaggaaaataacaattcctacagggaagccgtttgcggaaacgatattacggaaccagccgtttgcctcactggctgccggccagcttacggactgtgtttttgtgaataccgaagcaataccttttgcaatattcatggatgccatggaaataatgaatggcggtactgacatgtaagaaaccatccagccattgaaaataccaaagcagagaccgatcagaatgcaaaggatcatggcaactgcacatggaaccttgtaggatgtcatgcagtaaccggataccagtgcacagcagaacattacaggtccgatggagaaatcaattcctcctgtagcgattacgaatgtaacgccaagtgacaaaaagcccaggaagtacacatagttcaaagtagacttgatactgtcaacagccggaaacttgtttccaagaactactttaaaaaccaggaacataagaatcagaacacagacaagaagtattctgttcaatccgagcttcttaacgattggattttgttttaacttttccaatttttaccctcctcacgttttgcacgtatcttgtgttttcttggttattataataccgtcaaaaatcaataattgtaatagaatatctttcaaaaaaaggttaaatatttactgtactgtaaatatttaacccttttctttgtgcatttatgactatttacggtgtaagatcaccatatgtttttaacgtattaaacgggaaaagcagtttttcgatctcactggtatacatattgtcaggagtcaccagctggcacccggaattaatattcttcttatagtcttctccacgcagcatcttaacagtttcccgaacacccacatatcccattttaaatgccttctgtacaacgattccctgaaagattccgtgttccatcagctggacggcctcctgtgagctgtctactcccaccaccctgatccggttctctgcttttgctgcctttactgctcttgcagcacctacagaggaatattcattcatccccgcgatcatcttgagatccggatattttttcatcagctcttttgtaagctcataggacttgtcatactgagaatcacagtataccacatccacgatattatccttcagactgccaagtcctgtccggaaacctttttctctttcaactgccgtagatacaccctttacatgtgaaacgatcgcgatctgatcatccgctcccacaagatccttcgcaaacctgccaaggatctgccctgcttccagattatcggtcgcaacggtaagatcctggaccgcttcctgtgtataggaatcaataaatgcaatatgtattccctgttcctttgccttcttcaaaagctggtcagattcagtgaagctggacggcgagatcaggatcgcgtccggtttttcttctgttgccctttcgatcagcttgttctgtccatccacatcattctcttcctcaggtgcccatacgcggatatctgcattatattcctttgcagccatctccgccccctggatcagtgacgtccagaaatcgttggtaccgtccacaaccttcggaatatagatcagcgatagttttctctcttcttctacctgtttataatagactattccggctacaagccccaccacaaggcagatgaccactccaaaagtcaggagttttctatgttttttcatattgattcctcctgtattcccggaatggtgatcgtggcagtggttccgacacctttttcactttcataggcgatcccgtaattttctccataataaagcttcagacgtttctgtacattgtaaacacccacaccattggaatgataattcaccttatgcttatcataaatatgtgacaatgtttcctcatccatacctacaccgttgtcgatcacctgaagaactgcatttccgtccttcataaagccttttacctgcaaaagtcccttactctctttatatttcagtccatgatagatggcattttcaatgatcggctggagaaccagcttgatcagagggatatttagtatagaaggttctacatcgatctcgaattccaacttgtccttgtaacgcatcttctggatcgtaagataacccttggcatactccacttcccttgcgagaggaaccacttcatcttcattactgatgctctgacgaagaagacgtgccagggatgctgtcatcagaacaacctcttcgtactttctgccctctgccatccagatgatcgaatccagggtattgtagagaaaatgaggattgatctgggactgaagggccttaagctcactttttctctttgcttcctgttccttcacgttctgctccataagatcctgtatcctatgtgtcatcacattgaaagatttcgtcaggcttccgatctcattctctgaatcgatttccacatctgctccgtcaaaatgcccttcctgtactctggacatggaatctctgagacgctgaagaggatatgtgagactctttgccagaaatctggaaaaaagcagtgccacgatcatcagaagtgcggaaataagcacataaatactctgtgcctgattgctcttgcgcagaagttcgctgacgctcatacagcccacaacggtccatccggttttatttgatctggaaatagaatacagctttcctctgtttcccctttcggtacgcaccgtatcttcttttgatttcacgatcaggtcgatattctcagtctgcaattcattgtaaagctgctgctgttggggatggtatactatatttccgctttcatccagaatgaatgcgtatccctttttcccgatcgtattctgatcacaaagttcactgatggcactgtaattcagatcaataaaaaagactccctctttctcaccgctgttggaaaaattacggattcccctgcttaaagtgatcacccacggacgctctccgctgatgatgtgctgtacatgagaagatgtaagaagcgggccttccggcttctgtaaagcttccagataccactcctgggtggaaagcttcagatccggattcacagactgtttgccgtcgttgatcagcttccgtccattacttccaatgattccaagatttcggatatcacttcgtccatccagaatagtcttgaactgattgatcagacgctctcttgttccattgtccacattttcaccaaaaagatattgctgtacatcctcgttactggagatcatataggctatattttccatgtaatcaatataggaatcaatattctgattcatctgctgcacgatattctgggtgtagacagcagaattttcaaaaatagaattgcgggtatatctcatggaaacacctgttatgaccagcaccgcacttaaaagcagcaccgtcactaccgcaaagatcgcactctggatactcttaaattttcctatgatctttgccgcaaaccggatatctctcatttacgtttctcccttgcatattctgttggtgtgcagccggtcatttttttgaaggaaatcccaaaataatggggatctgcaaatccgactttctcggcaatttcataattcttcatagttgtattctccagaagttccttcgccttctccatacgggtacggatcagaacctctgtaaaagtctctcccgtaagatccttaaagatcgtactgaaatagcttgtactgatattcagataggaacagatactgttcaggcttaaatccggatccatataattcttctggatataatccagggcaagtctggcctgacgctgtccgctggagctgtttgcatcggaaagtgtctggaaaatctctccgatatgattcctgaccagttcaacagcactgtcaaaagaattctgctccgtaacctgctgcagaagtgcttctcttttggaaaaaagcctgttgtccggaaccatatcctcacaggtttcatctgctgcacggatgatctgctgaagatacacgcaggcacgactcttatccacccgcgcttccttgatctcagaagagatctgttccagaatatgctctgcgttttcctttttacccgctttcagagcagctggcagcttctctacataagctttaatggaaagatttttttcctccggctgttcttccatatcaataagaaggcttcctccaagaagataacgatattcaatagctttctctgcaagttcatgggatgcacgaagctcctgctgagttctggcccagcttcccacaccaatagaaatatccagcgacatcagttccttcagcttatcctggatcgtcctgcagatctccatgatcttgtgttcaaactctctggtacggtttcccatgaaaagagcaccaaccttgttatttccggcctgatatgccactcctgctttttctttgctgatgatctcatcactgatattaaaaaggacaaaagacatcagtgcactctcctggcgtttctccgcagtaagctgactgccgtccgaatacagatccagatcaaaaacagccacacgataacatgctgcctcaagatcgattcccagtgctgcaagctcttccagactttcctgccgtgtcttgatattatccacaaagccctgcagcgctctggaacggatcacaatagcgtttttctgataattctcggaagtctgtgtcagacgttccagcttctctttttcttttctttgctggtccaccttctctttcatttttccgataacatttctgagttccatggctgtcaccggcttcagcatatattcactgacaccatactggatcgccttcttggcatactcgaattctccgaatccgctgaagatcacgatcacgatgtccggataattatcatggagaaaacggctcagttccataccatccatatatggcataaggatatctgtaagcacgatatccaccggatggttctgtacaaattccgctgctgctttcccgttatcacagtctcctaccagctcacagtccattgctttccagtcaatattctcccggatcgcatctcgaacaagtatctcatcatctaccagtaaaatacgatacataatttctgttgtccccctctgatcagtttctgttgtttttattgcacatccccctgacagatccttccccccgtctctgtcattttcattggtaagattactgtcctttctgtgaacaataactgttaattctttttatatgttaacatgtttggttaaaatttacaacggagtttcttagtccaaattaaatacaaagaaatcccgcatccaacatatgggatacgggattttcctgcatatttttattattttacgataacgccatcctcatcccagaggtcatgccagtcatttgcaccatgccacaggaatacctggccttttacaagacggttgcctttttccagagttgcgatggttgccatttcctcatctgtaagtggatcctctgtgacacatttcaggttgcttgcatagttgtggacagagaacggaatggagatctcgcctctctgatgtgcccatttcagagcgatcagagccgggtgaaccccatgtgcttttgcgattgcctgcatctccggaacctccagatccgcaacatcctccgggcagatatctctctccggtctgcgtggagaaccgattggcatatagcctaccggctggatgttatgctctaccagataatcataaagctcctgctgttggaagcatacatgaagctcaagctcacaggttgcaggtttgatcttcataagcggaagaactgcctcaagcttcggaatggtcatattggaaataccgatgtaacggatctttcctttttctaccaacgcctcacactggcggtatgtatccataaactcctccacactgaagggtttggagtccggatttctggaatccacatcacatcccggtgcatgataattcgggaatggccagtggatgaaatacatatccacataatcgcactgaagatccttaatgctcttgtcacaggcttcctctactcttctgtgcatgtcgttccatacctttgtcatgataaaaagatccttacgctctacaacaccttcgtcaaaagcgtccttaaatacctggccgatctcatgctcgtttccgtagcatgcggcacagtcaaacatacggtagccactgcggatcgcgcctgcaacagctgcagatacatcctctgcggatacacggtcggaaccaaatgttcccattccaacacacggaacctgctcgccggaaggaagtgtcactttcggcacaattgccggattgataacttctgccatctttacatctccttttttataaaaattttcttattataagcttatcttataaacgcctgatctcgatcttcggaagaagagcctccatatcctccatcacaaagaatcccgtttcctcgcgcatggctgccgccgctgagatcgcactggctctttgcagagtctcttccagggaaagtccctcacttaatccaagggcaaagcctgcgatcatggaatctccgcagcctacggtatttaccgcatcgatcttcggaaccaccgcacggaaaatcccttcctctccgactgccagggaaccatctgcaccaagcgagaccgccacgatctccacaccaccggcatggatggctttcgctgcttcaatgatatcgttgatatcgtcacaatgcttgcctgtcagcatacggatctcatcaatgttaggcttgatcagtgtcggtgctgccttgatcccctcttccagaagcttgccactggtatccaggatcaccggttttccggcgtctttcacaatcttcacaaggcgctggtaggcacttccgtcaagtcccttcggcacgctgccggacatcgccacaacagaagcgtcttttacaagctggcggaattttttctcaaagccctcaaaatctgcctctgtcagtgtaaatcccggctccaggaattcggtctgtacatgattcacctcatcccagatgttgatacaggagcggctctccgccactacatggtaaaaagcactcttaatgccaaaaggcttcagggcagcttctatataattgcctgcgtggccgcctacaaagccggtggcaaccacttcagcgccgtaaatggacgccggcttggaaacattcagtccctttccgccgggaacgtaggtacattcacgcacacggttcacttcgcccactttaaaatcatccactacataacgcttgtcaatggcagcgtttaaggttactgtcaggatcatatcagtcttcctcattggaaagaaggatctttccttttacaaggcccggcgtcttgaacagctggaaggcctcctgtgcctggctcatcgggattttcttatagatgaagcccgggtcaaacttcagctggccggttgcaaaataatgcgccgtcaactcccactcacgtcccggatacggggcactgtaggacatccaggaaccggtaagcttgaactccttacggttcatgttctcccactccttcggtgtaaaggtaaggttttcatgaggagtaccaatgaagcatacatgtgccttgtttgctgcaagctcaaatgccatatgcatggtaggaacctgtcctgctgtctcaaatacgaagccgtagccctttccacctgtaatggccatggctttttccatatatccctcttcctttgtgttgatgatctcatctgcgccgagacgctttgcaagagcaagtctctcatcgctgatatcaaagaccactaccttcttggagccgaagatctttgtccactgcatggtgaacataccaactgtaccgccgccaaggatcgccacatactcaccgccgtggtaatcgttctggaatacaccgtggatggctacggttgcaggctcaaacatggctccctgctcatatggaacattatctgcgaatggtactgcattctgctcaggaaccactacataatctgcgtttgctccctgctctctggaaccgatgaagctgtaatgcttacagagagagaaattacccttctgacagtcgtcacatttcatacagggaagaagcggtgcaccggatacacggtcgccgaccttcaccttggtaacgccttctcccacttccaccacatcgccggaaaattcatgtccaagcacgatgggataaaaatgtacgccgtgatttaatacacgcgggatatcagatccgcagatcccggaatatcttaccttgatcttcacatggcccggtgttacctgaggttcttccacttcctgatactgaacatcctcatttgctactactactgctgctttcatgatcacttttcctcctcatttctcatcataggttcaagagatttatagagatttaaataggttttataggttttctcataaacgtcccggttttccgggttcggttcatgtcttcttgtttcctttaccgtaagacggatggcctcatcataatcctgatacattccaacaccaacacctgccagaatcgctgcaccaagtgttgttgccgtatcagaggacggcactacgatgggttttcctgtgatatcggatttgatctgtgtccagagaagagaatttgcagagcctcccattgcacggagaacttccacatctgctcctgcttcctttgccacctcaaggttgtgtttcagagaaagtgctacgccttccatacaggcacgtaccatatgtcccttggtcttggcaaaatccagtccatagaatacgcccttcgcattaggattccagatcggggaacgctcaccggacatatatggaagaaataccactccgtcactgcctggtgcgaccctttccgcgatctcattgagctggttcagagaagatcctttttcccctgctacagagcgctcataatctgcaaactcacgttcaaaccagcgcatgacaccaccacctccggtggttcctccctgaaggagccactgtcccggaaccacgtgatagccaaggatcagtctgggatctgccttgtactcatccatgcagatgctcattccgccggcctgtcctccctgctcctgtgtctcacccggatggatcactccagcccccagtgttccgcatgccgcatccagaccaccggcaacaaccggtgttcccacagcaaggccggattcctccgccgccttctctgtaactgttcccacaacatgatcacaggcacagatctcaggaagaaattccatgggaatcccaagctttctgcacatatcctcatcccaggctgcttttctcatgtcaaagcaatgcaggccatagccctgggaaacatcctggctcatcacacccgtcagcttatatgcaatgtagctgttagactgcaggatcttgtggatcctttggtatacctccgggagattttctttataccagaggatctttgcagttgtgtaggacggctgaagggaattaccggatacttcaaaaatctgctctgccccgatctcttcattcaatctgtcacagatagactgtgctctggtatccatccagatcggagtgtttgtcagtacatttccgtccttatccatggcaatggctgaccagctctggccgtcaataccgatgcctgcgatctcctcaggtgctatccccgctttttggatggccttctttaccgcctgacaaacagcactccaccattcttccggattctgttctgcccagccctccttcggatagtaaactggataatcgccgttggccgcagccacaaccgttcccgatttttcaaaaaccgcaaccttacaggcactggttccgatatcaatacctaataaatatggtttcattatagcttctccttctcgtccagcacacagacggattttcccatgatgatctctgcgccaagcttctccgtgatcggttctgtttcttcacttgcagccccttccagccgtttcagcatgattcccgccacttctccggcaatcccctgtgtaggctgtgccacaatggtaagcttgggattgcatgctctggcaaactgcagattgtcaaaaccgatcatagacagctgttccgggatcttaagacccagctcattcatcccgatcaccgcccccatggtcatctcatagttggtaacaaacacagccgtcatatccggattgtccgcaacaagcttctctattccctgcacaccgccctgaatggtataatcgccgtgatagatcagagattcccgtaccggtatattttctttttcgtatgcattgcggtacccctggagacgttcctgagctgtggaaatttcctccggtccgccaatgatcccgatcttacggtgtcctgcctgaaaaaaaactctcattgcgtcctcagccgccttctcgttgtctacaagaacactgtcacaggaaagctccctgatcctgcggtcaatgagtacgatgggctttccggttttctggaattttttcagatgattgccttccgcatccaccggcatgctgatgatcccgtccacacgcttccggcttaaaaactccactgcatcccgctccagtctcttatcggtacggcagtcacagacaatagtcgcatatccgtgactccttaagacatcctccattcctgtgatgatctccgcgcaaaaggtattgttaagctccgggatcaccacgccgatggtcttggtagcattagtcttaagccctctggccacctcattgacctcataatgcagctcctgaatggcctcctcgatctttattctgtttttttctcttacgtttccgccgttaaaataagaagaaatcgttgcgagcccaagtccggtccgcctggcaatatctttcatggttgctgccatacagatcactccgtttctgcttttttacagaagatcattctgcctttccatcacagccgcaaaccttcatacgcgcctcaaccagctccttcactgcctggatcgctttctttccgtaggctttcgggtcgatggtgttctcattctctgcaaaggtctccttcactgccctggaatatgcagcacgaagctctgttgcaaagttaaccttgcagataccacgttttacacagtcgctgacatcctcatcactgagtccggatgccccgtgaagaacaagggggatatctacgacttcgcggatctcgcttaagcgttccttgtcaagaaccggtgttcccacatagaaaccatgtgcggttccgatggcaactgccagtgaagtaacacctgtacgctccacgaattccttcgcctcctgcgggtcggtgttagtgtctgcctcagcctcaagatcatcctctttaccaccgaccttaccgagctcagcctcacatgggatatccagggctgctgccacatccgcaactctcctggtctctctgatattatcctcaaaatccagcttggaaccatcgatcatcacagaggtatagcctgcatgcattgcctgcatcgcaagctcaaagctgctgccgtggtcaagatgaaggcataccggaacggaagccttggctgcctctgctgctacgatcgcagcgtaagtctcaaccgtaccatatttaacagtagaaggtgttgtctggatcataaccggtgctttcagctcctcagctgcctggatgatcgccttcaccatctccatattctctgcgttgaatgctcctactgcatatccgcccttctgtgcctttaacagcatttccttcgatgtaaccagtggcataatcttctcctccttggaatcattgtgtttgttttgtattattttctcatttggtcctgaaaccgaaacgtttccgtttaagttcatcatagcgctccatacgttttctgtcaaccataaaattttcatcatttacaggaaaatattcccttgaaaagaagaccaaataccgttagattaattaataagagttctaaagcctgtggccgggcaggtctgtctgatactaccggcgtcataacagtttcggaaatccatgtatcctgttctgatcacctgagcctgatgctgtaatttccgaaatgctgtaagtacacaatgatcttaggaggatataaactatgttaaaaggaattccagaaatcttatcaccagaattactgaaggttttatgtgagatgggacacagtgaccgtcttgttatcgctgacggaaacttccctgtagaatccatgggaaaaaatgccatcaccatccgctgtgacggacatggcgttccggagatccttgatgccatcctgaagctcttcccgctggatacctatgtagagcatccggtaaacctgatggaagtaatgcctggcgataatgtggagacaccaatctgggatacatataaagaaatcgtttccaaacatgacgagcgtggcgaaaaagccgtcggaaacatcgagcgtttcgcattctatgacgaagcaaaaactgcatactgcatcatctccacaagtgagaaggcactttatgccaacatcatgcttcagaaaggcgttgtgatcaacaacgactgatctttcttttgaactgcctgatataatcatatataatacacatattcaaccaaaacataaaacgcccggatctggaatgtttcaagccagatccgggcgttttatattttaacacttttatctctttgctgcttttgcggcatatcctccgcagagtacttttccaccggaggtttttatccctgcacgcaccgcatagtaatacgttgttcccttttttgcggtcttatcctcaaaggaggaacgactgcctccggaaactgtactgatctttttccatgaaccctttccggtcttacggtagatctgatagcaatctgctttcttctgcgctttccagcagatcttcagccccctggaggtcttcctgacactggatatcttctgaagttccggataggacaggatatagctgcttgcctgatatcctcctaaaacttttttcccgtctacattcttatatggcctcacagcataagcgtaggaggtgattccctcaatcttcgtgtcctgccaggacaatactttgttgttaacggttccaatccgaacccagcttttcccctggagtttccgatagatatgatagccactggctccggaaaccttcttccaggataccctgttacatggtccgctgacagcttcagccactgcacgggccttccccagctccgcttttgctgataacggcgaagatgcggctccataaaccgtcttctttccggaacattcataagaagcccggatccgatacgtataagtgcttcctgttttcactgcagtatcctgccaggtcactacatctgctgtcacagttgctattttttttgaatttccgctttcatcacagcgatagatagcataacgattgcagccgggaactgctttccaggagatccgtatcctgttaaatgccttggaaaccagttttacacctgtcgtctgacgaagcttcaccgtaaccttacaggtagctcggattcccctggcattttttccgtagcaggttatggttgctgttcccggattttttgcagtaacaacgccgcttccatttacagcagccacactggtatctgagctttcccagacaatgccggaagcatccatctcggatctggtagccgaagcattcagtgttttctgatctccggaatacagacttatctcagaggaagaaagctgcatcctggccgcactgctcagagtcctggtatgcgccttgatcctcggcgttaccgatggattaaattcaaccgcatccatccaggtatcctccgcgttatatcgcagaaagctctgaccggatacgatagacggagaaaagctgcaccagccataactgacctctgcctccacacagtattttatatatgtgcttcctgcatttgtcaccacaatagaatacagactgttctggctgagcagaacctccgggatctgaaaggtcataaccccagccatcggctgactgcaggaaaccggtgtggaatatgccggtgttccactggtaggatcactggcatccttcagatttgtgtatacctgcacagtataggaattattggcagacatggagctaagagtcacctcaccaagcgattccgcttttccgtttcctgcactggcacgaaaaaccgtggacagctgttctcccgcatacatacggatggagccaaggcctgacgttccgtcataaaaataattgttgctatatttcggtgtattgacagccgtagccgcaaccagctcactgacagacttatcctcataggacatataaaaatatccggattttccccagcctgtaccccagctgttcttgacgatccaggctccgtctccctttaccttggaagatgcccggaaattcttcgcagaataattgtcatcccaacccaccactgtaactacatgattcacgttcttggtgctggtaggataggaataggccgctgtacttgcattgtaataggcattctgtgcattatacatcacagtaactgaattatttgcaaccagaagcttcttcatggcatttacggaataatcggaaaaataggcatttttcagataagcagctgcattgtacgccttggatgccgccggagtcacaccggttttctgtgtatgcgtggaatctgttgccagcggcacatccccttctgttgtcattccggaccaggtactcagaaacatggaagccagaagagcatttccgccctcatgataatctgcgtttcctttatcatctgtccccatatgcttattgacatccccgtaggtatttccaagcgggtcattctttctgtttgcaaaaaaatacgccagatgctcttccgacagatcataagttccaaggccctgggtcagaaacgaagtttccagaagagaggccattccaaatgcccagcacataccgtagggctcctgattctttacggaagtgacatatccctgatccgctgcattataataagacggataggccgcagctcttcccatcggtacctcatccacatcatttccgatctccacggcggtggaataagaggtcagattatcaaagggtgccagctgttcctgttcctcttcctccgtaagcgggcggcccttgatatattcaatgccggactcatcactgtctgaggcatccccgaagctctcctcaccgtcaccaaaggtatcctcctgggaatcagaagacgatccttctgatgtttcgggagtctctgtatcctcctcggagctctgcaaagctatatcctcggtatccccgtcggctgcctctgcaatatcctctgtctgttcatccgggataccggtattctctgcggtgttctctgtggtattcccttctgcggtctccgtcgtatcctctgcttccgccgactgcgtctgtgtatcttctgaccattcttcattgaagccttccgcagaatcactgaagcctcccacatcggctgccatgaccggaacctggctgcccgcaactgccacacacaaaagaagcggcagtaatttcttcctgacaagctgtaatctcttcacaaaattctccacttttcttatattgatctggtttatctgttaacgtttcttcaaatgataacccagaattccgattactgcaagtactgttgcgattccgatccagataaacggacttttataccaggaattttcttctttaaaggatgtcgcagctgtgccattgaccggcttggtgacagcttcatccgcagattccccaccttctgttgttccatccgctgcaggcgggccctggacctcgccgctctgagcctgagaactacctgtgctggccgtccctgcaggtggcccctgaacctcacctctctgagcctgagattcatctgtgctggccatctctgcagacgttccctgtccttcgccattctgagcctgagagctgcctgtgctggccgtccctgcagacgttccctgtccttcgccggctgcggaatcctgcgtatcggatgcgtctccctgattcactgcagaagtctctttctccgtgttccctgcgattccggccttcgccagctccgcatcctttgagggccgcagctcctccagcggcacataaccgtatctgccattatactctgtatatccccaggtctcaccattcttctctgtctccccttcgatatgcagaacagtaccatcccttaccgtcttatcattgagcttttcaccttttccgtcggtggacggatagatatccacaccaactccaccggaatccacagtcatataataatctgtggtatctgccggagcttccaccttcaccacaaccgacttgtccgcatacaccggaacactcatactcagcaccagcattcctgccagaatcacacctttgcaccttctcattgctctttcctccctcaaaaaaactcactgtcattctatatgcataaaatcccctcatatttctcttttgccttggctccgaaatataagaggatcttatcatttgttatatccagtatcttttttatgcaagctcccgctcacacatatccagcgcagaagcgatcaccgcatccatgtcataatatttatattcgccaagacggccgccgaagatcaccttcggttccttctctgcaagctccttatactgtccgtaaagcgctccgttcttctcatcattgaccggataatacggctcatctccaggcttccactcggaactgtattcccggctgatcaccgttttcggaagatcattaccctcctcatcctttccgaactcaaaccatttatgctcgatgatacgggtccatggagtctccacatccgtataattcactgctgcatttccctggaaattaggtttatccagtgtctcattctcaaaacgcacggaacgatactccagagtacccagcttatagtcaaaatacgcgtcgatggcacctgtgtagatcactttctccgccattgcatcgtactgctcttttttctccagataatcctcattcagccgtacctcgataccgtccagcagattggcaaccatcttcgtataaccacccaccgggattccctggtacaacgcattgaaatagttattatcaaaggtcagacgcaccggaagcctcttgatgataaaagcaggaagctccgtacatggacgtccccactgcttctccgtatagcccttgatcagcttctcataaatatccgtacctacaagactgatagcctgttcctccagattcgaaggttccgtgatccctgcagcctgccgctgctcctcgatctttgccgcagcctcctccggagtcaccacgccccacatcctgttaaaggtatacatattaaacggaagactgtacagctccccgtgataattggcaaccggactgttggtaaaacgattgaaggtggcaaaccgggtgatataatcccagaccttcttattattggtatggaaaatatgtgcaccgtatttatgcacgttgattccttccaccttctctgtatatacatttcccgcaatatgcggacgcttgtcgatcacaagcactgacttcccggcacgcttcgcctcctgtgcaaaaaccgcaccgtaaagaccggcacctacgataagataatcgtacattgatttcattctccctgttctttcattgatactgttattttaacaccggaaaagggcagctggcaagaagccactgtaaaatcccgataaaatatcagatatccgcttctcaaacaccaaaatgtatgataccctgtaactggatcagataataaaactactctgatcacataaacagatcgaaggtggtgaaacctatgggtacaaaggataccatcaccaaagattacatggctgacaaccgcgtttttgcggacgtgttcaaccatatgctgtacaaaggaaaaaacgtcatagaccctgacacgcttcatccactggataccacagttctcgctgtcccctacggatccggcacttcagaagttcccgtccagaaattccgggacgaattcaaatctcttaatgttatgcacgatgattcaaggatctatcttctcctggggattgaaaatcaatcggaacagaactttgcaatgccggttaagaatatggtctacgatgcattagaatacgcagggcaggtagaaaattccgccagatcacacagagaagcaaagcaatggccttctacatccggagaatatctcaccggcttttacaaggatgaccggctcatcccggtcataaccacggtcgtgtacttcggttccgacacctggaacgctcccaggagcctccacgaaatgctctctgtccaggaccccgaaattctttccatggtcccggattaccggatcaatctcttctcacctgccgagataaaggatgaaaaacttgacaaactccagagcaatctcaaagaagtcatgctcttcatcaaatattccaaagataaacggaagctccaggagcttacatcacagagtcccggcttccggtcactcgagttcaaagcagcccgggtcatcgactccataaccggtatcaacttacgtttcacagaaacagaagggagggttaatatgtgtcaggctgttcaggaaatgtgcgatgatgcacgtgccgaaggccatcaggaacaagctatgctgacagcacagcgtatgcttcaggatccaagattctctcctgaagacatctccagattttcaggcctttctcttgaggacgtgctgaaattacagaagaaatagttcgtattgaaaatgctcagatcctttgtgagggatctgagcattttgctattttacaataccaatattactttata

SEQ ID NO: 204 - DNA, 52803 bp, Unknown
  gut microbiota DNA sequence
ctatcggccgtgctgcccggaacagcgaaggtcatgtgatcatgtatgcagataatatgacagaatccatggaaaaagcaatctcggagacagaaagaaggagagcgatacaggaggcttacaacagggagcatggcatcactccgaccacgatcaagaaggcggtccgtgatctgatcgctgtttcgaagaaggtggcagagacagaagtgaagcttaagaaggatccggaatccatgaaccgcaaagaactgacgaaggtgatcgcccaggtagagaagcagatgcgtgctgctgcagcagacctgaattttgagcaggctgctgagctgagagacaagatgctcgaattaaaaaagaatctggaagaattaacggaataggctgcaaagcagctgacgatacaatgcccctggctgtcagcgtcaggggcatttctatggaataattaaatagagaagtgagttaagggtatttgcctgagcttttgggaagaatttttatcaggatttttttccattttttcatagcaatccctccttcgaaaaaatatgaagattctctttattaattgattataagtaaaattccggagaagggcactggcatttgtgccagtaactttgttataaagaagagaagaagttatgtatgctgttcccggtaggcggaaggtgtgatccccattttctttttgaagctggtgctgaaataatattgattggcataaccacatttcaggctgatctccttcagactcatagtagtcgtagtcaggtaacgggcggctgcggaaatacgctgagatgtgataaagtcgctgatactgatcccctgatttttttgaaaagagcacttaaataagcagggcttacattggcagaggcagcaatatcattgaggcagagcgtattgtcagtgtagtgttcgttgatataggaaatcaccagttcacagagcttctggtgataatcattcatggaggaatcaagcttccggcataaaagatggcacagatccttcagccattgacatagctcttccgtattatgaaactcatttatgtggttgtaaacatacaaaattttagtttcaaggtcatgcgtatccagatttaattcatagaaaaatttcaggatccggccaagaagagaataaatctgtatgaaagcgaaattctttgtgcgaaatttctgagtgagccagtcggaaaaattctgaaaccagagatctatggcagcggtatcctttttgcagagaagccggatcagttcatcctcctttgtatctgaaaaatctgcaacagacagatcggaacccagagcctctcttccgtcaaagatattctgatgcgggaaaaagaatctgtattccagtgcatgtacggcgcttttataagaatggttcaggttccaaaaatcctggacaattgttccaatgcctgcgttgagagaaagtcccagtggctggcaggcatctgcgattgaggaaataagtccgctggtaagctggcggaagctgttggactgacagccgctgtgtcccagaatgcacagatagccatccatatccgggagaagatacacaaaatcaagagaagcggtttcctcagttatcagatcctgaaggttgaaaagctccatctgaaacttttcaatcccgtaaacagcttttagatccggagcattttcaagctccagaataacaactgtataaaaatcataattcagctccaggttcagatacttaagataaggcttcagtcggtaggctgcttcagaagacggaaggtgtgtgatctcgcggaaaaatttttccgtaagaagaggcctgctttgtttcagaagctggagatttttctgttccttttccatcagtgcaaaagcgttttttaccttctggataagataggcataatccagaggcttttcgatataatccagagcaccgaggagcagagcacgtcttgcatattcaaatttatcataggcactgatcaggatgatcttcaccataggattgatctcaagagcttgacggctcatggaaatgccgtcaagatcaggcatttcaatgtcagaaatgatcagatctgccggttcttttttcatggcttcgatagcagaggttccattgtagcagacatggatgatctctgcattcagtgtttcccagtctatgtttttttcgataccttctgcagataagtaattatcatctacgatcattatttttttcatcgatatcttcctccatctgttcgaattcaatggtgacgtatgtgccgtttccggggttgctgcggatccttacggaaccgtttccgtataatgggttggaaatacgggaacttacgttggaaattccaaaatgcttctcataatcaataacattatgctcaatagcatggcgcagctgtgcaagggtttcggagtccatgccggcaccgttgtcctcaatggagatcacaaccgtatcatcgccataaagaacatggatcgaaatgaaaacagctggtgtgcccgaagaaatcccgtgcagaatggaattttcgagaaatggctgaagtgtaaacttgcagatcaggaaattttcgattccatcttctgcttcgatctcccagtccagattatctttatgacagagcttttccatttccagataaagccgggcaatttccaattcatctttaataggaataagttcctttgatttacgcagggtaagacggtaaaaggcagtcagatttgcaatcatctgatcagcaatgtcaagctttccaagggactggcaggtacggatcgatcccaggatattgtaaagaaaatgcggattgatctgtgactggagcagctggtatttcagacgttcttcgtttacggaaagatttacaatggacttcaggtttccggctattgtgtgctgcatatcttcaaaggtgatgcccagtctgtcaatctcatcatacctggaaggatcatccgggtggggaacagtaacgatagatagatgttccgggtcatatcccagctgaaaggcttccattgcataggaaagtgcagtgatcttccgggtaagattttcggaaaacaggataacgatgataacagtaaggagcaagaaaataaggacagtgatcagtaaggcacggatcaggatgtgcgtgttgccctgaatatagctttccgggatttcggtaacatgaagccagccattgcttaaggtgcagcagttataatatttgtcgccgctgtgaaaagaagaatctgcatttcctttgagtttctgaaactgtgctttggaaattccggataaattcagtgaggatgtattttttgctgcaatctctccgtgatctgtgagaatgtagctgtatatgcgggaatccaaagcagcaggctgcagataagtggtaagctctgaggtgtccagagcaatgccgtaggcgtattccagaataccggtggcctgatttttcagtgcccggacgcagagaatcacatcggcagatgatttttttgtggacagtattttaggcagaggcatattggaaaccggtatccagacagaggaaaagcctgaaccggaaacaatatttttatccagaccatatgcagaaagctcatctgtggaaaagaagtacaggctttcttttgaaccgagctgatcgggctgcagaaaaacatatatatggaagaaatcgaatgtggatttatacagcgaaatattgttttttacagtggtgaattttttcagtgcatctaccttattagaggaaggctgatttagggagtacatttgaaactgtatggtatctgctacattttcaacctgaccgaggcggtcgttcagctgagagaccagctgcttgtcagtcattacggcagaatcgatgatacgatctctggcaatgttataggaaatgtgatagctgatgaaggtcagggaaatcagaggtaccatagttgcgatcagaaatgcgagcaggagcttatagcgaaatgaggaaaaaatgggtgggatacatttgtggaatttcatagtacatactctcctttatgtcgaaaacaaattaatgaaaccgaatccagctgtgaaaaaaagccgttacaaatatagattatataaaaggattataaaaaattaacaacaaaaatacaagagaacgaaaaataatataaagaaatcataaaatattgtatttagaatgagggggctctctggtatccttaaaccatcaaaaacaggtgtggacaaacacgaaaatgtccagaaaggaagaaagatatgaagaaaaaagtaatgagtgcagttttggcagcagcgatggttgtgggtatggcaggtaacgtggttactgtttccgcagaggagaaatatgatcttaccttatacagcatcgacaccacagacccggattttgaggactggcttgcaaatgtggaagatgccacgggcctgaacattaatgtaattgcggcacctacagatacagatacccgtcagcagaagatcaccacaatgctttccacaggagatgcttccgtggatgtcattcagatcaacgatgagatgagtgcggcatttaaaaattccggatggctggaaggactgaatgatacagtaatgacagatgatatcgctgatcagtttgcccagggatatgtaaagaatatgatcacagataaggacggaaacattatcggtgttccaggctatacaggatattttgcattctgggtaaatcaggagatcatggatgaggtcggaatcaaatccattgatacaaaagaggatttcatgaagtatatgaaggctgtttccaaggacggaagattcggctacggcggttcctgggagaaaacttatgcatttaacgagcttgcacagtttgtaaacatgttcggcggcgattattttgactggaccaaagaggaaaacaaggaagcagttcagttcctccacgatctggttgctgataaagaaacatccatcgagcagatcgctgataaatatgagcagatgaatccgaagatcaatgacggaaaatacggatgctggttcatgtggggccttggaacagattatgcaaaggcagatatgcttggcgcagataagatccacatggaaatggtaccggatttcagcggcaagggagagcgtgcgatctttacagattcctggagctatgttctcaacaaagcatccaagaataaagatgcagctgtgaaattcctccagtatatggctgatgaaggcggaatggaagcttcctataaagcatttgacagatatcctgcaagaaaggatgttgcagagaaggtagttccggattctgacccggcaaaagaaatgtacagcagatatgcaaatgaatgcaatgtacagggacgtccgatggtggcacagacaatggaatttatcagcgatatgggaacaatcttccagtcctgtatgaaagacgagattacagttgatgagttctgcaagaaggctcaggatgtggtagatatgtataagtaaaagatataaaaaaacagcaatgtaaagcagaggtaaaagtctgctttacattgcttgatgaacagggaggaaagttccatgacaataagcaaaaaaaatatgaagtggataccatggcttttgatcctgccggttgtactgattcgaggttttacaacagtatatcccattctgatgactgtgaaaaacagcttctttaatatcagtatccttgcaggtatcaatgaatttataggcttcaagaattacctgaaggtattttctgatcctaaagtgctcacatcgatcagctttacggcaatatttgtggttgcttccatgatctttcatgtgatcctcggagttatcctggcactgatcctgaatatgaaattcaaaggccgccgttttctgaggaccatcgtgctgatcccgtgggctatgcctgcagtagtagccggtatggctgcaaaatgggcatttaacaatgattatggtctgatcaatgattttatccgctggtttgtaccgggttaccagaacagctggctgatcaatacaggtactgcaagagcagcggtaattgcaatggacctgtggaaggaccttccgttctttgcaattcttgtactttccggacttcagtttatttccggcgatatctatgaggcagcaaaggtagacggtgcaaacgggatccagagctttttccggatcacacttccgctgatcgcaaaaaatgtcctgactttatgtattccgttcacactctggagactgacaaccttcgatctggtttattccatgacatctggaggccctggagaggatactgcgctgatcgcatacagaatcacaacagaagcatttacaaatctaaacgtaggatatgcttcggcgctggctatgctgctgtttgttgtaatggcgatcttcagctggctgaatatacgtgttatgaataagtttgacagttagggggaattatcgtgaagaatacaggaaaatataatgtttatcatggagtggtagccgttggaagatgggttctgtttgcagttgtggcttttctgatcctgttcccggtttactggatctttatttcttcgatcacaccgtcaggagaactgtttaaaacaccgatcgattatcttccggatcatcccacactggaaagctataaatttctgatacagaatgtaggactgctttcaaagatcggaaatacagttctgatcgtaggcattacacttgtgatcagtaccgtgctgtgtgcaatggctgcctatggcttctcaagatttaactcaaagggagtttctgttgcatttgcgtttgttctggctaccatgctgatccctgaggttgtcacagcccgcccgctgtatgagtttatgcagaaggtaaagctgtatgatacatatccgggacttatccttctttatatcagtaccgttataccgtttacggttctgatcctcagaaactttgtcggtgagatcccgatctcactggaggaggcagctgctattgacggcgcatctttttcacagagactgtttacgatcgttctgccgctgatgaagccggcaattgctacggtttgcattatcaactttattacctgtctgaataactttttcacaccgttgttttattcaaatggtattcaggtactttctgtttccatcgtacagcttccgttacgtgacaacatgtatggagttccgtgggatctggtcagcgccatgggatggatcatccttcttccgatcattatctttgtagctgtttttgagaaacagatcatggatggtatcatggcaggtggagtaaaagcgtaaatataatatttttaatttccaaaagagaggagaaaacagatatgtatcaggcatttacaggcggactgggagggatcgcacttgcaaagcatggaaaaagccgtgcgatcaacgcagaaaatcctcatggagaaaaaggcagaggcggtatggctgcaagtcatctgggaccgtccagaaaaggaagcccgtgtctcagggatattgagccgggaactgtggtaactctggcagaaatggaaggaccgggacagatcaatcatatctggatcaccgttgataacaagactacagaggcagattgctttgtactgagagatcttgtaatccgtatgtactgggatgacgaggaaactccttccgtggaaagtcctctgggtgatttcttctgctgcggattcggaagggaatgttttgtaaattctgttccggtggctgttgttccaaacaggggctttaactgctatttcccgatgccgtttaagaagaaagcaaagatcacactggaaaaccagcatgcaaataaaatcccggctttcttttatcaggtagattactgtctctatgatgagcttccggacgatattgcttatttccatgcgcagtggagaagggaacggttgacagaaaaaacaaaagattatacaattttggatggagtaaaaggaaaaggccattatataggaacctacatggcacttaccacactggaacgttactggtggggcgagggagaaatgaagttttatattgacggagatgaggagtatccgaccatctgtggaacaggaacggaagattactttggtggttcctggagctttgccaaacaggtggatggaaaaaccgtggaacagaattataacacgccgtatctgggatatccgtattattctgcccatgacgagctgatccacaatttttatcataatgatgactgcccgccaatgagaggcttttacagatggcatttacaggatccaatctgctttgaagaggatcttcgcgttacgattcagcagataggcgtcggataccgtggcctgtttgaacgacaggatgatgtggcaagtgtagcgtactggtatcagacacttcctcatgcaccgttccagccgttgatgtcaaaagaggatagatggcccagataaaaagggtggtagagattgaaaaaacaggtattttgcggggtatttgccctggctctggcagtgacaggatgtggagtccagaagaaggaggctgcatctgatattgtgccggagaacagacaggaactgacgatccttcatgtggatgcaggcacagaaggctttgattcttttatcagccaggcggaaaaagatcttggaataaagatccatattgaaaaatgtccggccaatgcggacaatcgccaggccaaaatagcaactcttctgacatcaggagatgattctgttgatctgatcacagtaaatgatgagatgatatccgaatttaaacataagggatttcttcttccgctggaagatacggttatgacagaggagacagcggcgaattttctgcaggaatacctgaaagaaatatgcatgtcagacggacatattttttcggtaccgttcaggatggatatcatggcattctgggtgaaccaggaattgctggatcaggctggtctggacagactctcctgtctcagtgatcttgagatccttcagaaaaagcttcagaatacgggaaaatatgcatatggggatgcatgggagatttcttacatatataatagtatcagcgagtatgtcgattttttcggaggagattatacagactggacggatccgaaaacaagagaagcggcagaatatatgaagcgaatgctggatacagggatgatatcagaggagaatctgatcgaccagcatgaccagctgaatgaaaaatttataaacggccagtatggatgtatgtttatgtataccggtgtgttgagtacttttcagaatgcaggcgtgtatggaaaagataagatccatatggcaccatttccggaatttgacgagaaggtgaccaatatcgcaacctggcagtatgtactgaataaaaattctgatcataaagaagcagctctgaagttccttcagtatgtgtccggatatgaggccagcaaaaattacggacagctgacaaaaatgtgtccggcaagactggatgtgatcgaggataagaattttgatctggatggcattgaaatggtccggcaatatctgaaagattataagctgaaggcaagaccactgtgtgccgattccatagaagctgtttcgtccatgggaacggaatttcagaaatatgtgctgggacagaaaacagaagcggaattttttgccggggcacagaactgcatagaccagtattacaaaaaagcatcgtactgatgctttttttgttttgaaaaaataagaactttttttcaaaacatattgacaaatattttacatggtgatatcttaaagactgtagatgttagcactccactaaaatgagtgctaacagatataaaaaaagaatcaacatccgtcaggaagaataaaaaggaaaggagatggcttcatggaagaggtgttgaatgagcgcaagcaaaaaatcttaaaagcaatcatcaagacctatatggagaccggagaaccggttggttccaggaccatttccaagtatgcggatctcaatgtaagttccgcaacgatccgaaatgaaatgtcagacctgacagatatgggctatatcgtccagcctcatacctcagcaggaaggattccttcagataagggctacagactttacgtcaatgagctgatgaaggagaaggaagcggaggtcgcagagctgcgagatctgatcattgagaagacagataagatggataaggtgcttaagaaggttgcgaaggttcttgcttccaataccaactatgctaccatggtttccgttccgcagtacagcggcaacaaggtcaagttcatccagctgtcgaggatgagcgagcttcagcttgtggcagtggttgtcagtgacaacaacacagtccggaaccagatcatcaatctggatgaggaaatggacgaccagacgatcctaaaactgaatcttcttcttaacaccaatctcaatgggattccaatccaggatatcaaccttgggatgatcgccagactgaaggaacaggcaggcagccacagcggtgtggtggcaacggttctggatgcagtggcagccaccattcatgtggaagaggaagatatggagatctatacttcaggtgcaacgaacatcttcaagtatccggagcttgccgataaagagaaggcaacggagctgatctccgcatttgaggagaagcatgaacttgccgatcttgtaaaagaacagatgtcagatggagagaatacaggaatccaggtttacatcggtgatgagatgccgatccagaccatgaaggactgcagcattgtaactgccagatatgaactgggagacggaatgtacggaaccatcgggatcatcggtcccaaacgaatggattatgagaatgtagtggacagtctgaaggaactgaagaatcatctggatgacgttttgaaaaagaagaaaacttagaaaggcggtagaaaaaaagtgtcggaggaaacaaagaaaacatccgaagagcaggaagcggagaaggaaatccccgtaactgacggagatcaggaagaagaaaacctgacaccggagggagaagatctgccggaggaagaaaacaatactccaggcgaagaagctgcctcagaggataaaaaagaagaaaaatcaaaaacttccttcttcggaaagaagaaaaaagataaatctgagcagaaggtggaggaacttaccgatcgcctgaagcgtaccatggctgaatttgataatttccgtaaaagaacggaaaaagaaaaatccagcatgtacatcatcggagcaaaagagatcgttgaaaagatcctgccggttgtggataacttcgaaagaggtcttgcacaggcacaggaaggcgatgcttttgcagatggaatgaaaatgatctacaagcagcttaccacaacactggatgagcttggtgtgaagccgatcgaagcagtgggaaaggaattcaacccggatttccataatgcagtgatgcatgtggaggatgaagaggttggagagaacatcgtggtggaagaattccagaagggttacacctacaaggatttcgtagtacgccacagtatggtaaaggttgcgaactaactgacaacaaactttattttaacagatacagactaaaacaggaggaaaaaatcatgggaaagattattggtattgacttaggtacaacaaacagctgtgtagccgtaatggaaggtggacagccgacagttatcgcaaatacagaaggcgcaagaacaacaccatccgttgtagcattcacaaaaacaggagagcgtctggtaggtgagcctgcaaaacgtcaggcagttacaaatgcagacagaacgatctcctctatcaaaagagagatgggtaccgattaccgtgtaaccatcgatgacaagaaatattctccacaggagatctccgcaatgatccttcagaaactgaaaaaggatgcagaggcatatcttggtgagaaagtaacagaggcagttatcacagttccggcttacttcaacgatgctcagcgtcaggctaccaaagatgcaggtaagatcgcaggtcttgatgtaaaacgtatcatcaacgagcctacagcagcagctcttgcatatggtcttgacaatgagaaagagcagaagatcatggtatacgaccttggcggtggtacatttgatgtatctgtgatcgagatcggtgatggcgttatcgaggttctttccacagctggtaataaccgtcttggtggagatgactttgataagaaagttacagattacatgctttccgagttcaagagaacagagggcgtagatcttagcaacgataagatggctcttcagagactgaaagaggcagctgagaaagctaagaaagagctttcttccgcaacaacaacaaacatcaaccttccgttcatcacagctacagctgagggaccgaagcatttcgatatgaaccttacaagagctaaatttgatgagctgacacatgaccttgtagagatgactgctgagccggttcgtcgtgcactgtctgatgcaggtatcacagcttccgagcttggccaggtacttctggttggtggttcttcccgtatcccggctgtacaggataaggtaagacagttaactggcaaagagccaagcaagaacctgaacccggatgagtgtgttgcacttggtgcttccgtacagggtggtaaacttgcaggtgatgcaggtgccggtgatatccttcttctggatgttactccgctgtctctgtccattgagacaatgggtggtatcgcaactcgtctgatcgagagaaatactacaattcctacaaagaagagccagatcttctccacagcagcagacaaccagacagctgtagatatcaacgttgtacagggtgagcgtcagttcgcaaaggataacaaatccctcggccagttccgtctggatggaatcccgccagcacgtcgtggtgttccgcagatcgaggtaacatttgacatcgatgccaacggtatcgttaatgtatccgctaaagaccttggaacaggtaaagagcagcacatcacaatcacagctggttccaatatgtccgattccgatatcgacaaagctgtcaaagaagcagctgagttcgaggctcaggataagaaacgtaaagaggcgatcgacacaagaaacaatgcagactccatggtattccaggttgagaatgcactgaaagaagctggcgacaagcttgacgcaaacgataaagcaagtgttgaggctgacctcaatgcactgaaagatcttcttgcacagacagcaaatgctcaggagcttactgattctcaggttgcagatatcaaagctgcacaggagaagatgatggagagcgctcagaaactgttctccaagatgtatgagcagactcagggagctcagggtcaggctggtcctggaccggatatgggcaacatgggcggaaactctggtgctcagggcggaaatgaagcaggatacggcgatgatgttgtagatgctgattacaaggaagtctaagacaagtaggaaataattacaatggctgataaaagagattattatgaagtcttaggtgtggataaaaacgccgacgacgcaacattaaaaaaagcatatcgtaagctggccaagaaatatcacccggatgtaaatccgggtgataaagaggctgaggcgaagttcaaagaggcgacagaggcttactccgttttaagtgatgccgacaagagaagacagtatgatcagtttggtcatgcagcattcgaaaacggcggcggaggcggtgccggcggctttggtggattcgacttcaacggtgcggatatgggagacatcttcggagatatcttcggagacctgttcggcggcggaggcagaaccagacgggccaacaatggaccgatgaagggtgccaaccttcgtgcacgtgtgaacattacttttgaggaagcggttttcggatgcgagaaagagctggagatcgttctgaaggatgagtgtaccacatgtcacggaaccggagcgaaacctggaacatcaccggtcacatgtccgaaatgtaaaggccagggtcagatcgtttacacccagcagtccatgtttggtatggtacgtaatgttcagacctgtccggactgtaatggaaccggtaaggtgatcaaggataaatgcagcgcctgccgtggaaccggatatacctcttccagaaagaagatccaggtatctgtaccggccggtatcgacaatggtcagtgcatccgtatccgtgaaaaaggtgagccgggaaccaacggcggtccgagaggagatctgctggttgaggtaaatgtagcccgtcatccgatcttccagagacaggatatgaatatcttttcaacagctccgatcacatttgcacaggctgcactcggcggtgagatgcgtattaataccgttgacggtgaggtttcctatgaggtgaaaccgggaacacagacggatacaagaatccgcctgaagggcaaaggtgttccgtcattacgtaacaagaatgttcgtggtgatcactatgtaacactggtagtccagactccgacaaatctcaatgaggaagcaaagaaagctttggaggcttttgatgcggcatgtggaaaccgtccggcagcagacagtacagccgagacttccgaaaaatctgaaaaaacagaaaagaagaaaaaaggtttccgtgagaaagtaaaggaaatgtttgaggaataaatgaacataaaacaggaaagaggcacaaaatgcctctttcttttttttctgtattcgtgtatattaaaagaagtgcccgttttcgggacaatagaaaacaggcgacagactggaatgaaaatccgtaaatgtgtatacagcataaggagatataaaagatgaaatggaaccgttttacacttaagacaaaaacagaggcagaggatattgtgatctgtacacttgccgaggtgggaattgaaggtgtggagatccaggacaagcagccgctgaccgatgaggataaggcacagatgtttgtggatattatgccggaaggaccagcagatgacgggatcgcatatctgaacttctatctggaagaggatgcggatacagaggcaatcctgaaagatgtgaaggctgcactggaggatctgagaagctttgtggatatcggagaggcaaccatcacagaatcccagacagaggacaaggactggatcaataactggaaacagtacttccatcagttctatgtagacgacattctgatcgtaccgtcctgggaagaagtgaaggcagaagataaggacaagatgatcctccacattgatccaggaactgcctttggtacaggaatgcatgagaccacacagcttgtgatccgtcagctgaagaaatttgtgaagccgggaatggagatccttgatgtgggaaccggaagtggaattctgggaatcgttgcactgaagcttggtgcaggtcatgtggttggtacagatcttgatccctgtgcagttccggcagtatctgagaacaaggaggccaaccagatcgaggagaaatcctttgacatgatgatcggaaacatcatcgatgacaaagaagttcaggaacaggtcggatatgagaaatatgatatcgtaactgcaaatatcctggcagatgttctggtaccgctgactccggtgatcgttgcacagatgaaaaaaggcgcttactacattacatcaggcatcttggatgtaaaggaggatgtcgtagtgaaggctgtaaaagacgccggactgacgcttgttgaggtgactcatcagggcgagtgggtatctgtgacagcaagaaaggactgatctcatgcagcgattttttgtggaacctcatcagatcgacagggacagacatgagatccgtatcacaggaaatgatgtcaatcatattgtcaatgtactccgcatgaaaaaagacgaggagctctggatcagcgataaggaaaaagaatatcactgtgtgatcgaaaacgcgggggaggatgaagtcctacttcatatcctctatgtacaggagccggattatgagctgcagaaccgtatttatctttttcagggactgccgaaggctgataagatggagctgatcatccagaaggcagtagagcttggagcatattccgtagttccggtttcaaccagacgttgtgtggtaaaactggacaataagaaagcagaaaaaaaagtatcccgctggcagcagatcgcagaaagtgcggcaaaacagtccaagcgtatgctggtgccggaggtacattctgtgatgacctttaaagaagcccttgtctatgcaaaagaactggacgttctattgatcccttatgagcttgcaaagggaatgaaagagacgaaagaactgatccggtcgatcgaaccgggaaaaagcataggtgtctttatcggccctgagggtggttttgaagagcaggaagtggcagatgccatggaagccggtgcgaaacccatcaccctgggacaccggatcttacggacagaaaccgcgggactcgcagtactttctgttctgatgtttcaactggaggatgaataaattatggaagcatattttgacaattccgcgacaacgagatgcttcgatgaagtaaaggatattgtctgcaaaaccatgacagaagatttcggaaatccttctgccatgcataaaaagggaatggaagcggagaattatgtccgcagaagtgcccagacccttgcaaaattactgaaagtgaatgaaaaagagattctttttacctccggtggaacagaatcggataaccttgctatcatcggtggtgtggaagccaataagcgaatgggaaaccatatcatcacaactgcagtagagcatgcagcagtggcccagccttttgcttatctgaaggaacagggctatgaggtgaccatccttccagttgatcatcagggcgttgtaaagctggatgcactggaagcggctcttcgtccggataccattctggtgtctgtgatgtacgtgaacaatgaggtgggagccgtgatgccggtagaagagatcggaaagcttgtccatgaaaaaagtccgaaagcactttttcatgtagatgccatccaggcattcggaaagtatcgtatctatccgaaaaagctggggatcgatcttctttccgtgagcagccacaagatccatggaccaaagggcgtaggctttctctatattaacgaaaaagtaagagtacagccgcagatccttggcggcggacagcagaacggtatgcgttccggaacagacaatgtaccgggaatcgcaggccttggcgttgccgcagatatggtatacacagattttgataaaaagatacagcacctctatgctatgaaggagcggatggcagagggtctttcaaagcttggcgatatcactgtcaacggaatgccgttaatggagggagcgccacacatcatgagtgtaaccttccacggagtacggagtgaggttcttctccatacgctggaagaattcggagtatatatttccgcaggaagtgcatgctccagtcataagagaaaaccaagtgcaacactgacagctatgggactttcaagagcggatgtggaaagtaccgtccgcatcagtttctgtgaggaaaatacctttgaagaggtagattactgcctggaagcactgggaaaaacaattccgatgctgcgcaggtatgcacgtcgatagagaatacagaagaaagggatttttatgttagtacatgcatttctgatcaaatatgcggaaattgcccttaagggaaaaaaccgctatcgttttgaagatgctctcgtacatcagatggagatcgcactctccaagatcgagggagattttgaagtaaaaaaagagcagggaagagtttatgtattctgcccggagaattatgattacgatgaggctgtagatgcgctgcagcatgtattcggtattgtaggcatctgcccggttatgatctatgaagaacagggctttgagaagcttgccgaagatgttgtgggttatatgaagcagtggcatccggactttaacggaagcttcaaggtctggacacgccgcgcaaagaaatcctatccgatcagctccatggaagtcagcgctgagcttggcggacgtatcctggatgcgttcccggaggcaagtgtagatgttcatcatccggagctggatctttctgttgagatccgtgacaagatttacgtatattcccagaccattccgggcgcaggcggaatgcccatcggaacaaacggaaaagccatgcttcttctttccggtgggatcgacagtccggttgccggctatatgatcgcaaaacgtggtgtcaagatcgatgcggtatatttccatgcaccgccctacaccagtgagcgcgcaaaacagaaggtagtggatcttgcccgcctggtagccaaatacagcggaccgatccgtctccatgtagttaactttacagatatacagctttatatttatgatcagtgtcctcatgatgagcttactattatcatgagaagatatatgatgcgtattgccgagcatttcgctaaaaaagaccgttgtctcggacttatcacaggtgagagcatcggacaggttgcaagccagaccttacagagccttgcttctacaaatgaggtctgcacacttccggtatatcgtccggtgattggctttgataaagaggagatcgtccgtatttccagaaagatcgatacctttgagacttctattcagccgtttgaggattgctgtaccatctttgtagcgaaacatcctgtaacaaagccgaatcttaaggtgatccgccgttctgagcagaagctttctgagaagatcgatgagcttatggaaacggctctgaataccacagagatcattgaaattcagtgatccgttttagataagaaaaaacaaacagggaacctcgctgcagaggttccctggaattaccgatatatcaggaacagggagttcattgagaacagaaggattctgaaagcatgaaaaaagaggaactgtatccgatacagttcctctcaaatatacagtatagattagtcgattgtatatttggaaataatctgcattacgttatccagagcagcgccatctgcatggatgttgaggtcgatcggcttggaaagatccaggctgaagatacccatgatggattttgcatcgatcacatatcttccggatactaaatcaaaatcgcagtcgaatttgctgatctcgtttacgaatgctttcaccttatcgatggaattcagtgagattttagctgttttcattataataacctcccttgataaatttttgttgttttacagctttcatcttacctgtcagtacccaaaaagtcaaggtgaaaagagataaaaattgttttaataattagttaaagtgtaaaaaaagtgaggaaaaatgggaaataaagttgcattacacaacctgggctgcaaagtaaatgcctatgagatcgaggccatgcagcagcttctggaggaggcgggatatgagatcgtgccttttgaaccgggagcggatatttatgtgatcaatacctgcacagtaaccaatattgcagacagaaaatcaagacagatgctccacaaagcaaaaaaaatgaatccggaagcgatcgtggtggcaacgggctgttatgtacagaccggtggcgagaaactgaaaaaagacgaagccattgatcttgttctgggaaataaccagaagatcaatattgtggaggcactggccgaatatgcggaaaacaaaccgggccatggttcccatgtgatcaagatcaatcagacaaaagagtatgaggaactttccattgatcatacagcagaacatgtaagggcatatatcaaggttcaggacggatgcaatcagttctgtacgtactgtatcattccctatgcaagaggccgtgtcagaagccggaatattgaaagtgtgctgaaggaggtccgtgcacttgcggaaaaagggtataaggaagtggtccttacaggaatccatttaagctcctatggagtggatttcccggaggagaaaaaagagacactgctttctctgatccgtgctgtgcatgagattgaaggaatcaggcgtatccgtctgggatcgctggaaccgggaatcgttacaagagaatttgcggaagggatcgcggcgctgccgaaggtatgcccgcatttccatctttctctgcagagtggctgtgatgagaccctggagaggatgaaccgcagatacagaagcggggaatacagagaacgctgtgagcttttaagagaagtgtatggaaatccggcactgacaacggatgtgatcgtaggctttccgcaggaatcggaggaagaattccggaaatcctatgattttgtggacagcatccgtttttacgagactcatatcttcaaatattccagaagacagggaacaaaggcggctgctatggacggacagctgacagaggcggagaaatccttccgcagtgagaagatgatcgagctgcatcatcgtcatgcaggggattatgagaaatccatgcttggtaaaaacctggaggtactgatcgaggaagagtatacaaaggatggacggacctggtatctgggacacagccgggagtatataaaaactgctgtaccgaaatcggaagcttatggcgtaaatgatatcgtaatcgtaaaggcagaaggttttcttgaagagcatatcatgaccggtgaagccgtggagtgaagaacgggatcgtatgttgaaaggttgtttgttcactggtaatattttgcgaagcgtgttactgagaacggaatgaacagtaacgttgacagtttgtatccgtaatcctcgttaaatttaagattgtaatttatgtaaatttatattaaaataaaaaagaatatattttaaggacgtgagagacaatggcagagaataatctgggaaatacacagtatttcagaacaaaaccggatcaggagcttcaggtaaaagaagtcctggatctggtgtacaatgcaatggatgagaagggctacaatccggtgaatcagatcgtaggatatattatgtccggagacccgacctacatcacaagccacaagggtgcgagaagcatgatcatgaaggtggaacgtgatgaactggtagaagagcttctcaccgagtatatcaagaacaagtcctgggaacggtaatatgagagtactgggactggattatggctcgaagactgtgggggttgcagtgagcgatccccttggtctgacagcccaaggtgtggaaaccgtatggcgcaagcaggaaaacaagcttcgtcgtactctggcacgtattgaagagatcatttcggagtatcaggttacggagatcgttctgggatacccgaaaaacatgaacaatacagtaggagagcgggccgagaaatctctggagtttaaggaaatgctggagaaacgtacaggcctgcctgttgttatgtgggatgagagactgactaccatggcggcagaccgtactctggaggagaccggtgtgcataaggaagaccgcaaacagtatctggatcaggtagcggcagtttttatcctgcagggatatctggatgctgccgcacacagaagagagcagcaggaaggcgtggaagaatgatcggaaacgcagatagatattttgagcggatcaggtagcaaatgcggattgcgaatatccgcttgacaagaacggataaggaagaattaaatatggaaaaaataatatttcagtcagacgacggcacagctgctgagttttacgtagaggagcagacccatattgcgggtgtgacttatcttttggtgtccgattcacaggatgaggaagcagacgcatatattctgaaggatatttcagctccgggaagtacagaagcctgttatgagatggtcgaggatgatgacgaacttcaggctgtatatgcagtttttcagcagatgctggatgacgtgaattttgaatggaggagcgatttttgaaaagcgagaacaacgatgacaacaaaaatgcggagagcagagtacaagcttctgcaggcggtgccagaagaaccgcatcaagacaaaagaatgccggatcaagaacaagacagtatcgtggtggcagcaaaaaccgtcaggataagcctttccggccaacagcaaagaaaacagcagccggtggcgctgtaaaaaacagcagaaacacacagaaaccggcaaagaccggcggcaggccatccggtcggaaaaccggccgcagaacaacatccaagcttaagatcataccacttggcggtctggagcagatcggaatgaacattaccgcttttgagtatggcgacagtattgtagttgtagactgtggcctttctttccctgaggacgatatgttgggaatcgatctggtcattccggatgtaacataccttaaggaaaatatttccaaggtgaagggatttgtgatcactcacggacatgaggatcatatcggagcccttccgtatgtgttgaaagagatcaatgttccgatctatgctaccaagctgacactgggactgatccgcaacaaactgaaagagcataaccttgtgcgttctaccaaattgaaagaggtaaaacacgggcaggtgatcaatcttggggatttcgctgtggaatttatcaaaacgaatcacagtatccaggatgcatccgcacttgctatttattcaccggtgggaatcgtgatacacacaggagactttaaagttgattatacaccggtatttggagatgccatcgatctgcagcgttttgcagagatcggcaagaagggtgtgcttgcactgatgtgtgagagtaccaatgcagagagaccgggatttacaatgtccgagcgtacagtgggacatgtatttgataatctttttaatgagtaccggacatccaggatcatcattgcaacctttgcatccaacgtggatcgtgtgcagcagatcattaacactgcataccggttcggaagaaaggttgctgtggaaggccgcagtatggtcaatgttatttccgtagcgtcagagcttggctatctgcagatcccggagaacacactgatcgagatcgatcaggtgaagaattatccggacgataaggtggttctgatcacaaccggaagccagggtgagtccatggcggcactttcccgtatggcagccaatatccataagaagatcacgatcaagcctaacgataccatcattttcagctccaatccgatccccggaaatgaaaaggcagtttccaaggtcatcaacgaactgtctatgaagggagccaaggttattttccaggatgtccatgtttccggacatgcctgccaggaggagatcaagctgatctactccctcgtaaaaccgaaatatgccattccgatccatggtgagtaccgtcatctgactgcacagaaacacattgtggaagatctgggaatcccgaaggagaatatttttatcctttcttccggaaatgttctggagttggacggacaggatgccaaggtgacaggaagcgttcatacaggtgcgatcttcgtagacggacttggcgttggcgatgtgggaaatatcgtactccgtgaccgtcagcatctgtctgaagatggaatcatgatcgtagttatgacactggagcgccacagtaatgtagttctcgcaggtccggatatcgtttccagaggttttgtgtatgtaagagaatctgaggatcttatggagcatgccagacaggttgtggaaactgcactggattcctgcctggagaacaatatcacggactggggcaagatcaaaaccgaggtcaaggatgcccttggagagtatctgtggaaacggaccaagagaaatcctatgatcctgcctatcattatggaggcgtaggttcatggatgagatcagcatggagatcgagaagcttctcgatgctgtgcacagaagcgatgaatatcaggaatatcagaaacaggcagcccagcttgaagcggatcctgagctgaaagccagagtgatgagattccgtggagataatttcagactgcagaatcattcagacaaggatgagctgttccatattgcggaacagctcaatcaggagtctgcaagtctgagacagaacctgaaagtaaatgcctatctcgacgcagagcttgcgctgtgcagactgatgcagcggatatgcaggacgctggtggacgggatcgacatacagattcctgacttataggaggaaagactatggcagacacaagagacaaggttggcagggccggcgtttttctggctggaggggtatttaaaaccgctgtatatatctttattatcgtatttctgatctgggttggaaaatcagcatatcagtttggctacgatgtgtttaaccagcaggctatgagcccgggagagggacagcaggtcacggtagtcataaaagaaggtgcctctgcatataaagtaggcaagacactggagcagaagggtcttatcaaggatgcgcttgcatttaccatacaggaaagaatgtccgcatatcacggacagatcaaagcaggtacataccttctcagtacagcttatacaccgaccaggatcattgcagtgctgtcaggagaagagagcaaggaaggatcgaacagccagtgatcgtagaagaacgcatgcagacctatatcaattcactggatatggggaatactccatttctgcaggagttggagacaaaggcacttgcagatcgggtgccgatcatccggagagatatgcagagctttatgaggatgcttctggcactgaaacaaccgaagcgcattttggaggtggggactgccgtaggcttctccacacttcttatgtgtgagtatgggccggaagatatggaaattgttaccatagagaattatgaaaaaagaattcctgtcgcaaaggataatttcaggcgcgcaggaagagagtcacagatcacgcttctggagggagatgccggagagatcctgaagaatcttaccggaacctttgatatgatcttcatggacgcagccaagggccagtatatccactggcttcctgacgtgctgagactgatgaaagagggaagcgtgctggtatctgacaacgtgctgcaggaaggggatattattgaatctcattatcttgtggaacggcgtaaccgtacaatctataaaagaatgagagaatatctctggcagctgactcacagtccggtgcttcgtacatcggtgcttcctcttggagacggagcggctgtaagtgtaaaaacaggagaacaggtttatgaaacgaccagaactattggttccggcgagcagccttgaggttttaaaggttgccgtcatatatggtgcagatgctgtttacatcggcggagaagcttttggacttcgtgcaaaggctaagaatttttcaaaagaagatatgtgtgagggaatcgcatttgcccattcccatggtgtaaaggtttatgtgacagtaaacatcctggcgcataaccgtgatcttgagggtgtaagggaatatcttcaggaactgaaggagatcggaccggacgcattgatcattgcagatccgggaatctttatgtatgcaaaggaaatctgcccggagatcgagcgtcacatcagtacacaggcaaataataccaattatgagacttaccgtttctggtataaccttggtgccaaacgtgtggtaagtgcaagagagctttctctggaagagatccgggagatccgggcacatattccggaggatatggagatagaaacgtttatccacggcgccatgtgcatttcctattccggaagatgtcttctcagtaactttatggcaggaagagatgccaatcagggagcctgtacccatccctgcagatggaaatattctgttgtggaggagaagcgtccgggagaatacatgccagtatttgaaaatgagagaggaacttttatttttaattccaaggatctttgtatggtagaacatatggaagatatccttacaagcggtattgacagcctgaagatcgaaggacgtatgaaaacagctctttatgtggcaacagtggcaagaacctaccgcaaagccattgatgactgtatggaaagtccggaaaaatatcatgcaaatatgccgtggtatcaggagcagatctcaaactgtacctaccgtcagtttaccaccggatttttctacggaaagccggatgagaacacccagatctatgacagcaacacatatgtaagagaatacacatatcttggatttgcagaagagatcgatgagagaggtctggcaagactgacacagagaaacaagttttctgtaggagagaccatcgagatcatgaaaccggacggaaggaatattccggtcacagtggaagccatttataatgaagagggcgaagctatggagagtgcaccacatgctcagcagaggatctatgtgaaactgactgagatgccggaggtatttgatattctccgaagaggtgaatgatccgaaagggtggataagagagtaaaggggagaacgaaaagaacgttctcccctttactgattttcaggaaaaagagtacggagttttcgaagagcgttcttttcgatacgggatacataggagcggctgatggagagattttcagcaatctctcgctgggtcagtggctcctgaccattcaaaccgtagcggcagcagatcacctggtattcctttggggagagtactgtccggatataacggagaagataggaaatgctgtcccttttgaaacaatcatccacaacatcaacgggtggactttcaatgatatcgagaaggctgatctcgttgccttcccggtctgtgccgatgggttcatagagagaaacttctctggaacgtttcctgcgggcacggaacatcatgagaagctcattgtcaatgcaccgtgcagcataagtggaaagcttggaagtccggctgggatcaaaggtggaaatggctttgatcagacctatggtgcctatggagattagatcatccggatcctcgtcacatccctgatatttttttgcaacatgtgctacgaggcggagattgtgttcgataaggatattttttgcttctggatcgcccctttggagctgtagaagatagaactgctcttccgcaaaagaaagcggtttcagaaaggttttcaagggttcacctcaaaggggatttccttatagcttatgagccggacgtgcttttcgtgcttttccaacagaaactttataaaaaggacagaggcgaacacctgttgcgtcacattctgatctggtgtataatcataaaatacgagtgacaacaatcagtgtatattgatgaggagtatatattttgaaaaagaggatagaacagcttcttaacggaaaatttatttatgaacagcctaagcttctgttttcacaggaccgtattttcgctacgctgaaggcaggagagactacaaaggatgagatttatttcggtaccgatgacaaccgcaggatcagtggctttgtgacttcatctgaccggagactggtgcccggatttgaccgcttttccggaaccacagtgcgcatgccttatggggtagatgcagagggaatgaagccgggagagagctttgaaggctggctgtgttttactaccagtatcggagaatataagctgccgttcactgtacaggtacagacggaagaggtgaagagtgcaggcagaaaggtatcttctctggaagaatttctgcacattgcaaaggaagatttccatgaggcttaccggatctttacagaacgacatttttccctgatcctgagtgaccagagtgagaagatccgttctctttatgcaggaatgtcacagcagccggtgacctatcagcatctggaggaatttctgatcgcagccggtgccaaggaaaaggtgacattgagtctgaacagagaagaggccggtttttatgatgtcagtgaatctgttcaggaatccctttatatccacaggagcggatggggacacctgcgggcagatattgaggtaaacggggattttctggaggcaggcaagcatgtggtcacagaagaggattttatcggaagtacctgtgagataaactatgtgatccgccaggaaaaactgggaaaaggaaatcagtacggcgagatcattgtaaaaaccccataccagaaactggtatatcacgttcttgcatccagaggaactgagagtgccgtgaacctggatcttctggaaaaacagtaccggatatctctgatgaaggaatacctgggatatctctgtaaaagaacagattttcaggcctggacagcctctactcatgagaagcttgaccgtatgggcgaaaacggactgaaatatccggaatatcagcttctggaagcctatcttcttcatctggaaggagaagatgaccaggcttcagaaatccttgagcgttatcagaataaatcctttcatcacaatgaactggaactggcagggatttatttgtatctgtgtacacagactgggctgtaccgggataaggaacaggccctccgcaaggtacagaatttccagatgcagaaggaagacagctttatccttctgaaactggcatttgaaatggatcatacgctttctccgtcaaaaaagatctttctgatggaggaactttttgagcggggatgtacaagtccttttctgtatctggaagcatggaacagtatttgtgcagatatgtcgctgctgcatcgaatcaatgggttctgggcccaggtattcctttttgcaggaaaagaacagatgctgacggaagagctggtcatgcgcctggcatatctttccggctatgagaaagcttttaacgaaagcctgtaccgtgctatggccatgggatgtgaagcctttccgtcggatgataccgtggaagctatctgtaaatatattatgaaggggaatccaagaaaaccggaatattttcagtggttttccgctgccgtggaccgcgggctccggatcacacggctgtatgaatattatgtggaaacactggatacttcttatcggagagtcctgccgaaaccgcttttgatgtattttacctataacaacaatactctcggtgattccaagcgtgcctatctgtatgcatgcatcattgcagggaaggaacgtgatccacagacatacgaaagttatcgtgaaagcatggaggaatttgctttccgtaagttacgggaaggccggatgaatgaaaattatgccgctgtttatcaggaattcatgcgggaaccatcggacagcgaaaaagcgcaggtgatcgcctccagaatgtttacccaccggctgtatacggatgatccgaaggtccgtagtgtgatcgtccgtcacagacagatgaaacaggaagaaatctatccgtgtatccatgggatcgcttacccaaggatctgcagcgaagatgcggccgttgtatttcaggatgaaaaacagagacgttatgctgctacggtagattataatctgacaccactttttgatgatcgtgagatggttccggcagtgttggaaaaaggggcggatgaaccggctgtgcttttgtattattgtcagggtcaggagatcagtcgtaagaatctgggaatttttcagaaactggtcctttcaccggcgtttaccgatgaatataagaggctgatccgcaaaaagatcctggattattatcgggatcacgtgcagggagaagatctggatgcctgtctggagatgatggattatcgggaatatgccatggtcgaccggaaaacccttctggagatcctgatccagcggggactgtttccgcaggctatgagcgtggtggaagcatttggatttgaaggagtagaggagcgtgctcttctgaagctggtaagccgtatgatcatccgctgtgactgtgcggaggacgaagagctgattgcactttcctctcatgtataccgacagggaatctatgatgaagtgatcctcatgtatctgatgaaattccggtttggacctgtggatgaacttctggatatctggaaaagtgcctgtgggtttgagatggatacctataatctggaggagaggatcctttctcttctgatgtttaactgggattaccggccagagggtgcggatatcctgaaagaatatatccgtcattccggaaaagagagtgtgatcggtgcgtatctgactctgatgtcttacggaatgtttgtaaaagaaatgccggagatgcctggacttaaggagtatctgaaaaatcgcagagaaaaggagtggcccggagaccggatctgtgacctggcccttctgaagctgctttccgaagaaaaaacttctgatgaagaaaatctggaaatggaggaaaaaatcctctcttcctgtgtaaaggacggaatgctatttgagtttttccggaatctggatcagagtatcctgcgactgtatcagctggatgataagacttttgtagagtatcatacttcaccggaggcttcggtcacactgtattattccctggataccggtcttggaactgtaccggactataaaagtgaaccgctcaaaaatatctatgagggaatttttgccagagcatttacattgttttatggagagaccctgcgatattatttccagacagaagatgaaaccggtgtacacaaaacggaagaaaaaatactgaccatgaaccagagtaatgaccaggcatccagcaaatatcagctgatcaatcagatactctgtgcaaggaaactggagaaagacacggaagtgaaggagaagctggcacagtatctccggcaggaacagtacgttaatgaaatgtttgtcatagagaaggaaccggaaagatgaatgaaattcgtgacttgatcataggaattgatattggaaaagaatacacacagatctgttattatgacagaaaagcagaagaagcccgttctctttccatgaaggtaggagccagtcagtacgaagctccgggctgtatctgctatcgtaccgatcacggtgattactgcgtaggcctggaagcagagtattttgccagggaaaagggcgggatcatgatcggaaatatttatgatatctgtcagaaggaagaaaagatccaggtggcaggagaggaaaaagagccggcagagcttctggcacattttctaaggggaatcctgaaatttctaggaatccaggatatcgtaaagaatacccggtgtctttgtatcacatcgccggagcttagtacacttcaggtacggaattatcagaaggcctgcagccttgcaggtttttcccgtgagaaatatatgcttatggactatggcgagagcttttattattatgcactgggacagaaacgggaaacctggaatcgaagtgtaggctggtatgcctttgcaggcgatacggtaactttccggaagctgaccatcaacggctcttccagaccggtgcttgtaaaactggaggatccggtcagtacaaagcttgaaccggaagatgagatccgtgatgtggaattttaccgttttatcagtaagaatctcggcaaagagctcttctccagtgtgcagattacgggagaaggatttgaccagcagtgggcacagcagtctgtaaagctcctgtgtcatcagggacggaaggttttttacggaaacaatctttttgcaaagggagcctgcatagccggtaaggacaggctggaggataaaaaactcaaaggttaccgctatttaagtgattcgctggtgactgcggacgtaggaatggatatgcgggtgatgggctctccggcttactatccgctgatcgaaagcggcagcaactggtatgaatgcagtgcatcctgcgagctgatcctggatgataccagtgaactggtatttgtagtaagtattccggaagaaaccgagaagaaacgtgtggctatggcacttgacggtctgccaaagcggcctaatcggacttcaaggctttccctcacgctgaaatacgtatcgccgagagactgtgagatcacagtagaggatctgggctttggcgaaatgtatccttccagtggaaagatctggagggaactggtacgatgggatgagcaggaagaaaggaagcaggcatgagcggatatattttatgtcaggtaaaaaaggcagagaagccgttttatatcgaaaatatcagtaccaatatctattctatagaagaactctgctattatctttataacaatctttatcttgtggacagctcattgatcagcagtaagctctgtacctggctggaggaagaactggagcttccgaagcttgcggccaagctgaaaccttatattggaagagaggccggacttgaagaagtactgtatccgatatttaaagagatcaattatctggcttatgaagagcttaagaccttaaacgggcgcattgaagccagaaaacgtgaacctgaagaaatacgggagaaacgcaaaggtgatgcgctgatggagaatcggatgtatgtgaatgcactccgtgtttatcagaagcttctggagcatggcgggaaagaaatcaccggagagatgcgtgaaaggatcctgcataatcagggatgcgcatacagttacctgttccagatggataaagcgctggaatgcttttggaaagcatggaaggagaatcattcagagaaagcgatgaaggtttatcttctggcctaccgcagtgttcacagtgaagaagaatacaggaaacgacaggaagatctgaagacagatgaaatggtaaggcaggaaacagaccaggctctgaaaagctttgccggtctcccggagcagcatatcgcatccggagaaaccgacaggatcctggaggatctcacaagagaatatcacagaagtaccggctcttaaagctgttcaagaagtcccagcaggatctgccgggcttctttttttgtatatacggattcttcctcagacagggaacagaggtaatcattcagggcctgtccgatactggtctctttcagatagatacagagaaaagtatctttttcggaaagaaagcagagaaaaacggaatagtcagacagaacttccagatggatcccggtttcaggaagtacggaaggcttcaggatcctgcatttttcatgtcccatatctgtgtcaagaagatgcttgagggctttttttcgttcttctttcggaagaggggtctgatggtaggaataaggtccgtcaaggagtccggtacgggcaaatttccggatcccgctcagtgtaaaataattgcaggaaaaggcagcttctgtaaaagaaaaggaagtctggttcagaaccgctgccagctgggtatagaccggatcggaaagatcgatatccctgttatcaaacaatgactgaataaagcccggaccataggacatcagtgcaaggcagggatgagattccagtgcaaaatttgttgagatctttgtctgcatgatagaaccaaagatattaaggatcctgtccggagaatccgactgcaggaagaattggctggaattctcaagagcccgccggaattcctgttgatatgcgtggatcgcttccggattttcagtaaaaatacaggtcatcatatccgaggataacagcagcagctttttttcagtgagtaagaaaaaaggaaacagttcatagctggaaaactctcggcctgtctgagtatagtaataatatggctggtagcccacaaaacctgacaggatcggaaggagtgtgcagagaaaggtttccagattcatgttgtaatccggtgaggcggacgggttctggtgaagcggcaggatctggatcaccggtggcagtttctcatatttgggataaagatgggaaaagatctgtacaagaagccggcagttggccggaaggttggtacggatcttttcagaagaaccggaagacaggatgtcctcaaaaaggctcaggaccttcttttccacatcaagagaaaaagttccacggtaaaagggaaaggatggaagcctgagaaaaccctcccgggaaatgacctgctgggagctgataacacccagaagctcctgtatatatttgcggttgtaatatatttcttttccgattttttctattttatataattccatcagttccctgcgttgggaaggattgatccggagggaatcgcagaactggcgcacaaaatcaataccgggaagacgtttccctgtgatcatacgttgtagcgaggtacggtcaagtcccgaagaagcagataattgataaacgttttctcctgtatcctttagggattcccggcatttgttgctgaaatcagacatagtagtactccttttggtgcttatatgacattattatacgaaaacagatcatgaattgcaataatttgtaaaaaaacaaggcacaattagaagcacatattgcgcaggtctttccttgaaaataaaatgttaatatcagaaagagcatgagggaggaaaacacggcaatggcagtgatgacgatcgcgatatgtgatgaaatacgaaaggatgcacagaagctgtacaggcagctttccacactggtccctgatgcagagctccttctgtatcggaccagagagagtcttctgaaaggactggcagagggacacaagatctgcaatctgatatttctggggctggatggtgatcagggcaggagtctggaaactgtacggacaatgcgcctgaaaggacattatatcccggttgtgctggtggcagagaatgaaaaattctataaagaagcatttgaagtgtttgcctataactatctggtcaaaccggttgaaagtggagaactggaacatgttctggtacatatcctggaggtatgcaggcgtgaaggcggaagagcgctgtattttcgctacaggaaacaggtttatacactgcagcacgatcatctggcatatatatccagtagtcttcacagtgtgacatttcatcttaccgatggaaaaaagatcagctgcagagccaggctgggggatttttcgggacagctgtcagacagcagctttctgagatgtcatcagagcttttgtattaacatggagaaggtaacttcacttaagaagaacagttttgtggtcggacagacggaaatcccaatttccagaacatatctgaaaacggccagaaagaaatacaaagattatctggcagagcagaaggtttgctcttgacagctccttttgggtatgttactataaccatacgctttcacgtggtagagtgaccatgtgataaagagataaccgaaaaaaggagaatgaccatgaagaaaagaacagttgcagtagtaatggcggcagcgatgacaataggaatgatggtaacaggagtgagtgtacaggcaggtgttgaggataagaccctgatcgtaggatttgatgctgaatatcctccgttcggatataaggatgataacggagaatatgtaggatttgaccttgaccttgcccaggaagtatgtgataatcttggctgggaacttgttaagaagcctatcaactgggattccaaggatatggagctgaactccggaacgatcgactgtatatggaatggatttactatcaacggacgtgaggatgactatacatggagtgatccatacatcaacaatgagcaggtgatcgtagttgccaaggattctgaaattgagaagcttgcggatcttaagggcaagaacgtagttgtacaggctgcatccgctgcactggacgcattgaacaacgatgacaataaggaactgaaggacagctttgcatctcttacagagaatccggactacaacactgcatttatgaatattgattccggagctgcagacgctgttgctgttgatatcggtgttgctaactatcagctttcccagagaggcaaggataaatatgtgatccttgacgagccaattcagaacgagcagtatggcatcggattcaagaagggaaatgatgagctgaaggatctcgtatgggatgaggtcaagaaacttgacgagtccggtgaggttgacaagcttgcagataagtatgaactggataagagcatgctctgcatcagcgaggacaaggataagacagagaattctgattcagcagaagctgacacagaagaaagtgcagacagcacagagaaagaaaccgattctgaatccaaatgatccggtacagatccggcacagtaaaagctgtgaagatattttttaagctatccaacagcagtagaaataagaaacatagcagaagcttttgaagcttccgcataaaaaggaaatgagggtgcttcggcgcagaaagagctgccgtacacgctcatttcctgttgtttacaggaattacaggtatcagtccgataaatgggactgatactccgaaccaggaggaaaaaaatgagttttagtgtaatgctccagcagctggcaggaggaatgctggtctctattgagatcttttttgtaaccttgctgttttctctgccgctgggacttctgatctgttttggcagaatgtccagaaacaaagtgatccgtaccattgtatccgggtacatatccatcatgagaggaacgccgctgatgctgcagctgatggtggtatatttcggcccttattttatcttcgggatccgtatttccatgggatatagtctgatcgctgtatttatcgcatttgccatcaactatgcagcttactttgcagaaatctatcgcggcggcattgaatccatgccggtgggacagtatgaagctgcaaagatccttggatacaataaggtgcagacatttttccgcatcatccttccacaggtgatcaagaggattttgccgtctattacaaatgaggtcattacgctggtcaaggatacttcccttgcgtttgttgtggcagttgcggagatgtttaccattgccaagcagatcgcaagtgcacagacaacaatgatgccatttgtgatcgctgcgatattttattatgtgttcaacctgatcgtggctgttgtgatgcagaaggttgagaaaagtatgaattactaccgctaaccggaatggagagtataaaatatgaaattatttgaaatgaaacatatcaaaaaaagctttgacggactggaagttctcaaagatatctctcttgacgtggaagagggagaagttttaagtatcatcggtccttccggttccggcaagtcaactatcctgcgttgtgccacaggacttgagacgccggacagcggcgagatcatcaaaaacggtgatgtgggactggtgttccagcagttcaatctgtttccgcatttttccgtactgaaaaatatagtggatgcacctctgaaggtgcagaagagaaagaaagatgaggtttacgcccaggcaagaagccttcttaagaaaatgggccttgcagacaaggagaaggcatatccttttcagctttccggaggacagcagcagcgagtttccattgcccgtgcgctctgtatgaatccgaagatcctgttttttgatgaacctacatctgcacttgatccggaactgaccggtgagattctgaaggttatcaaggatcttgctcaggagcatatcaccatggtgatcgttactcatgaaatgaattttgcaagagatatttccgaccgtatcatctttatggataagggtgtgatcgcagtggagggaacgccgcaggaggtattttcttccgaaaatggcagaatgaaggaatttttgggaaaattccatcagggtatggagtaacaaacggttgcttttaaagaggcaatgttatataatttcaagaggcgtgaattaaccagaaccgggcagataacggatctttcgccattccggcccggaggtatgtgatcaggaggtagtaatgaatacagacagatatgtaagcccgctgtcagagcggtatgcaagtaaagagatgcagtatattttttctccggacatgaagttccgcacatggagaaagctgtggatcgcacttgctgagacggaacgtgagcttggccttaacattacccaggagcagatcgacgaaatgaaggctcatgcggatgatatcaattatgatgtggctaaggagcgtgagcgtcaggttcgccatgatgtaatgtctcacgtgtatgcgtttggcgtacagtgcccgaaggcaaaaggcattatccatctgggagcaacctcttgttatgtaggagataatacggatatcatcattatgacagaggcgctgaagcttgtccgcaagaaacttgtgaacgtgatcgcagagctttccaagtttgcagcacagtataaggaccagccaactctggcgtttactcatttccagccggcacagccgacaaccgtaggtaagagagcaactctctggactcaggaattcctgatggatcttgaggaccttgagtatgtattaagcactatgaagcttcttggctccaagggaacaaccggtacacaggctagcttcctggaactttttgacggggatcaggagaccatcgacaagatcgatccgatgatcgcagagaagatgggattcagatcctgctatccggtttccggacagacctattctagaaaggttgatacccgtgtgctgaatatccttgcgggaatcgctgcaagtgcacataagatgtccaacgatatccgtcttcttcagcatctgaaagaagtagaggagccatttgagaaatcccagatcggatcttccgctatggcatataagagaaatccgatgagaagtgagagaattgcttccctgtccagatatgtgatgattgatgcactgaacccggcgatcacatctgcaacacagtggtttgagagaactctggacgactctgcaaacaagcgtctcagcgttccggaaggattccttgcgatcgacggaatcctggatctctgcctcaatgttgtagacggactggttgtttatccgaaggttatcgagaagagactgatgtctgagcttccatttatggcaactgagaatatcatgatggatgcagttaaggcaggcggagaccgtcaggagcttcatgagcgtatccgtgagctttccatggaagcaggaaagaacgtgaaggtagagggtaaagataacaatcttcttgagctgatcgcagcagatccggcatttaacctgactcttgaggatcttcagaaatccatggatccgtccagatatacaggacgtgccaaagagcagacagaggcatttatcgccaatgtggtacagccggttctggatgcacataaggatctgcttggcgttaaggttgagatcaacgtataattccaagatgttataaacattaagaaatgaacacagacaggaatgacgtgtctctgtgtattacaggcagagaacatgtcgttccgaataatagagaaagacacaaggaggaaactgtgttatggtaactgcagtagtaggagcaaactggggagatgaaggtaaaggcaagatcacagatatgcttgctgagaaagccgatatcatcgtaagatttcagggtggagccaatgcgggccacaccatcgtaaatgattacggtaaattcgcacttcatacacttccgtcaggtgtgttttacggacatacaacaagtgtcatcggaaacggtgttgcactgaacattccggtattcttcaaggagtacaacgaagtagtaggccgtggagtaccggcaccgaagatcctgatctccaacagagcacagatggtaatgtcttaccacattctgtttgatcagtatgaagaggagcgtcttggcggcaaggctttcggttccacaaaatccggaatcgctccgttctattctgacaaatatgcaaagatcggcttccaggtaagtgagctttttgatgaggaaacactgaaagagaaggttgtacgtatctgcgagaccaagaacgtaacacttgagcatctctatcataagcctcttctgaaaccggaagacatcatgaatgagttgatggaatacaagaagatggttgagccatacgtatgcgacgtatctctctatctctggaatgcactgaaagagggaaaacaggttcttcttgagggacagctcggaactctgaaagacccggatcacggaatctatccgatggttacatcctcttccacactggctgcttatggtgctatcggtgcaggcctgcctccatatgagatcaagaaggtcgtaaccgtatgcaaagcttactctagtgcagttggagcaggtgcattcgtttctgaaatcttcggcgaggaagcagatgagctgagaaaacgtggcggtgacggtggtgagttcggtgctactacaggccgtccgagacgtatgggatggttcgactgtgttgcatccaaatacggatgccgtctccagggagctacagacgttgcttttacagtactggatgttctgggatatctggatgagatcccggtttgcacaggctatgagatcgacggagaggtaacaacagaattcccgacaactgtgcagcttgagaaagcaaaaccggttattgagaagcttccgggatggaaatgcgatatccgtggaatcaaaaaatatgaggatcttccggagaactgcagaaaatatgtagagttcgtagaaaaacatattggattcccgatcacaatgatctctaacggaccaggaagaaacgacatcatttatagataattatttttacagtatcaggattatgacaacaggaagcgctggggaagaatttctccggcgcccttttggttcaaagagatattcagttaaaataacagatagaatagcggatgtatcatgtgaaaggaagctcaatgaaaaattttaaaagaatcgcggcacttgcaggtgttgtcatattacttcttatattctgccttccaatggcatttgcctggggaagcagtgaaaacgcccaggctttgttccggggggcttttgcggcagcagttctggtaccgatcgtagcgtatgttttctggatggcgtaccggatctggggaaataagaagccgagagaggatgaaaaccgtatgatcgagaatattatttttgatgtgggaaatgtgctgatgggctatgactgggaagagtatcttcggagctatgacttcccggaagaaaagtatcagaaaattgcagatgcagtatttcgaaacccgatctgggaggaacaggaccgtggacagcatgaggagtcctggtatgtagataaatttgtggaaagtgcaccggaatatgaagcagatatccgtgaggtggtacgacgtgatccggagtgtatgcatctgtatgattatgcggaaacctgggtgaaatatctcaaaaatcagggatatcatctctatgtcctttccaactacggaacttatatgctggatcgtacaaagcaggatatgtcttttctgaaatatatggatggagtggtattttcctgtgatgtgcagcagatcaagcctgaggtggatatttacaaaacacttctgaagcgttacagcctgaaaccggagaaatcggtatttctggatgatcgtgccgtgaactgtgagggagccggaaaagccggtatccataccatccagtttgagaatctgaagcaggcggcgaaggcgcttgagaagcttggtgtgaaatgaccttcagtgtgaaaagagaaaacgcagagggcctgcaccatcgcgaagccctctgcattctaaaggggaggatatgataagtatctcccggaacggcatctgttatacagaaaatatataagatcttgtaatcttttattccctgttcttcttccggtattcaccgggagtcattccatatgtttttttaaaagtacgcatgaaatgctctggactttcataccctacaagttcacagatcgcaagattgttgagagaggtttcacgcagagcatgacatgcctggttcagcttgatatcccggatgatctgtaaaaatgtccgtccggtactttccctgatcagggtactgaagtgggaagtactatagccaaaatgcttcgcagcttcacgtaaggtaacgctctggtagtgacggttcaggtagttgaggattttcgttacagaatttccggtgctgtcctttgtaaggatggattcaatatcattttcgtgaaaacgcagcagcatggcccagaatattaaaagcaacactgtcatcaaagatccccacactgtgagtggtatggggtgggatgatacagatatctccggtatgcaaagtgtgttcgatcccctgtatcgcagtgtgggcagttccatcatacagacagagaatctcaaaaaattcatgttcatggggaaaaacaggggtatagcggtaatgcttggaaagcacgatattgccatttatatcatgagcaagtcaggtatggatgatcctggcggaagcagtcagcggcgaagaaggagcagaaatactggatcgtctggtggaactgaaaccggaaaaaggaatggtttctccgtatatgaaccatcattttgtggaagcacttctgatgtgtggtaaaaaagaccaggcaatggaatatatgaaatattactggggcggaatgataagccacggtgcggatacattctgggagctttataatccggaaaatcctgcagaatctccatatggaagcagcattgtcaacagctactgccacgcatggagctgcactccgacttatcttcttagaaaatattttaactgaagcaagtaagtcccctgcgggggcgcgaatatctgcttgaactaaatcacagtgtgataaaataactcggatatgaaacagatgtatttgatttcttcgccaaaagatgatataataaatagaaattgcgaagcggaatataaatctccgtcttatttatctaaaattttggaaaagaggatcagacaatgagcgatatgacaattcttgagcagtggcgttccattgcttataatcagaatgcagataagaataagcttcagcgcttctgggcaaattattttaacattgagaagaatatttatgagcagcttcttgagaacccggatgagatcgtttccggaactgtaaaagagcttgctgagaaatacggtcaggacgttatgactatggttggtttccttgacggaatcaatgacagtctgaaggttccgaacccgatcgagactatggatgaggataccaaggtaaaccttgcatttgataaagaggctctctataagaacatggtagatgccaaggctgactggctttacaaccttcctcagtgggacaagatcttcacagaagagaaaaagaaaaccctctacatggagcagaaaaaatccggcacagttgtgaaaccgcacaaggtcggaagaaacgatccgtgcccatgcggaagcggcaagaaatacaaacactgctgcggaagataatgagcgtaaagaagaatctggattacattatcgtgttaggtgcccatgtggacggaacacggatgacacttgcccttctggaacgagccagaagggctcttctttatcttgaagaaaatccgggtacgaaggcagtgctctctggaggaaaaggcgatggagaaaacatttccgaggcagaggccatgtatcgttatcttaccggtcacggaatagacggggacagactgatacgggaagaagaatctaccagtacgaaagagaatttggaattcagccgcagaaggatcggaaccacagactgttccgtaggcgtggtgacgaacaattttcatgtatggagaggagcagccattgcaagaaaatgtggattccgggaagtggccatggtaccttccaggtatcgaagctggcgtctttttatttacattccccgtgagattctggccattatcaaagacaaactcatgggaaatctgtagatctgtgcgagaagagaaatctcaaaaattttgtcaacatgcgttgacaaataaaaatactgcgcttataatgaaccacagaaaaagaaataaaaaacacgttgacgagacgagtaagctgtgaaacgttacagagagagatgtgaagtgctggaaacatcttatcgggaaacagccgaagactacctccgagtggccccaatccggtccggtgattccgttatcatcataattgagaggctttgcatcctggcatgaccgggcagcagagcaagcagggtggaaccgcgagaatgaatgaactcgtcccttacagtatgtgatgtgctgtgagggatttttttattgcagaatctcttgcaaaagcagacacatactgtgtaccatagaaacttcatttaaaatgaaaggagaaacaacaatgatcattacattaaaagacggctcaaaaaaagaatatgcagaagcaaaagctgtgatcgatatcgcatatgacatcagcgaaggccttgcacgtgctgcatgtgcaggagaagtaaacggagaggtcgtagatcttcgtacagttcttgacagcgactgtgagctgaatatccttacagcgaaagacgagaagggccttgcagttctccgtcatacagcatctcacgtaatggcacaggctgtacagaacttatacccggaggcaaaggttgccatcggaccatccattgatacaggcttctactatgatttcgaccacgagccattttcacgtgaggatcttgacgccattgagaaagagatgaaaaagatcatcaaaaaaggcgcaaagatcgagcgttttacaaaatcccgtgaggatgccatcgcatactttaaagagaaaaatgagccatacaaggttgagctgatcgaggatcttccggagggagaagagatttccttctattcacagggagactggacagacctctgtgcaggcccgcacctgatgagtgtaaaaggcatcaaggcattcaagcttctttcttcttccagcgcatactggagaggcagtgagaaaaacgcaatgctcacacgtatctacggaacagcctatgctacaaaggatgagctgaaagagcatctggagcagatggaagaagcaaagagacgtgaccataacaagcttggccgtgagatgaagatcttcacaactgtagatgtgatcggacagggacttccgcttatcatgccaaacggtgtgatcatgatgcaggagcttcagcgctggatcgaggatgaggagacaaagcgtggatatgtaagaacaaaaactcctcttatggcaaagagcgatctctacaagatctccggacactgggatcattacaaagatggtatgttcgtacttggtgatgaggagaaggacaaagaggtttatgcacttcgtccgatgacatgtccgttccagtactatgtatacaaagcagagcagcacagctaccgtgatctgccgatccgtctcggcgagacctccacactgttccgtaatgaggattccggagagatgcatggtctgacacgagttcgtcagtttactatttccgagggacatctgatcgtaagaccggaccagatggtaaaagagttcaaagactgtatcgcacttgcccagtactgtctgcaggtacttggtgttgaggaagatgtaacctatcatctttccaaatgggatccgacaaacaaagagaaatacatcggtgagccggaggtatgggaagagacagaaggccatatccgccagatgcttgaggagctgaacattccattcacagaggatgtgggcgaggctgctttctacggaccgaaggttgatatcaacgcaaagaacgtatacggaaaagaagacaccatgatcacgatccagtgggatgcacttcttgcagagcagtttgatatgtactatatcgatgagaatggcgacaaacagcgtccgtacatcatccaccgtacatccatgggatgctatgagagaacactggcatggctcattgagaaatacgcaggaatgttcccgacatggctctgccctgagcaggttcgtgtgatcccgatctccgagaagtacaacgattatgcacagaaggttgaagctcagatgagagaagcaggaatccgctgctctgtagacggacgttccgagaagatgggatacaagatccgtgaggcacgtcttgagagagtaccttacatgcttatcgttggtgcaaaagaggaagaagagggtaaggtttctgtaagaagccgctaccttggtgatgagggaatgaaagagcttggtgagttcattgacttcatcaaagaagagatcaagaacaaaacaatccgtaagatcgaggttcaggaagagaagaaataaacaaaacagatgattgacggataaataaaaggcgacccgtgtgataggcgggccgcctttatttttgatccggcaatattgaggccacgctgtgatgcggaggcggtcagtattgccggatattttttatttaaaatatttctccctcacgagctcaaccggcatgtccagtccggtccagatgtggaaagcctttacaccctggtggagcagcatgtacattccgttaaaggtcggacatccggcttcccgggcttccctgagaagtcttgtttctcttggttcatatacaacatcggctacggtaagctccggatggaacagagtcttgtccgggatcacggtgcctgtcacatccggaaccattcccacagaagttgcattgatgaggagattgctttcctccagtgcgtccttcagcgcagtgtgatcatccatctcatgaaggatcatctcacattctgtcatatgagacattttttctgccatggaaacggcgcgttcccagtaacggctggtaggacgtgcaaaaacatggatcttttttgcaccctccagggcggactggccgcagatcgccattccggcaccgccgacgcccataacggtgatggtgcgtccttttacatcacagccggcatctctggcagactgggtaaatccataaccatccgtattaaacccctttaattttccattgtcgttgcgtacggtatttaccgctccgatcagctgggcagtgggagaaagctcgtccagaagctccacgatcttattcttgtttggcatggtcaggttaaagcccttgatcccacaggctttcagtccttccacagcctggggaagggtctcctctgttacatcaaaacagagatacacataatcaagtccaagataacggaatgcctcattgtgcattaaaggtgatacgctgtgtgccacggggcttcccagaaggccggtaagcccggtatgtccggtaatattgatcattgttcgattccctcctgtatctcataaaatagaatttctttacgaaatataataaaaaatattttaacactataaagtgcgaaaatcaacaaatacaaatattgtacggaaatttatacatttttgtcgccgattcatagaaaaaatctataaatgtcgaggcagacagaaacgacccgataagttagaagaatcgacatccggatttgacaaaatatgcaaagagcctgccctataataaatacacttaccaaagttgagaatcgatggcagacgaaacagcagtgggggaagcttatgtatcagaggatgtacatagatatcgtttttatgacgaatttccttatggattacatgcttttaagacttgtgggaaaatttctgcatcttgatgggaaacgcagaagatgtgtgatatccgctgcctttggatcttttgtatcctgcctgcttgtatgtgcaccttttaagatcatttttcctgccgctgtactaatccatggcggctgcgctttttttatggcgtcgtttgcttttcgactgaaaaaaggcggccttcttgtaaaaaccattctggctctgtatttcacagcttttgtggttggcgggatctatcaggcactggaaacggaaagaaccatgacggtgaaaatatttctgctttttctggcagggatttatggcacactttatactctgggatgtgtgaccgagaccttccggtttggaagaagaaatatttttccggtcactttgaaatatcaggggaagctgcagcagacatacggcttttatgataccggaaatctccttatggatcctgtgaaaaaacagccggtatcgatcatcaaacaggaactcctgggaagcctgatatcgaaagagcaggtgaaaaaactgatggatattaaagataaaccagaggcactggaaaatacaggatttgtcagtctgcagccgcattttctgagctgccataccgcagatggaaaaaaaggactgctgctggcagtgatccttgatgaacttctgatccagactcccgaaagggtggtacatgtaggaaaaccggtgcttgccataacatccgagccctcagctttgggagaagagtacgagatacttttgaattccagactattaaattgagaagggggcttatgttatgaacagagcagctgcaagatcctatccgtttcaggtgatccggaaatttatgttcaatcgtccgggagaggttttttatattggtggaaatgatatccttccggcgccgttgtcagcggaacgggaggctgaagtgatcgaaatgctgggaacagaaaaggaaaaagagggaaagtcggttctgatcgagcacaatctacggctggtggtttatattgcaaagaaatttgataatacaggggtaggtgtggaggatctgatctccatcggaaccatagggctcataaaggctatcaatacctttgatccggtaaaaaatatcaagcttgctacctatgcatcacgatgtatcgaaaatgagatcctgatgtatctgaggagaaacagcaaaacaaagatggaggtttccattgatgagccgctgaatgtggactgggatggaaatgagctgctactttcggatatcctgggaacggatgacgatgtgatctccagacgtctggaagatgaggtggagatcgcacttcttggaaaagccatcagcaaactgacaaagcgggaacagatgatcatccgtctgcgattcggtatcggaaaccgggaaggaagcgagaaaacacagaaggaggtagcggatcttttaggaatttcgcaatcctacatttctcgcctggaaaagcggatcatgaagcggctgcggaaagaaatcgtaaagtatgaatagatgaaaccgaaaaaaacggtttaccggacaggtttcccttatggaggaagtaaaaccaaaaaatatttttgagacaccacagggagatgagcgtcttggatggaccggtgatgcagaaatcttctgccgtacggcatgcttccttgaaaatacctattccttctaccgaaaatggctccgtgatgtggaggcagaccagacagaggaggacggtgtcgcccatgttgttccggatatcatttccgaaaacgaaggggataactggctctttgagcagggaagtcattcggcagcagcgagaagatttaaaattccgggaaatacagtagaatttgtcagagaccttcgatataataaatacagagtgtttacagagctacagaatgaacaaaagaagaaggggtgtggcagaatgatcgacattgcacatgcaaaacaggaattcgagaaatatctggatgaatacgaccgggaggatgaacagatctgtctgaagatcgtacatacctatggcgtggtgaaatacgcaggagagattgccagaaaaatggaatgttccggtgaagatgtggaacttgcggagctgatcggtctgcttcatgatattggccgttttgagcagatccgtagatttcacagctttgagccgggaaccatggatcatgccgtgttcggtgcagaacttctcttcggggaggagaagctgatccggcgtttcgtggaggatgataaatttgatgagctgatcgatgcagcaattcggaagcacagtgatttcaaactggaaggaatccacgatgcaagaacacttttccatgcaaaactgatccgggatgccgataagctggataactgcagagtaaagctggaggcgtcaatagaggccatgcttggtgtatcagaagaggttgcaggagaagggctgatctcaccggcagtgtgggagtcctgtctcagaagagaatccgtgttatccgcagacagacatgtgccggtggattactgggtatcttatcttgcacagtattatgatattaattttcctgagacctgtgagatcatcgaagaagaggattatatcaccaggatcgcagggcggctgacttatcaggaacaggataccagaactaagctccatattctcacagaagatctgaacaggtatctggagatgccggctgtgtctgtgaaggaataggagcatagcagttactgttcactggcaatgttccgcgaggtgttttttgtgagcggaggtcacagaaaacccgagacataccgcgcgaatttatgcgattagcataaattctgtgcatcgcgaagcgtgttactgaaaacggagtgaacagtaactcatagcagggagacttgttatatttttttgtttggggttgactttgaggtggttttcgcctaaaatatatcaaagatacggcgatgatgagaatagtacacagggaattatctcagagagggatctgctttggtggaaggatcctgtgcgtgaactgtggaaccggcctcggagctctgcgtgattgaagcgtggcgtgtgtttccggcgttaacgggtgttgagagaacagctttttaggctgttaactggggtggtaccgccgaagtcattcggtcccttgtgagggatttggatggcttatttttttgtccgtaaaacgggattgtaaatacagtgtacggtttatgggacagaagagtgagctggaaggattccggattgctgtggctgcctgacagccggcaatatgtaacagatcacaagaaaaaggagatttatcatggcaaaagaaaagaaattagtacaggccatcacatctatggatgaggattttgctcagtggtatacagacgttgttaagaaggctgagctctgtggctatacaagtgttaagggctgtatggcgatcaaacctgcaggttatgcgatctgggagaatatccagcatgagcttgaccgcagatttaaagaaaccggtgtagagaacgtttacatgccgatctttatcccggagtctcttcttgataaagagaaagatcatgtagaaggttttgctccggaggttgcatgggtgactcatggcggccttgatccgctgcaggagagactttgcgtgcgtccgacttctgagactctgttctgcgatttctaccagaaagagatccagtcccacagagatcttccaaaggtatataatcagtggtgttccgttgtccgttgggagaagacaacacgtcccttccttcgttccagagagttcctgtggcaggagggacatactgctcatgcaacagctgaggaagcggagcagcgtaccatccagatgctgaacatctatgcagacttctgcgaggaagttcttgcgattccggtcatcaaaggccagaagacagacaaggagaaatttgcaggtgctgaggctacttataccatcgaatctctgatgcacgacggtaaggctctccagtccggtacaagccataactttggagatggctttgccaaagcattcggaatccagtacacagataaagataacacactgaaatatgttcaccagacatcctggggaatgacaacccgtatgatcggtgcgatcatcatggttcacggtgataacagcggacttgttcttcctccgaggatcgctccggtacagactgtgatcatcccgatccagcagcgtaaagaaggggttatggagaaggctgacgagcttcttgcagcactgaaggcagcaggtatccgtgcaaaggttgacgcgacagacaagagcccgggattcaagtttgctgagcaggagatgcgtggtatcccgcttcgtgtggaatgtggaccgaaggatatcgagaacggtcaggcagttctctgcagaagagatacccgtgagaaatacacagtatccttcgaggaacttgcagataaggtaaaagagcttctggataccattcagcatgatatgctggagcgcgcacgtgcacacagagacgcacatacttacgtagcaaagaattatgaggagttcggtgagatcatcaacagcaaaccgggattcatcaaagctatgtggtgcggtgatcgtgcatgtgaagacaagatcaaggaagatttccaggcaacatccagatgtatgccgtttgagcaggagcagttaagcgacgtttgcgtatgctgcggaaaaccggctaagaaaatggtttactggggacgtgcatactaaaaaatacagcaggccacttcaaaaaagtgggatgatcatattgcgttactgttcactggtaat

SEQ ID NO: 205 - DNA, 2808 bp, Unknown
  gut microbiota DNA sequence
cagaattaaacagggggataccttccccgcctcctaataagaaaacatgagatagtccagtaaaatcaatgttttcagaggcaaggaacacgatgtgaagtcaaaaaatcaaatactggcaggataaagggtgctgatgtgaaatatcagcacccttttcctgtcccaaacgccatagggaatcctatggcgtttttactttccatcaagtacacggaaaactgtattgaaaggggtgagaaatcgaaggtatttcttcatgtaggaaatgcaaatcaagtgtccataggttttcccacatggagaagcaagtgggcacagaattgaattttttccgaaaacgaacacttttccagaccgccggagggaggtgagattatggcggtatttcgcattgagaaaacccgcgactacacggtgatggcaaaccatcatctgcggaacacggcactgtcgctgaaagcgaaggggctgctgtccctcatgctatccttgccggaggattgggactacaccaccaaaggtcttgcgcggatatgccgggatggagtggacagcatttgtgctacggtccgggagctggaggatgcgggatacattatccgtgaaagagtccgcaacgccaacgggcggctcggcagcatcgagtacacgattttggagcagcccaggccgccggaacctaaaccgggaaaacctgaacgggaaaatccagttcaggtaaaaccagtcttggattctcctgtcttgggaaaacctgaacaggaaaaacccgcacaattaaatactaaaggatcaagtaaccaaatatcaaatactgattcatcaagtacggaaggatcaaatcctatccaatcaagtccccaaacccccgcagagaccaaacgaaccggacgggactggatgcgggagcgagagagctatcgggaactgattttggagaatatcgagtatgactatctatgccgggatgaccggctggatcgggatatgctgaatgaactggtggaactcatggtggataccgtctgttcccgcagggaaacgatccgcattgccggggacgactatccggcggaggtggtcaaatcccggttcctgaagctgaacagttctcacattgagtatgtgttggaccgtatgcgggagaacaccacctatgtccgcaacatcaagaaatatctgctggctgccctgtataacgccccggccaccatcgacagctactatgcgtccctggtgaaccatgacctgtacggcagcggagaaaggagatgataggtcatgcaggaagaagtcacccagcgcaccattgccctctgtgtggaggccaccaaactctccgccgggatgctgcagcaggccatgaaaaaagtgctggacgagatgcagaaaggagtgaccggccataagaccaagctgcaccacggaaagcagaccctccggcagctgatgaagcacaacaccggcgtttccaacatcgagatcaccgaccggaacatccgggccttttccgccaccgccaagaagtacggcattgactttgctctgaaaaaggataccagcggcgagataccccgctacctggtgttcttcaagggccgggatgccgacgttatcacggcagcctttcgggagttctccgcaaagaacctggagaaagagaaaaagccctccatccgcaaggagctggagcaggcgaaacagcagtccaaagcccagcaccgccagcgggagaaggtcaagaccaaagaccggggtgtggaattatgacggttgactggaagaaaaagctgatccccaacctcccgtatctgctgttcgtgtatctctttgacaagctctgccaggcggtgcgccttgcgcccggccttgacgcctctgaaaagttcctgcatttgagccagggctttacggaggcgttttcttctgggctgccaagtctgcatccgctggacctgctggcgggtatcgccggggcggtcattgttcggctggcggtgtatgccaagagcaagaatacaaagaaatatcgcaagggcattgagtacggcagcgcacgatggggcacggcggccgatattgccccctatgtcgatccggttcccgactggaacattcctttgacccagacggaaaagctcaccatgtccagccgcccgaaaaatcccaagtacgcccgaaacaagaacattctggtcatcggcggcagcggcagcggcaagacccggttcttcgtcaagccctcactcatgcagatgcacagcagctatgtggtcaccgatcccaaaggacagcttttgtccgaggtggggaccatgctgcggcggggcgcccccaagctggacgagaacggaaaacccctgcgggatgcccgcgggaaggtcatctatgagccgtaccgcattaaagtcctcaacaccatcaacttcaaaaagagcatgaaatacaaccccttcgcctatattcggtcggagaaagacatcctcaaattggtcaatgtcatcattgccaacaccaaaggcgacggagaaaaatcctcggaagatttttgggtgaaggccgagcggcttttgtactgcgccctgatcgggtacatctggtacgaggcggagccggaagaaaagaacttcctcacgctgctggagctcatcaacgcatcggaggccagagaggacgacgaggaatttcagtcgcccgtggatattctgttcgccaagctggagaaggagcacccggaccacttcgctgtgaagcagtaccgcaaattcaaattggctgccggcaagaccttgaaatccatcctga

SEQ ID NO: 206 - DNA, 5204 bp, Unknown
  gut microbiota DNA sequence
tttataactttttataagttttcagtaacggtacataagttatgaacattaatgaaatagccaggcttgccggagtttccagagctacggtatccagatatttgaataatggatatgtcagcagtgaaaaaaaggaagtcatccgcagggtgatccaggagacaggatatcagccatcctcacaggcacagacactgcggaccaaaaaaaccagtctcatcggtgtcatccttccaaagatcaattcagataccataagccgtgaggtgacagggatcagtgatattcttacacggagaggatatcagcttattctggccaataccaataatgatgtggaagaagagctgaaatacctttctctgtttaaagaacgtcaggtggacggagtggtttttattgctaccatgtttaccagaaagcataaacagatgctgaaggattataaggtaccgatcgtgatcctgggacagcatctggacggatatccatgtatttatcaggatgatcataaagcagcttttcaggtcacggagaagctggcggagaaggggaaaaagtttgcctatatcggcgttacagataaggacgaggcagttggtgcctgtagaaaaaagggttttatggatgctatccataaagctaagctggaggtcgtgccggagaggatgaagatcggaagctttaccatggattccgggtatgagatggcgaaggagctttttgaggaggagccttccatagattctcttgtgtgtgctacggatactatggcggtgggagccatgacttatttgaaggagatcgggcttcgcattcccgaggatgttcagatcgcagggatcggggatggagttccgggtaagatcgtggaaccgaagctgacaacggtacatttttattataagaccagcggaatggaggcagcagccatgctggctgatcttattgagaacgataccgggatcagcaaggaaataaaaatgggatgtgagcttgtggaacgggaatctcacaggtaacagagaatatcctcgcagacagaggaagaaattataagttattgtggaacaggagcagatcttttgggagaaaaagatctgctcctttttttgtgtggtgctgtgttatggctgagcaaacacagaaaaatgccagattttttctgcgatgtcctgactggtttgtctgtcttgcatctgttcttatggaatatgtacaattttaaccgaagaaatttgtgcgatgttgcggatttacaaataataatgcagtagttataatacaagtaagatatgagaacgattccatataagagcgcaagcaacaacataaaacaaaccattgaaaagtgttaaaatcatcaaaaagcttaaaaaaatggaaagattaccgttctttgtatgaatggatacatgaaatcaatctcataaataaataaaaaacaatggatcagagataataaatcccgggaagctgaagaaagaacagacagatctgatccgaagaaagggaaagcagaaagagatgactgtccgggaacagtagcagaaaaggaggaaggacatggattacagaaagacagcacaggaaatctatgatcatataggaaagaaagaaaacatcatttccgcggcgcactgtgcaacaaggcttcgtctggtcattgcggataatgacaaggcggataaggaatatgtagagaacatcgacggtgtgaagggcgtgtttttcgcgcaaggacagatgcagatcatcctgggaacaggagttgtaaacaaggtttatgatgaatttatccagatcgccggaatatcagagagtagtaaggatgagcttaagaaggtggcagcatccaaggctaatccgatacagagactgatcaagacactgggagatatttttgtcccgatcatcccagctatcgtagccagcggatttttgatgggaatcatggaagccctgaacttcatggtaaacaacggcttcctgaatattaacaccaatggttccatttatgtatttgcacagcttttcagtaacacagcgtatacatttctgccgatccttatcgcttacagtggtgcgaaggtatttggtgccaacccttatctgggtgcggttatcggtatgatcatgatccatccaaatctgcagaatgcctggactgttgcaacagagggtgtgcaggcaacgcagaaggtatggtttggactttactccattgacatggtgggatatcagggacatgtgatcccggttatcattgcagtatgggtactggcacagatcgagaaaagacttcataagatcgtacctgcaatgttcgatctttttgtaacaccacttgtcagtgtttttgtaaccggttatcttacactttccattatcggaccgatcttcgtagctgttgagaacggacttctggatgggatccagtggctgatcgcactgccatttggaatcggaagctttatcatgggtgccttttatgcaccgactgttgttgctggtgttcatcacatgtacactatcattgaccttggacagctggccaaattcggcgttacctactggctgccacttgcatctgcagctaacattgcacagggtggtgcagctcttgctgtaggcctgaaatccagaaatcagaagatcaaatccatggctgttccttctgccttaagcgcatgcatgggaatcacagagccggcaatcttcggtgtaaacctccgcttcggaaagccgtttatcatgggctgcctgggtggtgcatgcggagcactttttgcttccatcaccagtcttggtgccacaggaacaggtgttaccggtatctttggaatactgctgtgcctgaataatccagttggttatatcctgatgtttgccatcgcatttggtgtggcttttgtgcttacctggatgttcggatataaggatgaggtacaggaaacagctgaaaaaaatattgaagcagagaaaaaatcagatgctccggcagaaattgcccaggagaaaacttcagagacaggtgcacagaccctctacagcccgcttgagggaattgcgatcccgctttcagaagtaaaggatgcaacctttgcatctgaagtccttggaaggggcatggcagtgattccgtccaaaggtgaagtaaaagcaccctgtgacgctacggtttctacaatttttgacacaaagcatgccatcgggcttgcaacagaaagtggtctggagctgctgatccatatcggcgttgacaccgttgaacttggcggtaaattctacacagctcatgtaaaggacggtgacgtggtcaaaaaaggccagacactgattacttttgatatggatgctattaaggcagccggctatgatgtgaccacaccgctgatcgtaaccaataccgatgattatgaagaagtaaaaatgcttgcagaaggaacagtaaataatggttctgaagtactggaggtaaaataaaatgagttctctgaccaaggtacttgcagaggaagtgcgaaaaatcgaggaaacggcagcagttgccaggacgatgcagacaaaccgtctgacccatcatctgatgccgcctgtgggatggctcaatgacccgaacggattatgctggtacaagggaagatatcatgtgtttttccagtattctccgtttgaggccaacggtggactgaaattctggggacattactccagtgaagatatgatcagctggagatatgaaggggttccgcttctgccggacagcatttatgattgtcatggtgtttactcaggctctgccattgcggagaaagataagcttcatcttttctacacaggaaacatcaagatggatggagattatgattatatcaataacggaaggcagtccagcactcttcatgtggagagtgcggacggtcttcatttcggaacaaaggaggttgcagtttcctgtgaggattatccggagaattacacctgccacatccgtgacccgaaggtctggaaggagggggaagagtaccggatgatccttggcggccgtcagaaaagcgaccagggcgccgtacttttttacagatccgaagatctgaagaactggaaatttgacagtgagcttactacggagaaggcattcggatacatgtgggagtgcccggattttttcactcttgagggacaggaggtgctttctgtatctccccagggactgaccagagaagagttccgttttcagaacatctatcagtccggatactttatcctgaaggatggaaagccggaggaaaaagctttccgggaatgggaccacggctttgatttctatgcaccccagacattccaggatggaaagggcagacggatcctgatcggctggatgggaatgccggatgcagatgaggagtatgtgaatcctacagcagagagcgaaggctggcagcattgcctgactgttccaagggaagttacgtataaaaacggaatgctttatcagtatccggtggaagaactgaacgggctgagaaaggctggcgtttctgtcagcggttccagtgcggagattccggtgaatggaccgtttgatctggatgttcaggtaaaaggtgagcagggtaaagtaagccttgggaaaaacctcttcctggtgtatcaggacggagatgtgatcttaactctctccgagaaggccggtgccggacgaaaggcacgtaaggcgcatgttccgtccggtaggatcgaaagcatcagagctcttgttgatactacagctgtggaaatctatgtgaatggcggagaggttgttttctcttccagatattatccggaaacgcaggaacagactgtgaaggtggaggctgtggagtgtgatgggaagatttatatgttgaagaattatgtgatggagtaggcagagcttattgatcgtgaaatacagcaagatcagaatacgaatacctatagagcagctatgcagtgaattccatattcacagaaataagaaatgaccgtataataaagcaggtgggaaaatccgcagccggaatcccgacctgcttttatttttttgatgtaagtgaaatacatgaattgtgccggctgcttgaggatagaaggacggctgctgaagaaatgctggtggctgtctttacatagaaggaaggatatcagctgccgggatatcggtcttacaggacgac

SEQ ID NO: 207 - DNA, 6975 bp, Unknown
  gut microbiota DNA sequence
caatgggacttaatatttctacagttaagaccagactttcaagaggaaaaagaaaactcagaaaaatgttatcggatgcggaggaaaaattatgagaagaaaaaatttgcttaaagaattgggaatacaaaaacaggcagatacttcctgcaatgctcttgatattgatacagagaatgtcagacagagagtttatgcaaaacttaacttcgcagatacagaaaggaagcaaacgactatgagatcaaaaaagaaaatgttacctttgttgatagctgcaacacttacaattggagttactgctgtggcagcaaccggaaagatttcaatgtggacaggttcatctgcatcacgtgctgattatacatctcttccaacgtcagaacagattacaaaggatattgggtatagaccggtattgattgatacctttgagaacgggtactgcttcaaagagggcaatattataaaaaacagttttaaggatggcaatgcaaatgtaattgagaattttaaatctgtgtcctttgattatcagaagaatggagatgttgtatcgtttgaacagcagaaatttaactcaaaacttactccgtcaggtgatattattgccactgtaaatgaaacaaatttgtattatgtacattatataaataaagtggtatcagatgattacgaattgacagaacaagataaaaaagaccagtccagtggaaaagttgtattcagttacgatgacagtgcttctcagattgaagtcagtcaggttcaaagcgttaactggaataaggatggcatctggtatgatttgctgcaaatagatggaaaattatctgccagagaacttgcagatatggcgagagaggttattgataacagaagataatcgagtaggagggagtgattagctcctgtccttttatcgaaaccgccgtgcgtaccgtttggtacacggcggtttcaatgagttgacgtgcacagactgataagcttccaatacatgctacagtgcagtgcccttcccgggaataaataaacggctcatatctgcatgctccagttcaagaagcgctatttttttgtcaatgcctccggcatatcctgtcaggctgccatttgcgcctactacacgatgacagggaatgataatagaaactttgttgtggccaactgcaccgcctacagcttgtgcagacatatgagaaagttgctgcatttcagctacttttcgtgcaatctctccatatgtgatcgtctgcccataaggaatctgtaataaaatctgccatactgcctgtctgaatgcggatccggaaggatgaagagggggagtaaatgtggggtcctcaccggagaaatatatatccagccatttttttgcctttgtaaggattttcgtctcctgcactattctcttatcaggaagtgtgttggcaaaatatttctggccttcaaaccacagaccggtaagcccaatatcatcggcagccagtaaaatatttcctagaggtgataaatatgtagagatatagatcattttcaacctgcctttcaaaaatcatattctcccatatatgatgaacagaataccggtcaatgtcaagatggcatacagtaagaattatgttaatgcgatcgtagcttccaaggttcagaaaagaagctgttctttcagtttccattttctgttcctggaagtaaaggctgcctccacagaattcagaagtagcagccttttctgctcctgggtaagatttaacagagattccatatatcggaattcccgggaaagggttgttctttcaatcgccggatcatcggtatttaaggttaccttaagtcccatttcgagaaatgctttcagcggataatcagacatttcttccacagcttttgtctggcggttgcttgtaggacacatttccagaaaaatccccttatcctttacaagctgtatcacttccttatttcctgcaatcctcacaccatggccgatcctgactgcacccatatggaccgctgtttttacatcctctgcatctccggcctcgcctgcatggatggtaaatggaacctgatattctcttgcttttgcaaaaagtgcctcgtaattttctgttggaaagagtgcctcggctcctgcaagatcgatagcaaccacgccgccatcttcaacaagatatttttttgccagctccagagtttccagattttctttctggttaagatcaccgcgcatacagcataagatcagattaccggggatgggagctcttttcagaccacgtaatgcagcatggatcgctgtttcctgagtcatttccttctgtgtatggaactgtggggcaaaacgaagttctgcgtagatcacaccgtcttctttcatttcagaaaggataagataaacagcttcttccaatgcctcttctgtctgaagaagggaaagaggcaggtcaaagcatttcagaaaatcattgagattttcgcaggtatccggcacagaaaggagagaaagaagctcttcatctgtggtggccggaagtgtgatctgctgcaatgcggcaagtcttttggctatctctggggtaatgcagccgtccagatgtgcgtggagatcgatgtagtgattaattatattttctgttttcataggcgttaagtacctccctgtcaggatttattcttatcccggaaatgattttatatttcttaaggtatctgtcggaaggaaatattaaggtgaattccgggttatatttcctgtgtggctttttttaaccaggattgctcttcttcattcagatacggagaaatcttttcgtatacaagggcatgatactgattgagcaatttgcgctctcctgcttccatctgtttcggatcgataccttccagatcaaatgggaccagagtcagtggctcaaatttcataaactggccgtaggatgttttttcggcttttttgcaaactacaagattttcgtgacggatgccgaattcattttccgcataatatcccggttcatcggaggtgatcatcccttcttccagaacaggagccggaagctcagcagggcttttccagcggaagctctgcggtccttcgtgtacattgagaagataacctacgccatggccggttccgtggttgtaatcctctcccatagcccagagaggtcctctagccagggcatccagattcaggccggtacagccgtaacggaattttgctgctgccaggttcaggtgtccacagagtactgctgtgaaatattttttttctttttcagtaaccgggccaagtacaacggtgcgggtgatatcagtagtgccctccagataatgtccgcctgtatccatcagaaccagcccttttggctccagtggaatattggtttcttctgttgcactgtaatggacaatggctccatgtgcaccgtaggcaatgatgggatcaaagctgtttccctgaaaattctcctgtacggaacggaattcatagagcttatcagcagcggaaagctcggtgatcttctgttttcccacatttttcttcagccagtggataaacttcaccattgcaacgccatctttgaggtgggcagtcttttcattctggacttcggtctcatttttgatggcttttgggagaagggtcagattttcaccgtccaggatcgttaccgtctttggaatactgctgaccagccggctgtttacattgcttctggaaagaaatacctttttctcttcgggaatcgtctgtacataggtgtaaatatcatcatatggataaatggcaataccgtctttggaaagtgcttccttaacagaatccgaaaaggctttttcattgacaaaaagacgtagctcactgtcatccagcacaagataggaaagaactaccgggcagcagtggatatcatttccgcggatatttaaaagccatgcaatgtcatcaagggaagtgaggataaagaggtctgctcccttctctttcagtttgctgcggatctcacggatcttgtctgctctggatcttccggcccatttttcggataattccattaccggttcacaggaaagtgctggacgatcatcccagatatttccgatgagatcctcatttacagaaaaatgtacctgttttttctgaaggattctttctagcgtctctgcttcttctgcgcttacggtacggccatcgaagccgagacacattccctctttcagattttcttccaggaatttgtggatcgttggtacgtccggttctcccatcttaaacagagtaaccggagttccctctaactgctgtgcagcctggataaaatatcttccgtctgtccagagtccggccatgtcctgcatgatcacggcagttccggcagaaccggtaaatccggtgatgtattttctgcatttaaaataatctccaacatactcagaaccatgaaaatcatcggtcggaaccagataagcatcgattcccttttccctcatctgttttcgaagagctgtgatccgttctgtaactgtcataatcttatgcctcctctgtataactgttctttatcgcaaagccatgatccatagggccgcttccttttcccagatctaacatggcagcaagggctccggaaatatagtccttggcacggtttacagattccaccatggaaaatccctttgcaaggttggaagcgatggctgaggaaagagtacatcctgttccgtgggtgttgggattgtcgatcctttttccctcaaaccactgatatgttccgttttcatagagaagatcattggcatcattgagcttatggccacctttgcagagaacagcacagtgatactgttcggaaacctgttttgcggcttcgatcatgtcatcggcgcttctgatctttcgtccggtgagcacttccgtttccggaatattgggagtgagaagatctgcaagaggaaacagttcttctttcagaacatccacagcctcttcactgatcagtcttgcaccgcttgtggcaaccataaccgggtccaccacgatattttttgcccgatactgtcggagctttcctgcgattatatggatcagatcactttcggaaaccattccgatctttactgcatccggaaagatatccgtaaaaatacagtccagctcctgacccaggaactctgcggttgcattctggatggctgtgacaccggtggtgttctgggcagtcagcgcggtgatggcactcatggcgtatactccgtttgccatcatggttttaatatcggcctggatcccggctcctccgctggaatcgctgcctgcgatggttaatgctgttttcatctttggtttcctccgttttctgtgaatatatagttctgtaactctgtcagatcccgacagtagatataggcatcctttttcagctgttcctgatccggttctcccaatgcgtcatagatacctgctgtcagaaaccctgcttttcctgctgtctgcagtgcatagagcgaatcttccactaccagtgttccgaatggctccgttcccagcgcttctgctgctgtaagatagatcttcggagaatatttgctttctccgatcccactggtggtatagatttttttaaaaaaagaaagaagaccgtttcgctccagtgcccggcagatatgttcttttgggcttgaagttgccaccacagccgggattttctgtctgtcaaggtattgaagaagttccctggcgcctgattttgccgggacttcctcaaaatagtagttttggatccgaactttcagatcttccatgatcttttcttcggaaaacccaagcgcgaacttgcttttcagccatgccgcgccctgctccatactcatgggaaaaaggatctcttccattcccgcaaccggctgatatcccagatctgtgatatattgttttccaagttccctccagatagaaagagagtccagaaggacaccatccgcatcaaatattacggcttttatgggaaaaatcatgttttttctcctgaaaaataatttctgttgatataaaaaacgcggatataccacaaaagatatatccgcattttattataagccgcaggttcccaaaatgcaaccgggagttatctgacagtttcttttattctttgccattaaagcaataggtacatacattgcagggatcaatgccaatagattccaaaagatcatccagccggtgataacggagggtggtaaagttctgcatcttacagatatcctgtaccatctgctcatatttcgctgtatgtggatctgcgtattcgtccagtacttcctgtggacagttcggaccttccctcttctcgatcacctgacgggcgatcagctccatctcggatttggagcgggagaagtttaagtatttgcagccgtacatgatcggcgggcaggcaggacggacatgaacttcttttgcaccgctacggtacagaaattcagttgtctcgcgaagctgggtaccacgtacaatggaatcgtcgataagaagaagttttttgtccttgatcagtgcacgtaccggaatcagtttcattttggcgatgaggttacgctggttctgattggttggcataaaagatctgggccaggttggtgtatatttaatgaatggtcttgcataaggaatgccggattcattggcgtatccgatggcatgggcgataccggaatccggaacaccggctacaatatccgggtgaacagaatctccatctctctttgcaagcatacttccgcagcggtagcgcatctcctctacatttacgccttcataagatgctgtcggatatccgtagtaaacccagaggaaagaacagatcttcattttctttccaggttctaccagagttttcactccatctgccgtaacaaaaacaatctctcccggtccaagttccttatagtcttcgtaacccagat

SEQ ID NO: 208 - DNA, 55490 bp, Unknown
  gut microbiota DNA sequence
gtgtgttctgtgtaacgttttcaggattgtccaagtctcatatgatcgcaggtttccgcatcggatggatgatcttaagtggtgcaaaaagtaaggcaaagggttatatagagggaatcaatatgctctcgtccatgcgtctctgttcaaatgttccggcacagtccattgtacagaccgcacttggcggatatcagagtgtcaatgaatatacgcagccgggcggacgtgtttatgagcagagagactttatttacaaggcactgaatgatattccgggaatttccgttgtaaaaccacatgcggcattttatatattcccgaagatcgatactgagaaatttaatattttcaatgatgaacagtttgctttggattttcttcatgagaaacaggtgcttgttgttccgggcaagggcttcaactggaatcagccggatcacttccgtattgtttatctgccggatatccgccagcttgacaaggcaatgaagaagatgaaagagttctttgctacatataagcaggtctgatcgcagatagacaagaggagatttgcgatccgcattcgctgccggcttataaccgataaactgtaaagcaggtattcggttatattttcggcatagaccggaaccgaaaaaaatgttataatatatctgaaatatcccggccagctacgccgggatatacaaataagaccagaattgcttgagaggggaatgaggagggaccgttatcgaacagcaataaaacagaaatcgaaaggggaaataactgatgagcaaattcaacatgaaagtgacacctgagattgagaaacttacccagatctgtcgtgaaaatgacaaactggatctgtctttatatggcaaatacgatgtcaagcgaggcttgcgtgacctgaatggaaagggtgtccttgcaggactgacccagatttccaatgttcaggcaacaaagatcgtggatggaaaagaggttccctgtgcaggtaagctttcttatcgtgggtatgatattaaggatctgacaaatggatttatcaatgaccggcgctttggctttgaggaagtaacctatctgcttcttttcggaaagcttccggatcaggaagagctgaatgagttttccgggattcttgcgaatcagcgtatgctgccgcggaattttgtaagggatgtcattatgaaggcgccgtccagagatattatgaacgctctgtcaagaagtgtgctgacactttattcctatgacaaagacccggataatattgaactggagaatgtgctccgtcagtgtatcaacctgatcagcgttttcccattgctatctgtttatgcatatcaggcctataaccactatgagaaaggcaagagtctttatatccatcagcctaaaaaggagctttccacagctgaaaatatcctgcgtctgttaagaccagataagaagtatacggcattggaggcagaaatccttgatattgctctgatccttcatatggagcatggcggtggtaataactctacctttactacacatgtggtttcctcttccgggacagatacgtattctgcgatcgcggcagcactgggctctttgaaaggcccgaaacacggcggtgccaacatcaaagtcgtaaaaatgtttaacgatatgcgtaaacatgtacatgactacagtgatgaagaggaaatcagtgcatatcttaagaagcttcttcataaagaggcttttgataagcgtggactgatctatggtatgggacatgcgatctattctgtttccgatccacgtgcagaagtctttaaaggctatgtagaacagcttgcaagagaaaagggcagaatgaaggattatcagctgtatgctgcagtagagcgtcttgcaccaaaggttatcgcagaggagcgtaagatttataagggtgtcagtgccaatgtggatttttacagcggatttgtttacagcatgctggatctgccgctggaactttacacaccgatgtttgctattgcacgtatcgtaggctggagcgcacatcgtatggaagagcttatcaatgtggataagatcatccgtcccgcatataagaatgtccttccggaagcagagtatattcctctttgcgagcgataggaaaggactgaggtggaatagatgttcagatgcttttttccggatgaatatctggattctgcgtatgggatcgattatgagaagctttacagagaaggatacagagggctgctctttgatatcgataatactattgttccccacggggcaccggcagatgaccgggcaaagaaactgtttgaaaagctgagggctctcgggtttcgatactgttttgtatccaataaccagaaacctcgtgtagagccctttgccaaagcagtagagggggattttatagaaaatgcccataaaccggctgggaaaaattataaaaaagcctgccaggtgatcggaaccgatcttgacaggacgatctttataggagatcagttgtttacggatatttatggagcaaagagggcggggatccggacgatccttgtgaaaccgattcatccaaaagaggagatccagatcgtgctgaagcgatatctggaaaaaatagtattacatttttaccaaaaagaggagggaaagaattcatgaaccatattgtaatcatcggctttatgggttcaggaaagacacgagttggaaagagactggcgaaggacctggggcttccgtttattgacgtggacagactgatcgtgaaaaaaatgaacatgtcagtaaaggaggtatttgaacgctttggagaagcattttaccgtgcgctggagactatggcagtcaaggaactgtccacagacagcgaacgcaaggtgatctctgtaagtgcgggattgcctcttcaggagcagaaccagaaatatctccagagtatgggaacgatcatctatctgaagggatctgctgcaacgttgatcaaacgtctggaaggaagtaacaatcccacattggaaggaactgagaataaagaagagaagatcaagaaacttctgaaacagagagatccggtttatgagaagtttgcggacattaaagttgtcacaggagtgaagccttttgatgagctgatcgcagaaattgaagaaaaattgaaggcttaaacaaaaaaacagttgaaaaatggcaaaaggtattatagaataatccatagcgaaaaagaaccgcatatattaaggaggaaatatttatgatttcagcaggtgatttcaaaaatggtatcacacttgaaattgatggaaacgtatgtcagatcgttgaattccagcatgtaaaaccaggaaaaggcgcagcctttgtaagaacaaaatacaagaacattatcacaggctctgtagtagagaaatccttccgtcctacagagaaattcccggcagcacgtattgagcgtgtagatatgcagtatctgtatcaggatggtggtttatactacttcatgaatacagagacatatgatcaggttggtcttacagaggagcaggttggcgattctctgaaatttgttaaggataatgagatggttaaggtttgctctcataacggagaggtattcgcaatcgagccacctctttttgtagagcttgaggttattgagacagagccaggattcgcaggaaatacagcacagggtgctaccaaaccggcaactgttgagacaggtgcacaggttcaggttcctctgttcgtaaaccagggcgacaaactgaagatcgatacaagaacaggtgagtatctctcacgtgtataatgcagcaaaaaacccgcgtaagcgggtttttttgtgccataaaattaaaagatcattttgacagtatttaaaataccaaagtttgaatgcatattccagactgtacaggtaagaaaaactgtacagtctggactttttttgaaatatccttgacacgaaaaatcattctggtataattaaacccagtcaaaaaactgactaagaagttcgtctgtccaccagagatgaccggaaatgatcctgtcacagaagtcttttaagggcttgtactggtttcgacgggggctttgaagttagggaagccatccgcagactcctggactgcgtaccaaccgggaactaaatataaacgcagacgaaaagttagcgttagcagcctaagctgctcgtcagccccgttgcactcacacatcgggaatctggcgtcgaccatgtgagaaaccttgccgggtaagctttgccccggtagatgtatcatgaagctactgaagcagtaagcctgtcggtgggcgtactgctgagggaatgttaaatcagcgactgtgatgggagatgccttaagggataggctttcggacaggggttcgattcccctcaggtccatttatggaacgtcccggaaagacagcatttatgcggctttccgggaattttttttactttctttattactcgtggatatcaggaaattcttcgcagatacagaaagcgatggtgatagaatgaaaaaaactctgcttaacagaaaaaagcagaataagaaatctgattattatgattataatctggtagctgttattgtactgctggtgtgctttggactggtcatgctttacagcaccagttcatatatggcagaagtgaattatggcaacgatatgttttattttaagaaacaggcactgatcagtgcagcatgtctgatcggagcgttatttatttcaaaaatactggattatcatatccttcttccttttacaactgcgttgtatgtggcttcgctgatccttatgggacttgtgcggactccgctgggacattcctctcatggtgctaccagatggctgtatatcggaccgatcaactttcagcctgccgagctggcaaagatcgcggttattatcatgatggcttacatgatcggaaaaatgggacgaaaggtgaaaactttaaagagctgtatgatcctgggacttccgggggcaggacttgcgcttgcggcttatatacttacagataatctgagtacagccatgatcattttgggaataacagttggaatggtgtttgtggcacatccggatatgcgtccgtttattgctgtggcagcggcaggagtgatccttattgtgatcggagtactttttctggttgcgacgaccaagaatagtgacagcttccgtgttatgcgagtacttgtatggcttcagcctgagaaatattccgatgaaggcggttatcagacgctgcaggcattgtatgccattggctccggagggctttttggccgcgggcttggaaatagtatccagaagcttggaagtgttccggaagcacaaaatgatatgatcttttccattatctgtgaggagcttggaattttcggagggatttttgtactgatcctcttcggatatcttttgtacaggttgttttttattgcgcagaatgcaccggatctgtttggctcactgatcgttaccgggatttttatacatattgcgctgcaggtgatcctgaacattgccgttgtactgaatctgatgcccaatacaggtgtcaccttgccctttatcagttacggaggaacatccattgtgtttctgatgctggagatggcaatagctctcagcgtggcccgtcagataaaatttcaagagtaaaatagttttaaaatcaaaatatttttgctctggagccattttttgggaaaatcctcttgacaactgtttttgcagactatatactttgctcaaaaagaggaaacagattcgatctgtaacgattaaaggagagaataagacatgttagaaaaaatgaaagaaatgcttgcagagcagttaaattgtgaggcatctacaatcacaccggagacatctttcaaggatgatcttggtgcagattctcttgacctgtttgaactggtcatggctcttgaggatgagtacaatgttgagatcccggcagaggagcttacagatctgaacacagttggagatgtgatcgattatcttaagaacaaaggcgtagaagcataagcagaaacctaggatcctctgggacgacagtgtctcagaggattttttttgtatatgcgaagatacatgagaggaatggcagggtattccgccggaaaacctatggacattttgaaggatttgggtatataatagcacctataaagagaaacaacaaaaacgaggagaaaagaaatgacaaagatcagaacaagatttgcaccgagccctacaggaagaatgcatgtgggtaatttaagaacagctctttatgcttatttgatcacaaaacatgaaggcggagattttatcctccgtattgaagatacagaccaggaacgttatgtggagggagctgtagatatcatctaccgtactcttgagaaaacaggacttctccatgatgagggaccggacaaggatggcggatttggtccgtatgtacagagtgagcgtcaggcaacaggcatgtatctgaaatatgcaaaacagcttattgagcagggagatgcatattactgcttctgcggcaaggaagaactggaaagcatgaaacgtactgttgcaggtaaggagatctctatttatgacaagagatgtctccatctttccaaggaagaggttcagcgccgtctggatgcaggtgagccgcatgttatccgctttaatatgccaacagagggaaccactacattccatgatgttatttacggagatatcaccgttaacaatgaggagatggaggatctgattctgatcaaatctgacggttatccgacctacaacttcgcaaatgtaattgatgatcaccttatgggaatcacacatgttgtaagaggtaacgaatacctttcctcttcaccgaagtataatcgtatttatgaggcattcggatgggaaatcccgacctatgttcactgtccgctgatcacagacgagacacatcagaagctttccaagagatgtggacattcttcctatgaagatctgatcgatcagggatttgtgacagaggcagtgattaactatgttgcactccttggatggagcccggcagacaaccgtgagatcttttctcttccggagcttgtggaggcatttgattatcatcatatcaacaaatcaccggcagtttttgacattgccaagctgaaatggatgaatggtgagtatatcaagaagatggatccggaggcattctatgagagagcacttccgtatctgaaagaagttctgaaaaaagactttgatcttaagaagatcgcaggaatggttcagaccagaattgaagtattcccggatattccggagcttgtagatttctttgaggcagttccggagtatgacagtgcgatgtaccgccacaaaaagatgaaaacaacagaggagacttctcttgcagttctcaaggaagtgcttccggtactggaagcacaggaggattataccaatgatccgctgtatgcatctttaagcgcttttgtaaaggagcacggatataagaatggttatgttatgtggccgcttcgtacagcagtatccggcaagcagatgacaccggccggtgcaacagagatcatggagatcattggcaaggaagagacactgaaacgtgtacatgcagcaatcgaaaagcttgaaaataaataagagtgtgatcgataatccagttatgaaacgaaatccatctcagaaaagggcgatcgcccacctgtcaggacctatgatggttctggcaggccccggttcggggaaaacttccgtcatagtagaaagaacagcacatatgatccaggaagggaagataccggcttcctctgttcttgttgtgactttttccagggcagcagcagtggaaatgaaagaacggtttctgaaatttaccggtgttcagcgaaccggcgttactttcgggacttttcacggagtgttttacgggatcctcaaacaggcttatggtctgaatggaggaaatatcctgtcagaagaagaaaaatatgcgatcttaagagaactggtggtaaactgtgctgcagaacagtcccaggaaggggattttgtggaagatattgccaaggagatcagtgttgtaaagggtggaaggatcgctctggagcattattattcttcctgttgcccggatgaagtgttccgacagatctttcagggatatcgaaaagtcctgaatgaaagaagaaaacttgattttgatgatatgctgttgagctgttatgaacttctgaaaaaacgaaaagatatcctgtctgcatggcagaaaaagtttcactatattctggtggatgagtttcaggatatcaatcatcttcagtatgatatcgtgaagatgctggcagcaccggagaacaatctgtttgtggtgggagatgatgatcagtctatctatcatttccgtggcgctcgcccggagatcatgctgaatttcccggaagattttaaaaatgcggagacggtgatcctgaatatcaattaccggtgcagtggaaatatcctggatacagctatgaaggtgatcaattacaatgaaaaccgttatgcaaaaaaactttccacaccaaatgaaccgggagagccggtgcagataaaagaatttcgaaatcccagagacgaatatatggcagttgcaggcctgctgcggaatcggatggaagaaggggataatattgaagatacagcgctgcttttcaggactaatcaggaaaccgaaggactggtcgctgcgttgatggagtatggggttcctttcactatgaaggaaaaactgcccaacctgttccgacactggatctgccgaaatatgatcgcttatttgaaaatggcagaaggagaccggagccgcagtacatttctggagatcatgaaccggccaaaccgatacatagccagagacgctctgacagaaaaaaacgttgattttaaagcattgggagagttttacaaagacaaagactggatgtgtgacaggatcacaacgatggagacacatcttcggatcttaaagactatggccccttatgcagccattaattttatccggaatggcatgggatacgaagaatacttgcaggaatatgcaaggtatcgtaaaataaaaccggaagagcttatggaaaccctgaaccggatccatgaaagtgccagaggaatgaaaacattggaagaatggatggcctatatggacgagtataccagaaagctggaagaacaggcgaagaaacaggatgtgaaacgggaaggagtggtgatatccactcttcatgcggtcaaaggtctggaatatgacaatgtatatatcatgaatgtaaatgaaggcagcatgccttatcggaaggcagtcctggaggcacatctggaggaagaacggaggcttttctacgttggtatgacacgggcaaagaagaaactctgcctgtattatgtaagacagcagtatgagaaggaacgggaaccgtcccgttttcttgaggaggccggattatgaatgggattatttattatacgaagatcagagatgaatataacagcaagaatatggagcatatgatcggggaaaaacttctggaaatcggacttgagcgggaatttggacgaaagcttgcttttgagcctcggtcaaagggggaacatgggaaaccgttttttaccctgcttccaagaattcattataatatcacacattccggaaaatatgtgatgtgtctgtttgccggagaagaggtgggcattgatgtgcagatccacaagaaggtaaattacgaacggctccttgaaagaatggtgccggcagatatgatacgggaaatcctggatgcagatgatatggagaaagccttttttgcccagtgggttttgagagaggcatatatcaaatggaccggagagggactgtccagggatctgcgtacgatttccatggataagggaaattacataatgctggagctggaaccgggatacagtggtgcaatctggtccagggatagcctggaattacgatttgaatacgaagacatcattttgaaatagcaaatagagacgatgaaatgaacaaagagatgaaacgcagcttcaggattttcattctgaagatcctggcagttgtttttgtgctgtgcatatgttattttttatatgcatttgtttaccgtgcaaaaacggagctgcccacaaaagctgtggtgacaaaccgaggtgctgcagtgtatacactgcggggacagaaacagatgctttcccagaaagaggatttttcttattttgcctttgatgggagagaaaaagagaaggaatatggaacatatgtcattcccgggctgaagaataccaggacgctgctcacaaaaaaaggtgccactcctgccatgtgtacatccatgacgcctcagggactggcggttacagaggattatgtgctggtcagcgcttactgcagcacgcagaaacataattcggtcatttatgtgatcgataaggaaaaacataattttattaaagaagtgatactgcctggacagcctcatgtgggaggacttgcctatgacccggagcataagttattatggtattcctccaatatcaacgggatcgcacaggcagtgagtataaagatggatacaatagaagcctacgattatgatgacagccatctgccggtggatactttccagatagtcagtctttatgggatcgtgagagactcttttatgaccttttataaggggtgtctgtatgtaggctgctttgaaaaatataacgaaagtgtaattgcacgatacggagttgacgaagagggaaaactgatcaataccatggacgagaaactgggcatggattttgaaatggcagttccgttggattattccaccatatcggagcaggttcagggaattgctttttataatgataagcttttgatctctcattcttttggaatcctgccatccaggctggtgttttatgaacaatccgataagcgtttgtatgtaaacgagaattctgccagaacatatcgttttccggaacgactggaacagatcgtggtggagggtgacagcctttatgtgatgtttgaatcctgtgcctatgcataccgtgcgtcctccgtaaatattgtggatcgggtcctgaagctgaatctttcgaagatggagacctatgacgaagaagaaagtcttttttttctgtcggaataaagaaaaaacgagagagcatcaaaaaagacaacaggtactaaatccggcatgtccgcaatatatttaagtgtaagaggtgaaaacatggacgcaaaccagatccagaacctgtttgccagtaatgtccgccagcttctggtggatgcagaccttgattatgataaattatatgagatacgtctccgcgtgggaagacctctgttcctcacttatgatgggggagaatgtttcctccggcaaaaagatacagaaccttatctggttacgcgggaggatcttaaggaaacactggagtatgtcagcggctattccctgtatgcttatgaagatgagattcgccaggggtttttgagtgtacagggtgggcaccgtgtaggagttaccggaaaggtgatcctggacggaaaccgtatccgtgggatgaaatatatttcctgcatcaatgtccgtctggcacatgagatccagggatgtgcagaagaagtgctgccatatatccagacaagagagcagatcatgcataccttgatcgtttctccgcccagatgtgggaagaccacgcttcttcgggatatcatccggcagatgagtaatggatggggaaatatttccggtgttacggtaggagtagtcgatgagcgcagtgagctggccggatgctatcaggggatccctcagaatgaccttggaatgcgtacggatatcctggacggctgtccgaaagcagaagggatgcagatgctgatccgttcaatgtcgccggttgtggttgctgtggatgaacttggaaaagaagaagatttcaaggctgtggaatcagttatccactgtggatgtcgtctgatcgcaactgcacatggagcttccatggaagaaacattatcccagccgtttttccggaaattgtgggaagcgcgggttttccagagatatatttttctgggaaagcatgaacgtgcaggaatcgtggaaggaatctatgatgaaaatgggaaatgcctatgtaccggattgtaggatgtattctggtagtggcggcaggagccggaatgggattttccggaagtatgagactttcggagcagattcgtatactggaaaaactgcttcagatggtgatctgcctgaaaggcgagatccgctgcgggaatgcatcactgccggatgctttttatggagcagcaggaagaatgaatggaaaatacagagagtttctcatcagtgccgcggacaggatgaaagcgggaacaggagaaaaactttcacagatatgcagggaatgtgcggaaagcgccctgaaaaaaagctgccttacccatggggaaaaggacgcttttttttctttcggagaatatctgggctatatggatctggaaatgcagatgcggcagctttccctgtatgaaaataatctggaagcagagatattgaagcggaaagcggaggtttccggaaagaaaaaactgtaccagggaattgggattcttggaggcctgctgcttgcggttctcctggtatagtattgtttatcagacagtagtaagaaggacaggctttcagaagaaaaggagggatcatttggaggtcagtatcatatttaagatcggtgcagtagggatcctggtctctgttctttctcagatcctgaaacatagcggaagggaggaacaggcttttctggtgagtttttcaggacttcttttagtactgttctggatcgtgccgtatatttatgaactttttaaaaatatccagcagctttttgtactgtaggggagggaaagaaccgtggatattctgaagatttctgttctgggagcggcaggggttcttctggggattcttctgaaagaccgtgcaccggagtatgtaagccttgttacgatgggaataggtcttgtgatactgggattagcggtagggaagatcagctatctgttccagtccctggagaggctgaaacagagtcttccgattgatggaagctatatcactactttgctgaagatgatcgggatcacctatatcggacaattttcatccggcatatgcagagatgcaggatattcctccactggtgcacagatcgaactgttctgccggttatctgtaatggtcttaagtatgccggttcttctggcactgttggataccatacagggatttcttgcatgaaaagatattggtcagagatttgtgcagccctgtttctggctgtagttataaattgttttggcggtgtgatcgtttatgcttcttcggcggaacaacagatcacagatcagatggagcttaccgacctgcagtccatggtagatgagatgcttggagaaaaaacattttctgttacagaagcgtttcacagactgctgtcaggggaagaggtgctttcggaggagagtgtgcgggaatttttgcacagtctccttttttatggtattgaaagagaaaaagagctgatcgtgaagttgttgcttctgttattgtttgctgccgttttttccgggtttgccggtgcctttgataacgggcaggtgggagagatcagtttttatgtggtgtatcttcttgtttttactcttctgatgaacagtttttccggtttgagtgcatcactgctttcaatgcttgcgtggatcacggagtttatgaaggaactttcaccggtgtattttatggcagtggcagcagcgtcaggtgcatccagtgcagctgctttttatcagggagtactgcttctggtgtggctttttcaatggatcctggaacgagtactgcttcccggagtgagtttatatattcttctgaaatttgtaaatcatctttccagggaagaaatgctgggaaaaatggctgagctgatcgagacggtgatctcctgggggcttcggacattacttggagtggcagcaggactgcaggtggtgcgtgggcttgtagctccggtaatggattctctgaagcggagtgctgtgggaaaaactgcaggtgctcttcctgggatcgggggcgcggtaaatgcagttacggaactagtccttaccacagctgttcttgtaagaaacagtctgggcattgcgcttttactggtgatcctggcggtgggggcggggccattggtccgatatggacttttgtcactgacctatcgctttctggcggctgcggcgcagcctgtatcagacaaacggctggtagaagcctttggcaccatggcagagggatgtgcacttctaatgagaatcctgtttactgcggaaattttatgtatgcttacatttctgatcctgatggcaggaggaggcttgggatgagaacagaactttatcagtggatgaaaagcctggctttttttcatgtacttactacagcacttctgcatattctgcctgataagcgttatgagcagtatatacggctgtttatggggcttctgttggtgcttttgatctgtacgcctatatttgccgtagtgggaaaaagtgaagaacttctgtccggattcagcaataattatgggagagaagaacaggtacgtatgaagacagaagcagaaggaataagggaaacatttcttaaaggagcatatgaacaggagttgaaggatcaggttcagggtatcctcaggaaagaaggggttttttcggcaaaaacagaagtagatatggagaaagagcttcagctgaccataacactttatggaacagtcacagaaaaacagagggaggcggtgaaaaatgagctcgaaagaatctgtggactcaggaaaggacagtatcagatcctggcttctgaggatgggatggaaggagtggggagttttccttcttctgggaatccttcttctggtggcaggacttccggtaacccgaaagaatagtaaaacagcagaggatcagaatgcggagaaaacccgcctggagagccgccttgaggaactgctttccaatgtggaaggagtcggagaagtggaagtgatcattatgaccggggatgagggaaatacggaaaacttttccataagcagcaaaaatgaagttaccggtgtgctggtggcggcccagggagcaggcagcgcagtgacagtccagaatattcagcaggcaattatggcattatttcagatcgacgctaataaaattagaataatgaaaatgaaatgaggagagtagaagtgaaaaagatcatgaagaaaaatcaggtaatcatcacctcgctggccattctcattgctgtggccggatatctgaatttcgcagatgtggatctgggatttaaggataaggagacgagtacagacagcagcagtatcctggacgatgtggattatgatctgaccgatgaaacagcccttctggatgagaacggggcagatggcacaacccagtcggaggtgatggataccgcatccccgggcgaggccgtacttaccggtgcttcggattttgcagcacaggcaaaagtcagcagggagcaggtgcgttcccagaacaaagcggacctgcaggcgatcatcagtaataaagacatcagcgatgaggaaaaacaggatgctattaacacaatggtttccatgacagatcttacagaaaaagaggcggctgcagagcttcttctggaggcgaagggctttgaaaatgtgatcgtaaatctgacgggtgaaactgcggatgttgtggtgccggatgcagatctggaggatgcaaaacgtgcacagatcgaggatattgtaaagaggaaaaccggtgtgacagcagagagcattgtaatcacgcctctgagtcaaagtaaaaatgcatcggatgtcataaatactgcagatgaagctgaaaaaaatacgggaggtgcagaggataatgcggaaagtacaggtgaggaggtgcaggataccgctgcatctgtggaaagcgatccggcggatcaaacatctgaggacgcagagacggctgcagatatccagaacgatcagactattgatacagagggaatttacgactgaattgccttgacagcaaagccttgtctatactagaataggaaaggttatagtaaaatagagatatcagagaatatacaggaggctcacgtgtcgaagtatacgaaagaaatagaaaaaagaagaacatttgccatcatctctcatccggatgctggtaaaacaacattaacagaaaaatttctgctgtatggaggggccattaatctggccggaagtgtaaagggtaaggctacggcccgccatgcagtatcagactggatggagatcgagaaggaaagaggtatttccgttacttcatccgttcttcagttccattatgacggatattgtataaacattctggatacacctggacatcaggatttctccgaggatacctatcgtacattgatggctgcggattcagcagttatggtcatcgatggatccaagggtgttgaggcacagacccgtaagcttttcaaggtctgtgttatgagacacattccgatctttacttttatcaataagatggacagagatgccaacgatacttttgatcttctggatgagatcgaaaaagagcttggtattgcaacctgtccgatcaactggccaatcggttccggtaagaaattccggggtgtgtttgatcgtaatacaaagaagatccttaccttctccgatacacagaagggcaccaaggaaggtgtgatagaagagattgatattaatgatccccgtgcagatgaggtcatggatcctgagcagaaagagcagctgatggaagaaatcgagcttctggatggcgcaagtgcagagttttctcaggaagaggtcagcaaaggacagctgacaccggtatttttcggttctgctcttaccaactttggtgtggaaacatttctggagcatttcctgaagatgaccacttctccgcttccgagaactgcagactgcggaccggtagatcctatgagtgatgatttttcagcctttgtatttaagatccaggcgaatatgaacaaggctcacagagaccgtatcgcatttatgaggatctgttcaggcaagtttgatgcgaccaaagaggtttatcatgtgcagggagacaagaagatgcgacttcttcagccgcagcagatgatggcagaatcccgtcatgttgtggaggaggcttatgcaggtgatatcatcggtgtctttgacccgggtattttttctattggagataccatctgcgcacctggaaagaaatttgcctttgagggaatcccgaccttcgcgccggagcatttcgcacgtgtgcgtcagatcgataccatgaagagaaaacagtttgtaaaaggtatcaaccagatcgctcaggagggtgcgatccagatattccaggagtttaacaccggtatggaagagatcattgtgggtgttgtcggtatcctgcagtttgatgtcctgaaataccgtctggagaatgagtataatgtagatatccgtctggaaacacttccatatgagcatatccgctggatcgccaacaaggagactgtaaaagtagacaagatcgtgggaacttctgatatgaagaaagtcacagaccttaagggaaatccgttgctgctctttgtcaatgcatggagtgttggcatggttgaggacagaaaccctgatctggtactgacagaattcagtaaataagcccttttatttcataactttttttgatataatagtataaaattacgaacaaaaatattatatccgtaggagggtttcccatggcagaaaaaagaacaacgtataagatacaggatttgggcggaatcggtgaagttcacattgcagatgaagttgttgcgatcgttgcaggacttgcagcaacagatgtggatggagttgcttccatggcaggaaatatcaccaatgagctggtaagtaaacttggaaagaagaatctgtccaagggcgtgagagtaaccattctggaaggagtcgttaccgtggatctgtcactgaatatcgagtatggcagaaacattcttgagacaagcaagaaggttcaggagaaggttaaatccgctattgagaatatgacaggacttgaggttgcagatgtaaatattcatattgccagcgtggatatggagaacgaaaaaggaaagtaaacctttccttttttccgtcttaggaggaaattatgagaagaagagaacagagagaacatgtatttaaacttatgtttatgacagagtttaattcagaagaagagatgacggaacagctctctctttattttgaaggtcttggagaactttcagaacaggaccaggaatatatgaagaagaagtacgcacatgtgaaagaacatctggaagagatcgatgcacagctgaacagtgcaagccgtggatggaagacaaagcgtatgagccgtgtggatcttgcggcacttcgtctggcagtatatgagatggaatatgatgcagacgtaccgacaggagtagctatcaacgaagcggtagaacttgccaaaagatttggcggagatgcttccggctcctttgtaaatggagtactgggtaagatcgcatctgagaaggatgaaaagaaaaacgaggaggagactgctgacacagaagagaaggcagcagaagccccggaagagaacgcatgagaaacgtctattctgtcggtcaggtaaaccattatgtcaaaaatatgtttacccaggattacttcctccgaaaagtctatgtaaagggagaagtatccaactgtaaataccataccagcggacatatttatttttccctgaaggatgaaacaggcacattaagctgtgtgatgtttgcgggacaccgcagaggtcttgcttttcgcatgaaggacggggataaggtagttgcaggcggaattgtagacgtatatgagagagacgggcgttatcagctttatgcaaaagaaatcacactggaaggtgctggtgccctctatgaacgatatctggcactgaaacaggaacttgaggatatggggatgtttgcacaggaatataagcagcccattcctcattttattcatacccttggcgtggtgacagcacctactggtgcagcagtacaggatatccgcaatattgcaggcagaaggaatccatatctgcaggtgatcctttatccggcacttgtgcagggagagggagcggcgcagagtatcgtaaagggaatccggatgctggataaagcaggggtggacgtgatcatcgtcggccgtggaggtggctctattgaagatctctgggcctttaacgaggagagcgttgcccgtgctatttttgagtgcaggacaccggtgatctcggcagtgggacatgagacggattttaccattgcggattttgtagcagacctgcgggcacctacaccatctgctgcagcagagctggcagtggatgattttcgcagtgttctggagagctttcatatgtacggagaccgtctgcagcgtgccatgaacagtaagacagaactttttgccgcaaaacttaaggcctatgagaacagattccagtatctgagcccggagtccatgttacgtgaaaaacgtcagtatgcatcggagctggaggaatgcctgcgttcttccatggaacaaaagcttacagagaaaagacatgaactggcaatatggatccagcggtttgagggactttctccattaagaaagctaaatggaggatatgcatttgtgtccgactcagacggacatgcggtgacagagatcagtcagataaaaaaaggtgacaggatctccattgcagtaaccgatggagtcatagaagcagttgcggatcgcatcaggaaggaagagcgataatggcagaagcaaagaaagaagagaaatccatagaagatacttttggggagcttgatctgcttgcccggaagctggaggataaagaaacacctcttgaggagtctttccgcctctacagacagggaatggagctcctaaaggatctgaacggaagactggatactgtagaaaaaaagatgcttcagatgaatgaggatgggacatttcgtgaattttaaagaagaactgaaaagaagaacagaagaagcagaacatgtgatccgggaatatcttccggaagaatccggttttgcaaaaaccatggcagaggccatgaattacagtatgacggcaggtggaaagagactccgcccgatcctgatcagggaaacctacgagctgtttggaggaaaggataagctttgtgagccttttatggcggctatggagatgatccatacacattcgttgatccatgatgatctccctgcactggataacgatgattaccgaaggggaaggctgaccacacataaagtatacggagaggccatgggcgttttaagcggtgtggcactccttaacagagcttatgaagtgatgctttccgcctttgatctgaccgaggataaagaccgtgtgatagccgccatgcggatcattgcagataagaccggcatcaacggtatgcttggtggacagagtgttgatgtggagaatgatgggaaacctctggaacacaagatgctggattatatttacaaaaacaagacctccgcattgatcgaggcttccatgatgaccggtgctgtgctggcaggggcatctgagaaagaacttgagattgtggagcaggctgcagaaaacatcgggctggcttttcagatccaggatgatatccttgatgtgaccagtacccaggaggaactgggaaaaccgatccacagtgatgaaaaaaacaacaaggttacctatgtaagccttgttggagccccggcagcagccagcagggttaaagaactttctgaccatgcggtagaacttttagacgaccttgacaggaagaacggctttctggatcttcttgtggaaagtcttgtcagccgcaggaaatagaaagaacaaaggaagggtacaaatgattctggaaaaaattaaaaagccaaatgatattcataaagtttcattggaggattttccgcgccttgccgaggaaatcaggagctttttgatccagagtgtaagtgagacaggtggtcatctggcatccaatctgggtgtggtggagctgactcttgctctgcataatgtgcttgatcttccacaggataagctgatctgggatgtgggacatcaggcttatacacataaaatccttacaggaagaaaagacggctttaaggatcttcgtaaagaaggaggtttaagcggttttccaaaaaggaatgaaagtgactgtgattcgtttgataccggacacagttccaattccatttccgcaggacttggctatgtccgtgccagagacctgatgggagagaaataccatgtggtttccgtgatcggagatggtgcgcttaccggtgggatggcttatgaagcattgaacaatgcggctgaactgaagactaattttattattatcatcaatgataataacatgtctatttccaagaacgtaggaggaatgtccacctatttaagcgctctgcgtacagctgagacttatacaggaatgaagatcggcgtgacaaaaacactcaaaaagattccccatgttggaaccgccgtggtagatacggtccgaaagaccaagagcagcatcaagcagctgatcattcccggaatgctttttgaaaatatggggctgacttatcttggaccggtagatggccataatatgcgccagatgatgaagctttttaatgaggcaaagagagtggagggaccggttgttgtccatgtccttacagaaaaaggcagaggctatggaccggcatcttcccatccggagcgttttcacggaacaggtccttttgacatccagagtggcagacctcttgcagcaaaaacagcgccgacatatacggatcatttttccggtgcaatatgttctttggcagagaagaacaaaaaagtagttgctattacagctgctatgccagatggaaccggactgaaccgattccggaagaaattcccggagcgtttttttgacgtgggtattgcggaagagcatgcagtaacctttgcagctggcatggcacttgggggaatgatcccggtttttgcggtatattcttcgttcctgcagagagggatcgatcagatccttcacgatgtatgtatgcaggatcttcatgtgatctttgccattgacagggcaggatttgtcggagcagatggtgaaacacatcatggatgctttgatttatcctatctgtccatgattcccaatatgacagttatggctcccaagaatggaaaagagcttgaggagatgttgaaatttgcagtagaagagctggatggtccctgtgcgatccgatatccgaaaggatcggcatgtaccgatatggaagaatgtcatgagccacttaagaagggcagaagtgaagtgatcactccaggcagtgagattgcagttctcggggttggcagcatggtttctgtctgtcagaaggtctgtgaagagataagagatcacaaaatagcaggagctacgtttgtcaatgtccgttttgtaaagcctctggatacagagcttcttgatcggctttcgcagaaccacagtcttttggtcactgtggaggagaatgtaaaaagcggtgggttcggagaacatgtatctgcttatatggaagcctgtcatccggaagtaagagttcttccactggcaataccggatcattttattgagcatggaacggtggaccgtcagcgaatgaaaataggtttaaatgtacagggaatcctggatgcggtagaacagagctgggaaaatcttgtgaataacagaaaataaaggacatagcctttgcagaagaatacgaagctgtgaggcattttacagcccggcacataaagagccgggctgttggaggataatatgaaaaaaagactggatatcatgatggtggaacagggacttgcaccgtcacgcgaaaaagcaaaagcgtatatcatggccggggaagtatatgtcaacggtcagaaggaagacaaggctggctccatgtttgctgagactgtcaagctggaggtaagaggaaagactcttccttatgtcagcagaggcggactgaaactggaaaaagccatgaaaaattttggcgtgacgctgaaggataaggtgtgcatggatgtaggcgcatccaccggcggtttcacagattgtatgcttcagaacggagcggtcaaagtctattccattgatgtgggatatggacagctggactggaaactcaggaatgatccaagagttgtatgcatggaaaaaacaaatatccgctatgtggtaccggaagatcttgaaggtccggcagcattttcttcgatcgatgtttcttttatctcccttacaaaagtgcttcttcctgtaagaaaccttctcacagaggacggagagatcgtatgtctcatcaaacctcagtttgaggccggcagagaaaaagtcggaaaaaaaggcgttgtccgtgatccgaaagtccatgaagaagtcattgagaaagtcagagattatgctatgagcatttttatggagccctgtcatctttccttttctcccatcaagggacctgaaggaaatattgaatatctccttcatctgaaaaaacatccggaaggaacagaagtacctgtgagtcttgacgtatccgtagaggatgtggtaaaggaagcccacggacagctggactgatgtttggaaaggactgaagcaatatggacagattttatataattccaaacagtgccaaggatccggaactgacattttctaataggatcattgcctatctggagaagcatggtgccaggtgtcatgtgcagaagatcaccgaaaaaatggaaggaccgtatcattatacggacccggatgggattccgcaggatacacagtgcattattgtactgggtggagatggaacacttctgcaggctgcaagggatgtggtgcatctggatatccctcttcttggaatcaatctgggaactctgggatttcttgccgaggtggataaaaattccgtgtatccggctctggatcggcttctgtcagatgactatgagctggaagatcgtatgatgctggaaggaaagatctatcggggagaagaacttattggaaaagatatcgcattaaatgacattgtgatcggaagagaaggacatctccgtgtgatccgtttcaagaattatgttaatgatgcatatatgaattcatacaatgcagatggtatcatcatttccactccgaccggttctaccggatatagtctgtcagcgggaggtcctgtggtttctcccagtgccagtatgatgatcatgacccccatcgctccccatactatgaacacccgaagtatcattctttccggggaagaggcagttacagtagagatcggtgagggaagacataataccattgagaaagcggtggcctctttcgacggggatacccagatatccatggtcaccggtgaccggatcgtgatccggaaagccacagtcaggacaaaaatcctcaagctgaaccatctgagctttgtggaggttctgagacagaaaatgagtaacagctgatgcaggaggttcaattttgaaagtagcaagacatgaaaaaattatcgaactgatccgtcagtacgagatcgatacacaggaagaacttgcggcaagactgaatgaggccggttttaaggttacgcaggctaccgtatccagagatatccgtgctctgaaaatgacaaaggttgcaggcagcaacggaaagtccagatatgcgatcctggaagaacatacaccggatgtgttaagtgataaatattccagagttttgaaagatgcagtgatcgctatgaacatcggacagaatatcgtagtggtaaaaacaattccgggaatggccatggcggcagcagcagctcttgatgctatgaaatggccggaaatcctgggatgtattgccggagatgataccattatgtgtgtggtgaaaacctctgaacaggcaccgggtgtagttcagaagcttggcgggatcttatccagaggaaaataaaatgacagaatatgtaaatgctttataccagaaaggaaatcaatgttagtacatctgcatgtaaaaaatcttgcactgatagaggaatcagaggtggaattcggaccaggcttaaatatcttaactggtgagaccggagccggaaaatccattctgttaggatccatacagcttatcctgggtggaaaaacttccagaagcatgattcgtgaaaatgcttcctatgccctggtagagttgctgtttcaggttgaaaacacgaaagccagagagtcccttgcggcgcttgacatctatccggaagacggacaggtgctgatgtcccgcaagatcatggacggcagaagtatcaacaagatcaacggagagacaagtactgtcagccagatgaaagcagcagcagcctgtcttctggacattcacggacagcatgagcatcagtcacttctttatggagaccgccagctggctattttggatgtatatggaaaggaacagatccttcctgccagggagaaggtccggaaagcttatcaggagtatcgggactgtgtggatcagctgaaagcactggatatggatgaggaacagcgcaaccgtgaaaaagcctttctggaatttgagatcaatgagatcgaggaggcagctcttattccgggagaggacgaaacactggaggatcgctaccggaagctgagcaatgccagaagaatcatggaaacagcacaaatggtccgtgggatgaccggatatgaacagggcgccgcagatatgaccggaaatgccctgaaagagttttcaagaattgcagattacgataaggatcttgcacctttacaggaagctcttgtggaaatcgattcacttctcagtgacttctgccgtgatctgtcttcttatatggatagtttgacttttgacgaagaaacttttttcgaaacagaaaaaagactggatctgatcaatagtctgaaggcaaagtatggacagacgatccatgaaattttgtcttatcagaaggaacagcaggaaaaattagaaaaacttcaaagattcgaagaaaatttccggttactgaaagaaaaacttatgcaggcagaaaagattcttgaggaagcttcgcatgaactttcagagatccggaaaaaatacagtaagcagctggatgaaaagattatcgaaggattgaaggaactgaattttgaggatgtggatttttctatccgttttgaccgcagaaaaaattatacagataatggttatgatgcggtggaatatgagatttccacaaatccaggtgagagtagaaaaccgctgggacagattgtatccggtggtgagctttccaggattatgcttgccatcaaagcgatccttgcagataaagatcagatcgatacactgatctttgatgagatcgatacagggatcagtgggcgtactgcacagaaggtctctgaaaaaatggcagtgatcggacagcacaggcaggtgctttgtatcacacatcttccacagatcgcagcaatggcagatacccattttgagattgagaaacatgtagaaggaacagaaaccatcacccagatccatcctctggaaggagaggaatctgttcgtgagcttgccagacttctgggcggtgcccagatcacgccggctgttcttggaaatgcaagagagatgaaggaattggcacagcaacaaaaaaatacaagactgaaataatttatacgttacatactaagagaggacggccgaaaggtcggtcctcttttttaaccgaatcaagtcagtttcctgcttcagttgcgaaaagcaataagcagtgagtggggatttgcttgtatcagaaaattacaaaggatgtgacgtaagatgaacagaaaaagaaaataccgatgttggctccttgtatttcttgcgctggatctgattctgatgggatggctgggctaccggcttttggacagaaagatcccggatcagatcctggtggatcatgaggacagccgggaagtagccaatcttcttaaacgcccttttatcagctttgatgatgcgatcaccgtttcaggaaaagacagctataagttgcactgcagactcttgggagtgatccattttaaggatgtgaaggtaaaaaatataactgcaaaagaagtatatgcaagcggagatgcagtaggtatttatatgcagacgaaaggagttctgatcattgatacaggcgagatcctttcggaaagtggtgagatggaagaaccggcccgggacattgtaaagccgggagattatattgtggcttttgatcagaaccggatccagtgcaagcaggatcttctggaggatcttgcagatctttgcggagaatctgtaacactgaaggttcgccggggaaaagagacgattcccctgtccctgacgccggtgaaagatgagaaaggaaactataagcttggcatctgggtgagggacgatacacagggaatcggaaccctgacttatgtggacgaaaatggagggttcggtgctcttggtcacgggatcagcgatgtggataccggcgaacttttaagtatcgcagatggaaatctttacaacgcccagatcctggggatccggaaaggagaaaaaggaaatcccggagaactatctggtctgatccgatacgaagccgacaatatcctgggtgagatttccgaaaacagtaaaaacggcatttttggaactgtggatgctgatcaggtgaaaaatctggatctgaagaagattcctgtaggttacaaacaggatctgaaaattggacccgcatctgttctctgctgcacagacggcgaagtaaaagaatatgccgcagagatcaccaggatcgatatgaaccatgaggattctaataagagcttcgtgatccagatcacagataaagaactcctggaaaaaacaggtgggatcgttcagggaatgtctggaagtcctgtgcttcagaacggaaaactctttggtgctgtgactcatgtatttgtgcaggattctaccggcggatatgggatttttattgaaaatatgacaggcaatgcataatctgcagttgaggaaagaggcacaaaaacatggaaaaagtccgggaaaagtgcctcttttttatatggggaaaaatgccggatacagattgaaatacctgcattttggtgaattttgtgatatataagagaaaaaatgtcgaaaaatatcgtacgaaagtgtgataaaataactacttttatcttgattttactacaggatttccactataataattttgtcgccagcaaggggaaagcgcaggcagctaacagtgtcggttactgccgtggtgacagggggtatgtctggaaacccaaggagatagaagttaggagggtcctcatggacaaattaaatgttgcaatcgctgatgataacgcgaaaatgacagacatgctcggtcagatgatcgaagaagataaagaccttgaactggtcggaaaagcacacaacggagaagaaatctgtaatataatcaaagataaggagccggatgtggtgattctcgacatcattatgccgaagatggacggcctttccgttatggagaaattttcccataacgcaaatgtcaaaaaagttccagtgtttatcgtattatctgcaattggacaggagaggattacagaggatgcattcagtcttggagcagactattatgttttgaagccttttgacaacaccacacttttaaaccggatcaaacatattcggaagattggggacagaagagtgcgggagattgcaaggccaggtatcacagaaaccaaaaagcctcagccggagaggaatctggaaaccgatgtgacgaatatcattcatgagatcggagttccggcacacatcaaggggtatcagtatttaagggatgcgatcattttgtctgtcaatgacatggaaatgctcaattccattaccaaggtattatatccaaccattgcgaaacgccatcagacaacaccgagcagagtggagcgggcgatccgacatgcgatcgaggtggcatggagccggggaaagatggataccattgatgaattgtttggatatactgtaagcaccggaaaagggaaacccacgaattctgaatttatagcactgatcgcagataaaatcagactagaatataaaaatcggtctttaaattagatgaattttggagtataatcataaataaaaacgggtgtacccagggaggggaatacagatgaaaaaaattctgtttgctacatcagaagcagtaccttttatcaaaacaggaggactcgctgatgttgccggctcactgcctaagtgctttgacaaaaaatattttgatatacgcgtgatcttaccgaaatatgcctgtatgaaacaggaatggaaagacaaaatggagtatgtgacccatttttatatggatctgggatttaagaactgctatgtaggcattatgcagatgcagtatgacgggatccagttttacttcattgacaatgaatattatttcagcggtccgaaaccatatgacagtgcaccatgggatcttgagaaatttgctttcttttccaaagctgtgttatcggttcttccggtgatcggattcagaccggatatcatccactgtcatgactggcagacaggacttgttccggtttaccttcacgattctttccaggagaatgaattcttccgtggaatcaagactgttatgacaatacataacctgaaatttcagggtgtatgggatgttaagactgttaaggatatcacaggcctttccgattactactttgcgccggataaactggaagcatacaaggacgcaaacttcctgaagggcggtatggtatttgcagatgccattaccacagtaagtaatacctatgcagaagagatcaagacaccgttttatggtgagaagctggacggacttctcaatgcgagagccaacagcctgcgtggtattgtaaatggtattgattacaatgaattcaatccggagacagatccgaatatcaccaagaactacaatgcaaagaacttccgcaaggagaagatcaagaacaagatccagcttcagaaagatcttggacttgagcaggatccgaaagctatgatgatcggtattgtatcccgcctgacagatcagaagggatttgatctgatcgcttatatcatggacgaactgtgtcaggatgcggttcagatcgttgctcttggtaccggtgaggaacgttatgagaatatgttccgtcattttgactggaagtatcatggcaaggtatctgcacagatctactatgatgaggcaatgtctcacagaatttatgcagcatctgacgcatttctgatgccgtcactatttgagccatgtggcttaagccagctgatgagccttcgctatggaactcttccgatcgtcagagagaccggtggtctgaaggatacagttgtcccgtacaatgaattcgagggaaccggaacaggattctccttcgtaaattacaatgcacatgaaatgcttgctacgatccgttatgcagagagtgtatattatgacaagaaacgtgaatggaataaaatggtagatcgcgcgatggctgcagatttttcctggaacaattccgcacgtcagtatgaggaaatgtacaattggttaattggtgagtaaggattcaccgaagcagttctcgcaataaaaaggcgcagacgacagataatatgtcgtttgcgcttttttattgcgggaatatacatggatgttattgtatgtctgcaaaaaaaatatgaagatgtttgtttatcaaacaggaattgtgctaaaatgagaaaaaatataaatgttaatgataaataacttttgaattggtattatttatatgaaacttatcagattaatcagttattgtcaaataacttaaattgtgttacatttatattagtacatcgtttttgaaataactataccattcacttgtctgtgaatccgattgatatagttatttacgaaacgatgtaacagtggataatacagatatatgtattgaccatgtaaattgtacttaagatgaggtgacaatatgacactggacaaattaaagactggagaatgtggcagaatcatcagtgttcgtggcgagggggagctgagacatcatcttctggatatggggcttacaccggggacagaagtgtctcttcgtaaaacagctcctatgggagatccggtacagcttgtgctgcgcggatatgagctgacattgcggctggcggaagctgcaaagattgagatcgtatcgatcgaatccatgacggaaacgaagaaagaaaatgaacggcatcagccgattgctcatcctggtgtgggagaacttggaaaggctcgagattatcgcaagaaccggatcggtgatacgattcccaaaggggaaccgatcacgtttgcactggcaggtaatcagaactgtggaaagacaactctttttaatcagctgacaggctccaatcagcatgttggtaactttccgggtgtaactgttgacaagaaagaaggaagcatccggaggcatccggaggcaacggtaacggatcttcctggaatctattcactttccccgtattccagcgaggagatcgtaacaagagattttctgctgaatgagaagccgacaggaatcattaatattgtagatgcttccaatattgagagaaatctttatcttaccatgcagctgatggagcttggaatcccaatggtgctggccttaaatatgatggatgaggtaagggcaaatggaggctctgttcggatcaatgaactggaggagattttaggaattccggttgtacctatttcagcagcgaagaatgaaggaattgatgagctgatcgatcatgcagtccatgttgcaagatacagagaagcaccaggaagaattgatttctgtactgacaatcagtcaccgaaggatccggtaggcgcacttcacagatgtatccatgcagccgttcatctgatcgaaccctatgcaaaaaaagcaggacttcctgtacgttttgcagctacgaagatcgtagagaaagattctctgatcgaaaaacgtctggctttgcctgaaggtgaaaaaaaggttcttgatgggctggtacatgttatggagaaggatggcggtctggaccgtgaggcagctcttgcgaacatgcgcttcaattttattgaaaagctctgtgagaaaactgtggtaaaaccggcagaaagccgtgaacataaacgaagtgtcgccatagatcgtatccttaccggaaaatatacagcaattccctgttttgtgggaattatggcaattgtatttgtgatgacgtttaattatctgggagcctggctttcagacggaatgactacggtcgtgaactgggtaattgcacttattggcaggggactggaggtggcaggtgtcagctcagtactgcagtcactggttgtggatggaattttaagcggtatcggaagcgtgatcggatttcttcctacgatcgttactttgtttttcttcctgtcaatcctggaagataccggatatatggctcgtgtagcctttgttatggacaagctccttcgaaagatcggactttccggaagaagctttgtgccgatgctgatcggattcggctgttcggtgccggccattatggcaaccagaacattatccagtgaacgtgaccggaaaatgacgatcctgattactccgtttatgagctgcagtgccaagcttccgatctacggacttctcaccagtgcatttttcccgaagcagtggagaggagttgtgatgatcagcctttattttgcaggaattctctgcgggatcctgtatgcgctgatcctgaaaaagacgaaatataagggagagccggttccgtttgtcatggagcttcccaattaccggcttccttctgcaaaaagtgtaggacagctgatctgggaaaaggcgaaggactttatccagaaagcgtttacaattatttttgcggcaacgctgatcgtgtggttcctgcagaactttgatgcaggtcttaaccttgttaccagcacagatcagagccttctggcaaagatcggaagcatcgtggcaccactttttgctccgctgggctttggtgactggagagtatctaccgcattgatcacgggctttatggcaaaagagagcgttgtgtctacgctgacagtccttctgggcggaaatacggcgttgcttcagactttatttacaccgtttactgcttacgtatttttaatctttaccttgctctatacaccctgtgttgcagctattgcaactgtgcgtcgggagatgggaactgtaagagctgccgctggtattgtattagtacagtgtgccactgcatggatcgttgcgtttgcggtacatggtgtgggaatgatgcttggattatagaaaaaataccttacatatggcttttcacaaactgcagaaaacattctgcagaggttgtgagagccatattttttttatgggcaattccaacagataacttttccagtccattaaccgggacagcaacaagcgaaggctgacgaaagaactgaaagctgctttctgtaagaagactgatcccttcgccaatttccactgcgctgacaatagattctgcacgggcagtacgcagaagctgagggtggatccttgcattatgaaaactttgcatacagaaacggtaaatggaggtgtgcggaggcatcaggataaaagtctcttttttcaggtcagaaagagagactgatattttggacgcagaaggatgagcttcaggaaaaacagcaaccagacggtctgctgtgagagcatgaaaagtatagagctccgggtctatcatgtgttttcgtacaaagatcagattaaaaaagtctttttcaagaccggaaagaagttcttcgtcttctacctccttcagagaaaaagaaagctccgggtgtgtatcacaaaaactgtgtatcacagaagtaagatggtactgagaaagaaaaggaagtgttccaatatgaagtgcctggaacttactgtccttaaaatggtacactgcttccagagaacgatgatactgtctggaaatcttaagtgcttctttgtaaaaaaactctccttcaggagtaagcacagcagtacgcttgctgcggtcccataaggtaagctccagttctttttccagtttcatgatctgcttggaaagggaggactgggagatatgcatagcttctgcagcatcaaaaaaagtccgggattgagctgcacagataaaatagtcgatctgttcaagagtcatggtaacacctgccttttagaaaatagtgacgaatcattccatattggaaacaattatatcatagaaagaattgattcaccatgtaaaaaagagataaaataacataagaaaataaagatgttactgagaacggagtgaacagtaatataaagataacgcaggaggttttttatggcagaaaaagtaagagatctgagaagtgctctggcacttctggagcagatgccagatcagctgatcgaaacagaggtggaagttgatccgatggcagagcttgcaggggtatatcgttatgtaggagccggtggaacggtgaagcgtcccacaaaggaaggacctgccatgatctttaatcgtataaaaggacatccggatgcaagggtagctatcggtcttctggcaagcagaaaaagagttgctgctttacttgacactcagccggaaaatcttggaaagatgctctgcaaaagcgtggagaatccaattccaccggtcgatcttgaaggcgatgcaccgtgtcagcaggtggtgcataaggcagcagatccggattttgacctctataagctggttcctgcgccaacgaacacaccggatgatgcgggcccgtatatcacacttggcatgtgctacgccacacacccggatactggagttcacgatgtgaccattcatcgtctttgcattcagggaaaagatgagctttccattttctttacacctggtgccagacatatcggagcaatggcagagcgtgctgaggagctgggacaaaggctgccgatttctatcagtatcggagttgatcctgctattgagatcggttcctgttttgagccgcctacaacaccactggggtatgatgagctgtctgtagccggtgcactgcgcaaagagccggtgaaactctgtaaatgtttaaccgttaacgagcgtgccatcgccaatgcggaatacgtgatcgagggagaagtgatcccgggtgtgcgtgtaaaggaagatcagaacagcaataccggatacgccatgccggagtttccgggatatacagggcctgcaagtgatcagtgctggctgatcaaggttacagcagtgacacatcgtgaaaatccgatcatgcagacctgtatcgggccaagtgaggagcacgtatccatggcgggaatccctacagaggccagcatctatggcatggtggaaaaagcaatgcctggaagacttcagaacgtatactgcagcagtgccggaggtggaaagtatatggctgtccttcagtttaaaaagctttctcaaagtgatgagggaagacagcgtcaggctgcacttcttgcattttccgccttcagtgagctgaaaaatgtatttctggtagatgaagatgtggattgctttgatatgaatgacgtactttgggcgatgaatacgagattccagggggatgtggatgtgatcaccattccgggtgtccgttgtcatcctcttgatccgtccaatgatcctgcattttctccaagtatccgtgatcatggaattgcatgcaagactatttttgactgtacggtgccttatgatctgaaggaagattttcacagagcccgttttatggaactggatccggagaaatggctgaaaaaatgaaaaagagaattatagttggtgcgacaggtgcaagcggcctgccgctccttgtaaaatgtctggagatcatccgggagaatccggattttgagtcttatctgatcatgagttccagtgcagagctgactcttcgccaggagacggagctggaaccggaggatgtgaaacgattggcagatcatgtatgtgcaccgggagaaattggggcaaaaccggccagtggttctttcaaaacagaggggatgctgatcgtgccctgcagcatgaagacgatcgcggggatccacagtggctatgcagataatctcattctgcgtgcggcagatgtgacggtcaaggaacagagaatactggtgctggcagccagagaaacaccgttaagcgggattcatctccgaaatctttatgagctttccatgcttccgggagtgcggatcattccgccgatgctgacgttttatcataaaccggagagcattgatgatatggtgtatcatattgcggcaaagcttttggaaccgtttgggatcgaagcaaaggagtatcgcagatggaatggattataaaagagtgtgtggagactgcaggctgtgagctggaggtcagtgctgcatttatcggagaggatgtgcttatctgtctgaaaggcggagagagacctcatctgggatgtgtggtgcagacggaatcgagagtgtctctgacaggggatggttctgtgagtgcgacttcttcagttttgaattttccgggacataaggacgaggtgatctgccggtggatggcggagaaggtttcgaaagagctgggaaagagagtggtttgcaccgggggatttcataaggatggtatttcggagaaggagatccgggaggtacaggaaagtgttgtgcgtctgacagagaaggtgatagaaggattgcagcggtagttgagtaacgaacggctggaatctgccaaagttattttccaaaagtccgagactttcttcgctcaaacagcgaatttttgaaaaataacgcagattccagccgtctaaaatgtttctgtattctatttattttcaaatatattctcgcgggtaatattcttagcccacttcccactgagataccttttgatcacccatggccacttcacaaattcatccgtacagagcagaaaatacacccacataaccggcagcttcagtacaaaagcagcgaagaatccaaggggtactgcatatacccacatatcaatggtatcacagatcagaccaaactttgtatcaccacctgcccggaacacaccagcgatcagggttgtatttacggcagaccccataatatagtagctgttgatcagaagcatatatttcagataatgcatggcagtgggtgtcagggacgcaaatctcattacgaacggtgtgatggcaagaacgataagtccgcccaaaaaacctgcaataacagtaagcttcagtgttttggaagcataacgcctggaacgttccagatcaccctgccccataacattgcctagaaggatacctcctgcactggcaataccgaaacagaaaacagagccgatattacggactactacaaccagagaattggcagcaaccgcatccgtaccaaggtgccccaggatcacagagtacatggaaaaaccaatgctccaggaaatatcattaccaagagccggcagggaaagccgcacgaaatcactgaacagaagtttgttttttatgaacatacatcgaagatccagtcggacatttttgctgaaagcagaaacaataaaacaggcgatcagctcgatcattctggaaagtgcagtagcaatagccacaccggtagcaccaagcttgggtgctccgaacaatccgaagataaaagtcgcattcaaaaggatattcagtccaaatgccagcatattcatcgccatgctggtagttacccggccaatgcttcgaagaacagccagataaacctccgtcataccccagcagatataggtgatacccataatgcggatataggaagaaccaatggccagaagcttcggatcattggtgaacagtttcatcatcatctgcggcatggtaaatgcaacgagcgccacgagaatagagatgatcatggaaaaacgaagagcgattccctcgatgatctgaatggctttgtaatctccctttccataatactgggcacaaagcagggtggctcccgtaccaagaccgtaataaaccataaacaggacattggaataattcgctgccagggatactgcggagatggatgactgacctacaaagttcagcatgataacatcggcggaattgaccgctgcacttagcagattctgaatgatgatggggatgacaagcttaacgatctgtggataaaaatcatcccgctgtgaaagttgatttctcatttcctcctccaaaaaaaaatacaattacaatgatgtgaaaaacagtaaatcacatacatggtaactgtgtcagcttttgtaaaaatgaaagcagacatgattgcacgataacatagtttacaggcagtgtcaatcggcaaactgcaaaattgtttaaacaacttacgaaaaaatgacgaatacaaaaaatgcataaaaaattatatcagcagttgttgagatttccaatccatgataaactgaatggagatatttttcagagaaagaggagtaaaaaatatgccagtttttgatttcagcgcagcgccggcagataaaaaagagacaaaaagccagtgcacatatacaacatttcgttctaatgaaacaaaagccacaccggagaaaccggtgctgatcctggataacagcaaaagagagtggaaacatcattcctgcggatatttttccaatcctgcgaagcagactgcatttgagtttaaggaagaggacggtgtttttccggcagacatcctgaagatcgattcccgttttacaagcctgatcaaatggctcggagaaaatcatatcaacatccgtctttccggacagaatacagaagaaggatatgctgtttacaaaatccgcgagatcgcttttggcggaggcaccaagctttctgctgaggacggatttcttcagtttatgatcgagcgtctgtttgcaagcagtgcgccggcagaagaaaatgagaacgatgaggaggaagaagacggtgacgatatgaagcttaccagtattcagagtatcaccgactttatgaactgtgccggaaagactatgccggataatatccgtctctgggcaagaagaaatctggcagttgctcgttctcatgaggtttctcaggaggaaagacgccatgcccagagagcactttccatcatgatgaatattcagtggaagcataattattttgagtctattgatccgaaggaagcacgccgtatcctggatgaggagctttatggaatggagcgtgtaaaacagaggatcattgagacgatcattcagatcaaccgtacgcatacacttcctgcttacggactgcttcttgtaggaccggcaggtaccggtaaatctcagatcgcttatgcagttgcaagaatcctgaaaatgccgtggacaaccctggatatgagttcgatcaatgatccggaacagcttacaggaagctctcgtgtttatgcaaatgccaagcctggaatcatcatggaggctttttccatggcaggagaatccaatctggtatttatcatcaatgagcttgacaaggctgcatcaggtaaaggaaacggaaatccggcagacgtgcttctgacactgctggataaccttggttttacagataactatatggaatgtatggttccgacagttggtgtctatcctattgccacagccaatgataaggcacagatcagcgcacctctgatgtcacgttttgcagtgatcgatattccggattacacaccggaggaaaagaagatcatcttttccagatttgcgcttcccaaggttctgaaacgtatgagcctgaaacaggaagaatgtatcgtaacggatgaggcgctggacgcagtaattaagaaatttgaagataccacaggaatccgtgatctggagcaggctgcggagcatattgcggccaatgctctgtatcagatcgaggtggatcatgtgaaggctgtaacctttacccccgagatggtacaggagcttttggactgacaaagggatctgttttgcaatgataaaaatgcttccggagattttttcggaagcatttttggctgagggaatgcacctgtttatgccgggcctgtctgatcgtaaaggaaaattataaaaataatgaaatcagggattgcctgagaaagtgtaaatgtgtataatgggataaaagagcgtgcacgtgaacacaaagcacacaggagaggttttggagggtaaaatatggcagtaacattacaacagattgcggaagcagcaggagtttcaagaggcactgtggacagggcactgaacaacagaggccgtatccgcccggaagtagaggaaaggatcaaaaggatcgcccgggagatgggatatcagcccagccgtgccggtcgtgcccttgccatggcaaagaggaaaatccgtatcggtgtgatccttcagtatatggagactccttttatgcagcaggttttaaagggagtcctggaagcaaaagaagaagtggagagctttggcggaacagtaaagatctatgagatcgaaggcgtggaaccggaaaaagtaatggctgcaatggaagaactccgggaaaaggggtttaatggaatcgcgttgactccatcagaggatcagcttttgagagcgaggatcgatcagtatcaggaagagtatggaattccgatagttacctttaatgcggatctggaagatacaaaaaggttatgctttgtgggacaggatacctttcaggccggtcgtactgcagcaggcctgatgtgggagatgacaggcggaaacgggcaggttgccataatttccggacaggttgccaatcctggtctgatcagcaggcagaaaggatttacgacagagattaaagaaagctttccgggaatcgagatcgtggatataaggtattcttatgatgacgaatgggtggcatccaagatcgtggaagaatttctggagctttatccggagctgaccgggatctatattacgggtcatggtgtaaagggtgtctgccagaccttgcagaagcttggaaaggataaaaccatgcatgtgatcgccaatgatttcctggaagaaaatctgaaatggctgaaagaggggacgatcaatttccttattggtcaggatgcggctgtacagggacattccccggtgattattttgttccagcttctctttgacagcaaggcaccggaaaaggaataccagtatacagatattgtgatccggacgaaatataatatgggttaaaaagtcagtataaacattaaaattgctgttgtgcacggagtctatagtcatattatataccagggttctgtacagaaaaaaagcagattcaggaggaaaaatgaattataaaaatgtaaagatcgcagaaggtgccaggatcgcaaagcaatctgtgatccttggaaatgtaacgatcggccgtgacagctgtgtattatattatgcggtgatccgcggagatgatgcgccggtagtgatcggagaagaaacaaatatccaggaaaactgtaccattcatgtgagccacaacatgccggtccatatcggaaacaacgttactgtgggacataatgcggtgattcatggatgtaccatcggagaccggacattgatcggaatgggagccgtgatcctagatggtgcaaagatcggaaacgaatgtatcataggagccggaagccttgtgactaaaaatacggtgatcccggatggctccctggtaatgggaagtccggccaggatcaaacgaaaccttacctgggaagagaagcttggtatcgtggaaaacagcaaagaatatcttgctgtgtccgaagagatgaaagcgcaggatgtattataaaaaagtgaagaagacatttgtaaacggacagctccgactgctttgtaatatgagaagcagtcggagctgtaactttgttatataaaatgcttatatttatcgtttttttatttatcgatcacttccaccggtgtgtcatcccgtgcatccagatcgttgatatattttttggtctcttttacgatcacattggaaagcagtagtactgcgatcaggtttggaatagccatcagtgcattcaggatatccgctacggtccataccaggttcagagaaataacaggggagatggcagctaccgcaatgtacagcacacgatagggaatgagtccctttttgccggaaaaatattccacgcatcgctcgccataatatgcccatccaaggactgtagaatatgcgaaggaaatgatacccactacaaggatcacaggaccaagaaccgggatctgctgaaaagctagtgtagtaagaacaccgccatcagtgatatttcccatgtcgatcgaaggatttttcataatactggttaccagaacaagaccggtcatcagacataccacaacggtatcccagaatgtaccggtgctggaaacgagagcctgacgaaccggatttcttgtctgtgcggcagcagcggcgatgggggcagaacccataccggattcattggaaaaaagtcctcttgcgattccatactgcatggccatcatgataccacgtcctacaagacctcctgcagcagcaccaggggtaaaagcaaatttgcagatggtttttactgcgggaatgataaaatcgaaattgatccccaggatgatgatacatccgatcacatagaaaaatgccataaacggaacaagacgttcacatacattggcgatggatttgatcccgccgaaaataacaagggcagtaagaactgccacagcaatgccgatcgctgccggcgaaatatgaaggttctcattacataccgttgcaatggcattgacctgggtagcacatccgattccaaaggaagcaaagccaccgaaaaaggcaaagatcagaccaagccagcgcatatttaatccgcgctccagggcatacatagcaccaccctgcatacggccgtctttggttttgacgcggtattttacagcgatgagagactcactgtatttggtggcgattccgaagacaccggtaagccagcaccagaggactgcaccgggaccgccaagagcaatggcagtaccgaccccgatgatatttccggttccaatagtggaagcaagggctgttgtcagggcgccaaactggctgacttcaccttccgcattggtatctttggtgacagacaggcgaatggcggtaccgatcttacgctggatcacaccagtacggatggtcatgaaaatatgggtgcccagaagtaaaatgatcatccaccagccccacaccagactgtcgatctggtttatcacacttccgattgcatttatcatagaaatctcctccctttctcaaagcgaaatatcgcaggactgcagaaatagcacaagggcgtacagacacaggaaatatgtgctgtacgcccttgtacgttacgctcttaagttttgattattgtgttaagtatacaggaatattcagaataatgcaacaaaaatatttcatctgaacaggaggttttttacttcaatatatgttgatcaaaattctacaggaccttcctcgcagtacatataaaatcccgggcgtactgtgggagataggtgcctcttcggtatgcaattgtcagtgtgctgaagacgccatcttcaccaatggaaaaacaggctggttttacagggaggtccatattttggacataggtttccggggtgaaacacataccaagtccttgcatgcagagtttgacacaggtttctgtgttgcggctctgaattggcacataaggcttgatatgggcagctttcaatgcttccagcgaaagctgtccggtagtctgttccggaaaatgcaggataaaaggctcttctgccagaagtgagagatcaagcttcgggtatatgccgtgagtggatacactgccggcagcagccaatgggtgctccggaggcatgatcagaaggatttcttcttttttcagcagttcgtattccagcttggggtgtttatgtacttcattgaaaatgccaaaatcaagctgatcattgagcagaagtttttcctggatagaatatgcctcttccaggatattgacctttactttaggatatttttgaaaaaaagaggtcatgatctgaggaaccatacaggtactcctcatcagtgggaaagcaacgttcagttctccttcattattttctgtaagatctttcagctctttttcccagtcctgttgtatctgcaggatctttcgggtatactccatatatttgcggcccgcaaaggtaggtgtatagctgtttccgctgcggctgaacagcttggtccccatttctcgttccagtttctggagatgcttggtcagggttggctgggaaatataaagctcctgtgcggcttttgtaagattctgatatttggcaatgcagagaatgtacttcagttcatgatagttcatgttttcctccaactattccattttggcataatttttatgtataatatgaatttgacttcctgatatgcatattttacaatacatcctatcatcatatcaagggggaaaaaataaatgaaaaactggctggaaaaacagttcagactgtctgagttcaatacaaatataaaaacagaacttctggcaggactgacaacttttgtaactatggcgtatgtgcttgctacgatcccaaatattctggcaggcgccggttatgataaacacacgactctgacagctatgatcattctgatcattgtgaccagctgtgcaatggcattggttaccaatcgaccgtttgctctggctccgggacttggaagcgttggaattattgcatctatgattaccaatgaaggcgtaagtatgccgatcgcagcaggtgtgatattctggagtggtgttctttttatcataatttcattctttggtctgagagaagccgtggtacgtgtgatcccggtaagcctgaaacaagcggttagtgccggtattggtctgtttatcgcacttcttggtgcaaaaaactgtggcctgatcgtggcaaatgatgcaaaaaactgtctttcctttggagatcttgcatctccatctgtgatcgtagcagtgatcggatttctgatccttctggtgatcaaggtacgaaatataccgggtggtatgattcttgcgatcctgctgaccactctggcaggaattcctttcggtgttacacatgctccggaatccatttttgcatttccggcaggtatcggccatcagttcctgaaagttgattttatgggagcgctgaattttgcttatattccatttctgatcgctctgtttgtaccggatttcttttctacattcggaacagttctgggagtgggagcaaaggcaggctatctggataaggatggaaatcttccgggtattgataaatgctttaaggtagatgcgattgcaacaagctttggagcattgtttggaatgccgagtcttactacttatctggagtcatctgcaggcgtagaggcaggaggaaaaacgggacttacggttatttttacaagcattttcttcggactttcgctgtttctggcaccactggctcttgtgatcccatctgcggcaaccggtccggtgctgatctatatcggcatcaatatgcttggtgctatgagaaatattgattattcggatattacagagtatattccggcatttttatgtgtaacctttacgatttttgcaaataatatcgcaaatggtatctgcgtggcgcttccggcttatctcgttatgaaaatcgcagcaggaaagatcaaaaaggttgaaccggtcatgtatgtactggtagcagtctgtctgttgtatttttattcaattatctaaggatggtgaaatggtatggagcaggttcatctgctgatcaaaaacgcaaaggtatttaattcctatcttaagaaattcatatctgccaatgttgcggtgaaagatggaaaattttattacatagacagaaaacaggatacggatcttcagactgacaatgtgatcgatgcaaagggatcatacatgattccaggactgacagatattcacatgcatattgagagttctatggccacaccggctttttttggaaaatgtgcaggagaaaatggtgtgacgacggtggtttcagagcctcacgaaatggccaatgtcaaagggatccgagggattctggaaatgatctctgcggcaaagaatgcacctatcgatattttttacgggattccaagcagcgttccgtcaaccagtgaaaagctggaaacaacaggcgggatcattgactgcagtgcaatgaagcatctgctggaagaaaaagatgtggtatgtgtaggcgaaatcatgaattaccggcagatcatccgggaaaatgatctggagatcagccggtttctggaatatctgaaaaaagaccatccgggatatgtgatcgagggacattgtccgtcattactggatctggatcttgcaaagtttctttatctgggtattaatggtgatcatacagaacatactcttgaggaagtaaagcagcggatcgaaaacggaatgttttttgagatccaggataaaatgctgaaaccggaaatcctggaatatatctgccagaaccagctctacgagtattgttcctttgtaacagatgatactatggcagatgttttgtatgagcagggaccgttgaatgcagtggtacagaaagcgatcgatatgggatttccgatggaacaggcaatctactgtgccacatatacaccatgtcagcggatgcatttttatgacagaggagctatcgcaccgggaaaacttgcggactttatgctgcttaaagatccgtccgttcttaaaccggaagctgtattcaaaaatggtgttccgatttatgcaaaggatgaaccgcagttgccgctgtctgcttccacatatgaatttccggcagatttttaccggagtgtacagcttccggatatttttctgaaggattttcaggtgaatgctccttttcaggaaggatatgcaacggttcgtgtgatagaaatcaatccggatcgtacccatactactgaaaaactggtggaaatgccggtgaaagccggaaagatctgctgggaaaacagcggatgtcttctggctatggtggtggaacgtcatgggaagaacggaaatatcggctatggatttcttacaggctcctgcttgaaaaagggaactgtggcaacaacatattttcatgatcatcataatctctttgtggcaggaagctctccggatgatatgttatttgctgtaaacaggatccgggaactgcaggggggatttctgacagtaaaagatggaaggatcctttctgaacttgcacttccggtatgtgggcttttatccgaaaaatcaatcagggagaatggccttgcattgaaggcggtaagaaaaagccttacagatctgggatatgtgcataataatccgatcatgtcagtggcaacacttggattaccggtaagcccggcactgaagctgactgataagggactggtggatgtaaaaaaaggagaaattgttccgctgatcgtaaacacaaagaaaaataaataacgttgttcttattgcagcaatataagccggacgtgagtcgcggaaggcggcataataaggcataataatcagatatcgttgtaaaaaatctgcatttttcaatcttatgattggaatctgcagattttttgttatagagaaaaaacaaaaatcatggtaaaataaaaatgcaggacaaaaaaggttaaatcaggagaaaacgtatgaaaaagaatcactttgaattaaaaaattatgttatggcaaccggcgtttttatcttggcggttatagcagggattcttatttttttcgagtgtgtgcagagggctgtacaggtgaattctcagaatacattgaagataaatgtgcagagacaaagtgaacacttacggacgatactggatattaattatcaatatctgaatgagattgcctctgcaatgggaagatcagaagaacttttttcagaagaaaataaagaacgactgatatccatttatgaaaagacagacctggagagggctgctcttattgataagaatggagatgcatactacgacaatggagtaaccaagaatgtttctcatcgcagatattttcaggaggctatcagtggagagcagaccatcagcgatcccctggaaagcagtgtggaccataaggtgcgggtggttttaggtgtgccggtatacaaagaccataaagtgatcggtgtgttgggcggatcctgtaatgttacagcgctgagccatatgctttttaatgatctttttgatggagcgggaaacagtcttctggctacaagtgatggagagatcattgcctttgatagtggttcggcgtctggtacggagatcacatatggaatcaatctttttaaatattacggagaaaaaaatctcaaagggaagcatgctcttcaggatattcaggaagattttaaagttggcgaaagtggtctggtgaagcttagtctcaaagagagaaaagaagcagaccggtatctggcatatatgcctcttggatacaacgactggatgatctgttatgcaattcctgtaaaaagtgcacagcaggcttatgaattcatttccggttatgaaatcctatttatgggaagcttctgtattctggtgcttctcctgctcctgtatattgttgtaagaaataaccaagagaaagcagagttggtgcgttctgctcagaaggatgcgcttacaggcgtttataacagagagaatacgcagaaggtgatcgatgctattctgagagaaaaagctccggaaggctttcatggcttcctgatcctggatatggatcattttaaagaagtgaatgatgtttacggacatgtcatgggagataatgtattaaagatgctgggaggttttcttaaagagcagttccgggaacaggatgtgatcgggcgtatcggcggggatgagtttgtgattctgctctgtaatatcggttcccggaaaaatatggagagcagaataaaaaaacttcatgaaaagctcagggagatccgtatggaaggcatgggagagcatacatttacttttagtgcaggaattgcttttgcaccacaggatggagatacctttatggaactgtatcaaaaagcagattttgccctttatcaggtaaaacgctccggaagggatggctaccggatctataaataacaataaaaaagacagaagatatcctgaagagaaaaaaggaaatcttctgtcttctttttgtataaattggaatgggaagctttgatgtccttaggcttccggaattttttgaatgatcgttctgtttatgacaaccaggaaagctacggacacgatcagagaaatgatctccgcaatggggaaagaccaccatactgcgtgaagtccgccgatggaagcaaggatataagcagcaggtaccaggacaaacagctgacgcatgatagatacgatcatactgaatacagcttttccgagtgcctggaatacagttcccgcaatgatacagaaccatgcgatcagatagtggattcctatgatacgaagtgcagggattccgatggtaagcatatcttcggaagcactgaacagccccagcagtgttttcggaataaattcaaaggcaagaaaaccaatgaatgtaaaacagaatgcgatgaacatgctgactttgacagttttaagcatacgctttctgtggcgtgcaccataattataggcaatgatcggtgtaatgccgttgttaagtccaaatacaggcatgaagaaaaaactctgcaatttgaagtaaacaccaaatactgcagttgcagtgactgtaaactgtaccaggatcagattcatgcagtaggtcatgatagaactgatggactgcatgatgatcgatggaatacctactgcataaatatggccgatgatcttaaggtcaggacggaagcccctgaagctgagccggacttcatgattaaatttatggttgcagattcctgcaacaatgcaggctacacactgtccgatcacagtagctacagcagctccggtaacacccattttcggagcaccgaacagaccaaagatcaggatcgggtcaaggatgatgttggtgatggcaccgcacagctgagaagtcatgctgaatatggtttttcctgtggatgtgagtagacgttcaaagaaaaactgtccaagcagaccaaaggagaatatcataactgtgctcagatattcaatcccaaatttaaggatctcagggtctgcgttatgtacctggctggcataaaatggttttactactgtaaatccaaggatcaggaaaaccagatagcttaagccatacaggaaagcagcattgctggctgtccgatcagcttttttaaaatttttttctccaagggatttggaaagcagtgcgttcatacccacaccagtacctgcacctactgcgatcagaagtgtctgcagtggaaaagccatggaaactgccgtcagagcattttcggaaagcatggcaacgaaaacactgtctacaatattgtacaatgcctgcaccagcatggagatcatcattggcagagacatgtttagtacaagccttcctacgggcatggtccccattttgttttctgctatgggagcagatgtacttttttgattcatatttcctccattttgtattttgtagtttttgacctaattatacatattagcatgaaaatatgagggattcaagaaaagaatatccttctgacattattataaatggttcatactataagtatttaaacgattttgatagttgacatgaattttcagatatgctatgcttatggagattttgaaggacaagaaagagtcttttcaaagcaattattttggaccactccattttggggtcaaggccatacggacagccgggtccactgccgctgatggtaactttggttgccttattgattgagttagaagctcaaattttataagttggttcctttgataaccgtcatgcgcctgttgcgcagacttgtgaaacggtcaataagagtagtaaaagtatgattgctatatagactctgacatatatcatccggattttgatctcatgtaaatatgaggattctcatatttatatgcgatgaaaatataatcaggaagaatgatctaagcaggtttacggttttgtatcggcctgcttttttttgtgcggataaaggaactggaaatggagaagcaatgaacagaagtcgttttaaactggaccagaatcatgctccaattcatgaagctctagaaaaattcctgcgtatgagagtagtacctttcgatgtgccgggacataaaagaggaagaggaaatccggagcttactgaatttctgggacaaaaatgtgtaggtgtggatgtaaacagcatgaagccgcttgataatctctgtcatcccgtatctgtgatccgggaggcggaagagctggcagcagatgcctttggagcagctcatgcatttcttatggttggaggaactacaagctcagtgcagactatggtgctaactgcctgtaagaggggagatgagatcattcttccccgaaatgtccacagaagtgtgctgaatgcgctggttctgtgcggagcaatcccggtctatgtgaatccggaggtggatcagagacttggaatttctcttggaatgcgacgtgaacaggtggcaaaggcaattaaggagcacccaaatgcggtggctgtgctggtgaataatcccacctattatggaatctgcagtgatcttcgcgcaattgtacgcatggctcatgaagcaggaatgctgtgtctggcagatgaggcacatggaactcatttttattttggcggaggtctgccggtttcggcaatggcagctggtgcagatatggcgtctgtatccatgcataaaagcggcggaagcctgacccagtccagccttcttcttacaggaccaggtgttcatgccggttatgtccgtcagatcatcaatctgactcagactacttcaggcagctatcttctgatgtcaagtcttgacatttcgcgccggaatcttgcacagcgaggacgccagatttttcatcaggtagcagatatggcagagtatgcaagggaagagatcaatgctattggcggctattatgcatttggaaaagagctggtgaatggagattcggtttttgattttgacattacgaaattaagtgtacataccctggatatcggacttgcagggatcgaggtttacgatatactgagagatgaatatgatattcagatcgaatttggtgatattggaaatattctggcttatctgtcgatcggagatcgtgcccaggaaatagagcggctggtaagtgctcttgcggagatccgcaggcgattccagaaggataaatcaggattgctggatcaggaatatatcgatcctcaggtagtgacaagtcctcaggaagctttttatgcagaaaaatgcagccttcctctcagagaaaccgaaggcaaagtatgcagcgagtttgtaatgtgttatcctccgggaatcccgattttggctccgggggaacgaatcactccggaaatcctggattatattgaatatgccaaggcaaaaggatgcaatatgacaggccctgaagatccggatatattgcgtttaaacgtactggcagggaggtaaagaaaatggaaatgtggttttcggaatttcatacaccggatgtgaagcatagtatccgggtaaaccgtcagctttattcaaagcagagtgactatcagagaattgatatttttgagacaccggaatttggcagggtgctcacactggacggtaatgtaatgctcacagagcgtgacgaatttatttatgacgaaatgatcacgcatgtacctatggctattcacaaagaagctaaagatattcttgtgatcggagcaggagacggcggagttgtacgtgaactgaccaggtatgaccgtgtcagccatattgatctggtagagatggatcctatggtagtagaagcctgtcgcgcatatcttccgggaaatgcctgcaggctggatgacaggagagtgcaccttcattacgaaaatgcgttgaaatatatacgccgctgcgaaaataaatatgatcttattattgtagattcctcggatccctttggcccatcggagggattatttacccgtgaattttacggaaactgctataatgcgctgaaggcggatggaatcatggttaatcagcagggaagtcctttttattccgaggatgcgcatgccatgcagcgcagtcacaaaagaattgccagtactttccagatcagccgtgtttaccaggctcatattcctacctttgctgccggctactggctgtttggctttgcaagtaaaaaatatcatcctgtggatgacctggattcgaaggcatggaattcactgaatcttcgcacccgttactatactacaaggcttcacaaaggtgcattttatcttccggcttttctggaggaaatgcttcaggaggtggaggactgatttatgatcttaccaaatattgaaaattttatcggttgtgacagcagctttgaggaagcagaaattgttctttacggagctccctttgattcgaccacaagctttcgtccgggagccaggttcggtccttctgccattcgtcatgaaagctttggactggaaacctacagcccttatcaggatcgtgaccttatggatatccgggtatttgacagtggagatctggagctttgcttcggcagcagtgaaaaggcgcttgctgatatacaggatcgtgcagaggaaatcctgaaagagggaaaaatgccgttgcttctggggggagagcatctggtgacactggctgctgtgagagctgtcgccgggagatatccgggacttcatattattcattttgatgcgcacgcagatttaagagacgattatcttggtgctcatttaagtcatgcgtgtgttatccgcagatgctatgatattctgggagatgggaggatacatcagttttgtatccgaagcggggaaagagaagaattccggtttgcaaaagagcatacagattttcatccctttacctttgaaggcctggaagaaaccgtacaggaattggccaggaagcaggttccggtatattttaccattgatctggactgtctggatccatctgtatttccgggaaccggtacaccagaggcaggaggcgtaagcttccttgaattgctcgctgctatccagaaggtatcagaattaaatattatgggagcagatgtcaatgagctggcacctatgctggatccaagcggtgtttccacagctacagcatgtaaggtggtcagggaactgctgctggcggtggcaaaataaaaacagttacgaaaattgagtataaaaaaggagacaaaaaacatgagcagagtacttgtaatcggctgcggcggagtagccagtgtagcaatccagaagtgttgtcaggcagatactgtatttacagaactgtgtatagcaagcaggacaaaagaaaaatgcgatgcacttgcccggaaactggaaggaaaaacaaaaacagttattaccaccgcaaaggtggatgcggatgatgtaaaccagctgatccagctgatcaatagttacaaaccggatctggtaatgaacattgcgcttccgtatcaggatctgagcatcatggatgcat

SEQ ID NO: 209 - DNA, 7492 bp, Unknown
  gut microbiota DNA sequence
cagggctatgcagtaggaaatgagcctgttcccggttctattgctgtatggagcggagattattacggacatgttgcttatgtaacagccaatcttggaaacaacagatttacggtagatgagggaggaagaacggacaaagatcagacatcctctcatggagttgcatatggatatacactgaccaatgcagtcggaggaaggcgtccttatgattccaataaggtgctgcttggctttatctatccgggcgttcgtgtaccgggcaagccatatgtgagcgtgaatccgggaaaagcgaatcagaccacaacgttttcctggaatgcaacaagctatgccagatattatgatgtatatgtgtataaagcaggagaatccaatgcgacgcaagttaagtatggagtgaatggaacaagctggtcctgcacactgccggcggggaattacagggtagcggtggcatctgtgaatcatgcacagtatgcatacacattttcggattatgtgaatttcactgtccaggcagctccggtcacacatacacatagctatcagagagtaacagtaaaggccaccaccactgccaacggatatacacaggagcaatgcagctgcggaagtatacagaataaacagatcatctattatccgaagacaataaagctctcaagaacaagctatacttataatggaaaagtaaaaaagccaacggtaaaggttacagacagcaacaataaggtgatcagtgcagacaactatacagttacctattctgccggaagaaaatatgttggaacctatcgggtaacagttcggtttaaaggcaattactcgggaaccgttacaaaaacctttaagatcaccggaaaggctcataaacacagctacaaaaaacaggtaaagaaagcaactacatccagaaacggatatgttcagtatctttgctcctgcggtgcggtgaccggaaagaaaaccatctattatccgaagacaataaagctttccgccacaagctatacatacgacggaaaagtaaaaacaccgaaggtaaaagtaaccgatgcgaataaaaaaaccatcagttccggtaattacaaggtgtcatattcccagggaagaaaaaatgttggtacttataaggtaacggtgaagtttaagggaaactacagcggaaccgtaacaaagacctttaagatcaaggcgaaacctaaaaactgggtttatgtggatacgcttccaaagaatatcacttccgataaatatacgatccagtataaacacacctatcagaaaacaacctccagctatgtcaatgatggtggtgtttatgagtccgcaagaccactggagacatctgcttccagacagctggtgggctattattactatcatttttgcggaccgaataccggaaagaatgtaaactttgcacagacgggctcttatgtacattttgacagtgtggcagccagtcaggtaaccgtagctgcttccggcgcagatggagatgacccgagcattacctattatctgctgaactggaaaggaaacggcagccgggtatggtgctccagcggaactacctgcaacggcgcctacggaagccacggagccagaagccaggcctggtaccgtatgaaccagtaccagaacaaaaaactccagactcagactacgacctccgaaagtgattggacaaccggtaaagacagcacagcagtaaaaaccgtttaccgttataaagcaaaatagatcacagatcagtcataaatcagaaactccctcatgtatcagaaaaaactgatatgtgagggagttttttgataaatgtgaaggagcttatttcaaaacggatcgaaattttgcagtaagcaaccgacaaagttttacatatattgtacaatttgtgaaatacaggaaaaaatgacaggatatctgcagcttgcaccgaaggtgggcggtgacaatattgcctgtgtatccatgtttagcttccaggagaagatgaataaacaggctccggaggcaggggaaaggattgaaaaagaactgctgaagtaaactgaatattcttgtataagctgtcgcattaatgtgctacagcttatttttttgaaaaataccgataaaaatatggacaaaaccgaaaataatggttaatatatacacatgcctaaaaaacaaaaaatgaaaattatacgaaatatataatataaacccggcacagaaaaaatatatatagacatatttacaaagcgacatcgtggatatcaataccggagaaagtgggaaaataacgggaggaagagaatatgttgaaattttttaaaggaaaagataaaggaaatttaatttatgcaccctgcagaggaagagtggttccccttgcagaggttccggaccctgtctttgcggataaggtactgggtgacggttttgcagtgatcccggcagacggcaggatatatgctccggcagacggtgaggtggcaatggtatttgatactcttcatgcagttacgctgacaagcactcagggagcggaaatactgatacatatcggactggatacagtcacacttaagggcgaaccctttaaagcgcacgttgcagcaggtgacaaggttaaaaagggtgatcttctgatagaggctgatctggacaaaattgagaaagccggtttaaatacaattatcccggttctgatctgcaacacagatgattacggaaagataagcctccagaaggagggggatgtttcggcggatgaagccgtcctcaagctttcatgatcatcttcatgcagctgacaggcttataacagcccggagatagtagtaattttcggggtgttataaccggagtgatccggtcaaatatatttattttaagggaggggaaatatatgaaatttcttcaaaaactgggaaaagcgttaatgcttccggtggcagtactgccgatctgtggtatccttatgggtatcggatactggttatgtccggcaaccatgcagggtggagacattcatggcgcagccaatctgatcggtctgtttctggttaaggcaggcggagcgctgatcgacaacatggcaatcctttttgctatcggtgttggtgtcggtatgtcagaaaagaatgacggaaccggcggaattgctgcacttgcatcctggctgatgctcacaacacttctttctacaggatttgttacaaccatcattccatcaatcgctgacagtgcaacaaaaactcttgcatttgacaaaattgcgaatccttttatcggaatccttgccggtatcatcggatctacatgctataacaaattcaagagcaccaagcttcctgactggctgtcatttttcagcggcaagcgttgcgtagcgatcatcgcaggagtggtttccattatcgtatctgttgtattactgtttgtatggccattacttttcagtgcacttgtagcattaggaaaagcggttgcaggtatggatgttgttggtgcaggtatctatgcattcctgaaccgtctgctgatccctaccggattacatcacgcactgaacaatgtattctggtttgataccatcggacttggtgatcttcagcacttctgggcaggtgaaacctctgcagatgtatcctggagccttggaatgtacatgtccggattcttcccatgtatgatgtttggtattcctggtgcagcacttgcaatggttaaatgtgcgaaacctgcaaagaaaaaaatcgcgatcggtcttgttgcatctgcagcaatctgtgcatttatctgtggtgtaactgagccgttcgagtttggatttatgttccttgctcctggcctctatgtgatctatgcattactttacggtatctttaccatgatcacagttgctcttggattccgtgcaggcttcagcttctccgccggtgcgatggatttacttttctcatcctcacttccggcagcacagaagacatggctcatccttcctcttggaattgcagcattcatcgtattctatgttgtattcctttttgccatcaagaaatttgatctgaagactccgggaagagaagacgatgacgatcttgaggcagagaagaatatcgagcttgcaaatgatgattatactgctattgccgcaaaaatccttgaaggctgtggcggaaaagagaacatcacaagcattgataactgcatcacaagactgagacttgaggttaaagatattacagctgtaaatgataaagtgatcaaatctgcaggtgttgcaggcgtgatcaaacctggaaaaacttctgtacaggttatcatcggaaccaaggttcagtttgttgcagatgcattttctgagctttgtaaataatggcttttttggagtcaggtatttgttaaaataattatggggcagcagcagaattgtgaaaacggttctgctgctgtttttttgtataccttatattgaccgatactttcaaaaagcgtacaatgttacttcgataaaaagcaataggtcattgcgtttacgattgcaatatttctacagggggaatgaagttaatgaaatcctgcgtatttcacaaaaaatatcttttagccggcatatatattatttttgttctgtttacctgctgtaattcccgattttatcatacaccgctggcaaaaatatgttccgtgacagaaaaacagactctgagcagagaaggaaccaggggctcaaaagaatattactatactcagaacattacagcacggatactaaacggttcgcataaaggggaaaaaataacggtctctaatgaatatacatcttctcaggttcagaccaagaaatatcataaaggagacaccgttcttttaagcggttcaaaggaaagccccggaaaaacgatacgttctgtaaaaagggatgggtatctggcattactggcaggaggattattttttcttctgatctgtattacaggaaagcagggattttacacgatcatatcactgatactgaatacagtcatatttgcgtatggatttcaggcttttacagaagggaaaaatattttaaatatctgtaatgtcatcgcagttcttttttcactgactacattgatctgcttgaatggaattcacagaaaaacattttcctcagttctttcaacactgtgtgttctgtttctgatcatggcattgtttgaattttctatttatatgtacggagatctggattattccaatctggaataccttggaagtacaggcaattcagcagatatattctgggcagatattatgctgacaggacttggtgcaattatggacgtgacggtgacgatcagcgcagcagtaggagaaatcgtgcggaaaaatccatcggtttctctgagaagactgatacattccggtcgtgaaatcggatatgatattatgggaaccatgataaatgtactgttgtttgttctggcaagtggcatgattcccatgttcatacttaagatgaataatgatgtaagctttataacgatcgtgagatatcacattccatatgatatctgtcgttttctgatagaaagtattggaattgtactggcaataccggtatctgtttttattgcttcagcgattatgaaaataccatcacggaaaaggggtgtcagagaatgatcatttttcttgcattgattttaatttttctggtgatcttgattggcggagagcgtggagccatgtcaattatgacactggcggggaatattgtaattttgtttttttcaattatgctgatgtctgccggttttcctgtactgctcctgatattggtggcaggtgcaggtgtctgttatatttctctgttttatcagaacggaaataatccaaagatgcgggcggcttttctggctacactgctggtaatgttacttttgtttattccgatttatattattacatggagatcaggaagctacgggttaaatgagctgcagatttcggaagacgattttatgtattattacagtacggaccttcatattaacatgcttcatgtaggaatatttgtaactgttttcagtactcttggggctgttatcgatacagcattatctgtaacatcttctgtatatgaagtctggactcataaaaacggtctgacagcgaaagaacttacagcttccggctatcaggttggaaaagagattatcggaacaacggtaaatacgttgctgtttgcctatcttggaggaactattttattattttcatacattcagacacagcaatataccatggagatcattcttaattctcagttcctattccaggatgttgcagtcatgctatctggtgcggtagcctgccttattaccgtcccggtatcgatcagatgtattattcgacagattcaccgtattgattcggaagaaaaatctgaagttatataatagcgttaaaaaacagtcagacctgtggagaagaatgtgaaaatgtgaagaggttgaatgaaaaagtaacttccaccatgtgctagtactgataagtaaagggatttctgcagaattaatttctacaagatatagatatctacacaaaacaaaactataatataaggagaaaacaccgtgtttttacgggattggaacatcacgaaaggaccgctggctgttctttgcaagggtaacttccaccggtctggagaatacgatgccggaaatgaatgtgatatttagtgctttaacagcgtgggttttaatatcacctgatccgcgggtatatctttaagatcgcaaagttccaatagttttctgtctatcagtaactgagccagtttaaatggggtacagccgtttaaactggctcttgccacgctattgatatggttagctatcagagttaccttgctctggttcagttgtgcgaagccgatacctttgggaaggatataacggataaattcatggtttttttccaacttgcctttctgccaggacgacataggatcacagtagaaaacccgggataaacgagctgtatctccaggacgttcaaatatttcagggtctttaaaagaggagccattgtctgtgaggataacaggaaataacttgtggtatagagctgctccaagctgttcatacagccaaaggaaaacctccctgacatttttacggttatcggcttcaagtagaaaaaggagcataaggttacaattacggaagagcatagtcagaagtactttttcagattttccaccagcgccttccacaacatctaactctacaacatttgtgtctggatattcttcaagatatttttcaaaatgatggtatgtcctattttcccggtagccggtgttttcaggagcttttctggtcttgcgacgttttttatagcgtactttgcgtgggagatccaaattgatagcagtaaaatatccatgatcaatgtagttatataatgtacggatagaacaattgataagctg

SEQ ID NO: 210 - DNA, 909 bp, Unknown
  gut microbiota DNA sequence
ggcttttctggtcttgcgacgctttttatagcgtactttgcgggggaggtccaaattgatagcagtaaaatatccatgatcaatgtagttatataatgtacggatagaacaattgataagctgctgattggaagcataaatatgagataatggctgtcctttaaggagaaaaggtgaaaccagctgatccagctgttccagagattcgggtgtctggttgatacctgaacgggaagaaaccttaatctcattataaaggtcatgggcataatgggcacggtaaaaatagaagtcatgggaacaggtacgtatctggttgcagttgttgcaaacatacggtggttttttgagcctgtcgcaaagtacaggagtaaaagcacggcaatacatggcacagcgcttagaacggcacttaaagcacaatgaccggcaggaaaggttgccacatacatttcttttgtcacaggaatgaaagaactggcattccgagcgtttcttctggaggtcatcctgataatgaggaacatgtatgatatgacgccgtatctcctttgagatggtggaagaatccttgtttaacttgcgagcaatctgagaaaagttttccccaatctgtataccatgttcgatagcagcacggtcagcgagagtaaggtgtttgcggtttccaatattataagtagccataagtaaatcctcctttgtaataaaaatggatcatttccggtgatcggaggatatgggccagtgtaccctggcatttgttataggatagcttattgcaggactaagttccacccctaatttcagcaaaagaacataaagggctgagagtggaaattagtttttcattttaggggaaaatgtgaagaaagtgtgaaattagcactcgcctcttgacagtgctaa

SEQ ID NO: 211 - DNA, 82942 bp, Unknown
  gut microbiota DNA sequence
ctggtcagccgcaaaccgtccaagaaagcgttttacgcccgtgaaggccttgtgactactgctttaagctggatcgtcctcagtattgtcggtgctgtgccgtttgtgctcagcggggctatcccgaatcccattgatgctttttttgagattgtttccggtttcactacaaccggttccagtattctctccgatccatcacagatgccttacagcatcaatatctggagatgcttttcccactggatcggcggtatgggggttctggtatttatcctgacactgctgcccctggcaggtggctatcatatgaaccttatgaaggcagaaagccccggtccttccgtaggaaagcttcttccaaaagtccagtcaactgccaagatcctgtacaagatctacattgcactcactgttgcactgatcatcctcctgcttcttggggggatgcctctttacgacagtctctgtgcagcatttggaactgccggaaccggtgggttcggaatcaaatccgacagtatgggaagttacagcttatatattcagatcgtcatcactatctttatgattctgtttggcgttaacttcaatgtctattttcttcttctcaccaggaagttttctcaggcattgaaatctgaagaggtccgctgctacttctttgtgatcatcgcttctgccctgatgatcacactcaatgtccgacatctgtttgacaatgtgtgggaagcacttcaacaggcatttttccaggttggttctattatcaccaccaccggttatgccactacggattttaaccagtggcctgcggtatccagaacgattctggtactgcttaccttctgtggtgcctgtgccggcagtacaggcggcggaatcaagatttcccgtcttctgcttcttgcaaaatccgtccgcaaggaactgcatctttatctgcatcccaatgcagtaaaaaagatcaaaatggacggaaaagcggtgtctcacgaagttatgcgtgccaccaatatttatatgatcgtttatctgatgatcgtggctgcatctatcttcatcatcagttttgatgaatttgatcttgtaacaaatttcacagccgtagtcaccactttaaacaatgtgggtcccggtctatccctgatcggtcctaccggaaacttcgggatcttttctccgctgtccaagctggtcctttctttcgatatgctggccggccgactggagctatttccgatcctgatccttttccttcgtgaaacctggaagaaattctgataaatattcgtcatattttgctatgtttgtggcataaattgttcttttcacatttatttcaaatgttagacacactttcttcacatttttactgtatattataagtcatagaaggtgatgaactttctataatatttttctttttcatacgcgccggtacgaaagtaccggcctccttccatttatggagtatttttttccactccctcataatcgaaatccggaataaagctttctgaagcagtttctccttcctggataaatccattctgaatccccatatccacagcagcatccagaactttttcatactctctttttgtaacttttcggtttaattccttaaattccacaaattttctcaccggcgtatactgattcataatactgatataaatatcttccccataggtttcatgaagatacctcagagcctttatggaatttcctgtatgtcccggcaggatcagatgacggacaatggttcctttccggatgtatccatcctctccaaactcacatttcccggtctgacgcaccatctctccaattgcagcctttgcagcctgcacataatccggcgcataagaaaatttctgtgcaagctccggatccagatatttcagatccggaagataaatgtccacatatccttccagaagcttcaaagtttctgttttttcatacccgctggaattatacactaccggaatatccagacccttcctccgggccatatccagtgcctctatgatctgtggtacatagtgtgcacctgttaccaaattgatgtttgcagctcctttttccttcagttccagaaaaatctctccaagccgttccacacttacagcccgtcccctgctccccatagcaatatcatgattctggcagaaacagcagcgcagcccgcacccggaaaagaacactgccccggagccttttgttccggagatacagggttcctcccacatatgaagcgccgctcttgccagataaattctctcatccatgccacagaagccttttttccctgcaccccggtctgccaggcattctcttggacaaagagcacaagctgacataatttcttccgtacagtgcgcgctccctgccatactgctgattttattttcattctccactttcacttttctcctgatctttcttccaatatcgttattttctgttatctagtactagtttagcacatcacgtctgctgccaacaaggctttctctgtttacactatatccttaatatagtacaatggatttcatggaatcttaagaatttacccctttcgtcttaatttccggctgctattctaataacatcagggaggtacaaaaaagtggctaacatacttgtttgcgatgacgacaaagacatcgtggaagctatcgaaatctatcttacgcaggaaggctatcacattctgaaagcctatgacggacaggaagcactggatatcctgaacagcgaaactgtagatctgctgatcatcgatgtgatgatgccccgtctcgacgggatccgggcaacagtcaagatccgggaaagcaatcctctgcccatcatcatcctgtccgcaaaatctgaagacacggacaaaatcctgggccttaacatcggtgcagatgactatatcaccaaacctttcaatcctctggagctgatcgccagggtaaaatcccagctgcgccggtacacacagcttggctccgctgcaccggcagcatcggaacacatctacacaaccggaggtcttacggtaaacgatgacaaaaaagaggtgctggtagatggagaagcggtacggatgacgcccatcgaatataatatcctgcttcttctcatgaaaaatcccggacgtgttttttccaccacgcagatctacgagagcatctggaatgaagatgctctggccgcggataacacggtagccgtccacgtccgtcacattcgcgaaaagattgagatcaaccccagagatccccgctatctgaaagttgtctggggcctgggttataaaatcgaaaaactgagccggtgagccagccggccatgaagtatctgtacttcagaaaggggtattatgaataaaaataaacatacgggaaaaaaccgttcatttatgcgcattcctgctcttgtccttgcccttatcctgcctctgatcatgatcttttcagcggcactggtgatccaggcaggtatgcagatggactctgccgaggatcttaaaacaaaggattatttccagacctctgcttttgctgacagcttttactcaaaagcttccacaatcctgtccggaatttcagccaaggaaatcctggataaaacaaacgaagatgcatacattgatctcgaagagctttataacggagattctctctccttcaaaaacacctccggactagcctattccttcaatgatcttaaggaatggagctcacagagtatccattccaatgatgactggatcgtcctgggccttaccaccccggagggtgaaacaaaatatatgtactattccgatttcaaaaaggctctggaagacggaaccctgcagctaaatgccaactccggtgccctgaaatacgagggaatttcccagaaagactggactgagcgtattctttcctctctgagcgccgaatatgcagacggcggcattcagtcacaggaacctctgaaaaacatcacagacaaaaacggaaacgtggtttacacagatatggcaaatgtgctcactccgatccttgaaatcccctgtgcaccggaaggttacgacagcctcctggattacatgaattccacctcatccaaaaccagaaacttcaaagggaacctgaccgatgcctttgagcagctggataatgcccgggatcttttttccagctggacagaagctgctcagacactggatgcgtacaacagcgataattccaatatccattatgcctatacggacaacacctcacagaaaatcttcacaaatacagatgcagcctatacttccgacctgactgatatttccggtttttcagacaaaaagccttacgtgtttctaagtgtcaacgaagctgccacagatgagaaaaatgcccggaatggtcttatgaatctgaacctttccgctgctgcaaacccttctgtaggaaactggatcgatctccttcaaaactccacatacgatgaaaactgcagttttcttgcctggatcgatgataccagccttcctgtacaggattccattaaaactgacagacagcatttcctgacttaccgtactttatttatcccggctgctgtgatcaccatgatcagttttctgctctttatcatagattttatctggcttactgtccacaccggaagaagaaattccgatagcggtaatacagacactgctcagccagaacagaacttttttgacaggatctatacggaagcagcagcaggacttgtgtgtatcccggcacttggtgtattgaccgcaggactgagcatgcaagcttgcacctataaccttgtctcctccctgatcatcctgggtatcacgattttcctgatcacgtgcctgttctggatcggctatttaagcctgatccgcaggatcaaagctcgcaccctgtggaaaaacagcctgcttcgcaaatgtctgaagcttccccgtctgtgtctttgcaaagccggtaagctgatcgattttttctctaggaataccatcagcagaatccgcatgatagtgggacttggcgtatttctgttccttgaatttttcttcagtgccctgctcgcggcatctgatggatggttcctgatgtttttgcttctattccttctggatctgggtgcgcttttctgcgtctacaaaattgctcttgggcgggaactcctccttgatggcctgaaacggatcaccgatggagagctcacttacaagatcccggaaaaggaactccgtggtgatcagaaagcaatggcacagtatatcaaccgcattggtgacgggctggacgctgccgtggaaaaaagcctcaaagatgagcgtatgaaaaccgaattgatcaccaatgtctcccatgatctgaaaacgccgctgacttccatcatcaattacattgatctgctgaaaaggctgaacctcaaagatccggaagcactgaaatatcttgagattttggattcaaaggcacatcgtctgaaaagtctgaccgaagatgtagttgaagcttccaaagccagttccggaaatctctccctggaaatgacggatctgaactttgtggaaatgctttaccaggtgatgggcgaatttgaagaacggatggaaaacagacatctgaccctgatgacacatctgcctgattctcctgccatgatctatgccgatggcagacggatgtggcgtatccttgaaaatcttttcggcaatattctgaaatacgccatggagaacacaagggtctatgcggaagttcttctggaaaaagatcaagtcatctttaccctgaaaaatatttccgcacagcctctgaacattccggctgaagaactgaccgaacgtttcatccgcggcgatgttgccagaaatacagaaggcagcggacttggattatccatcgcacagagccttacccagcttcaaggtggcacctttaatctttatctggacggtgaccttttcaaagtctgcttaagttttccacagaagatctctcccacagtcttatccgcaccggaagattctcattccgaagcacattcttaaccattcataaaaaacagcagcggaagccctgatgatatgatgaatcaggagccaggctgctgtttttctcttatttttgttctcttttacactttaatggtgatctcacggtctgtccggttatatttataataccggactccggctgcatccagcatttttttggatgcgatcaccgacggagtatctgcatatttatcacagtcgtatacgatagtcctgatccctgcctggataatagccttggcacattcgttgcagggaaacagggacacataaagcttggcaccttccagacttcctccccggtagttcaggatggcattgagctcactgtgtgtcacataaagatatttggtatccagcggatctccttctcttccccagggaaactcatcatcggaacatccctttggaaatccattgtaccccattgacaggatcttgttatcttcacttacgatacaggcaccaacctgtgaatgcggatccttggaacgcatgccggaaagcatggcaacacccataaaatactcatcccaggaaagatatccctgtcgtttctgtccttttttatccatacagaatcctctttttctattggtttcttactgatcgatcaatcctcgatcatgttgatccttctgatatgacgctcatccccggaaaatggtgtatccaggaatgtatccacgatcttcagagcaagccccggtcctactacacgaccgcccatggccagaatgttggcatcgttatgaagtcttgttgcctctgcagtaaagcaatctgtacaaagtgcagcacggattcccttgaatttattagcagtgatggaaattccgatacctgttccgcagatcaggattcctttctcacactcaccgtccacgatcgcctgtgctactttctttccataaacaggatagtctacagattccggaccattgcatccaaaatctttgtactccagtcctctctcttccagatgcttctttacctcctgcatcagctcatagccgccatgatcacatcccagtgctatcattttctttctcctcctcaacgttgataattttatgaccagccgctttcagtaagcggttcatgatcgcctgtcccattcttggtgtaaaaaatgcctctgaataaatggcacttacattacagctgtcaaaatcacgcaggacctcgtacagatgatgcgcgatggtttcttcctgctcccggcttccgatactctttacgattccatgtgaatatcggccttttgtttcatctgttgcgatgatccccaccgtcagtcccttctcctcagcctctccggctcttttttcaatctccgcgatcacaccctctgtggccccctccacaatggcaagatctgcctttggtgcataatgacggtatttcattcccggtgcttttggatggaccttgctgtccggtttgatcagtcccttatccatccttacatctccaagtgtttcccggagcatttccagggaaatatatcccggccgcaggactaccggtatgtcttctgtaaaatctacgatcgtagattccagaccgatatttacctgtcctccatcaatgatcatatcaatggcttctcccagatcctctgccacatgtcctgctgtcgtaggacttggtcttccggaagtattggcacttggcgctgccacatatccgccagccgcaaggatcagctcctgtgcgataggatcacttggaaaacgtactgccacactgtccagtcctccggttgtttcctttggcacgatatctgccttgggaaggatcattgtcagcggacccggccagtatttctcagccagtattctggctttttcaggaacctccgtaacgatcttatccaggtcacggatatctgcgatatgtacgatcagcggattgtccgaaggtcttcccttggctgcatagatcttcatcgatgctttcggatccagggcatttcctccaaggccgtatacagtctctgtgggaaatgccacaagcccgccgtttttcaggatctcgccacctctggcaattgcctttctgtctatattctccgctgtcataactgctatttctgctttcattttacgctccatttactgtctgatataaatcccctgctcttcaataaaatcttccaaatcctgaagggcatcctgtgcccaggtttcggatttctgaaaagtctccgggaaaaacatgtcttttactatttttttacctgtttctgttttaaagatcttctctgcacttttctttatatgttctttatccagtccatcttcaaaataattaaccagaaaatcagcttccacaaggatctgataatccagcccgtcaatatccttataggtatgatgatgtcctaccagatattccactctgcggatcaccctctcctgaaagcccagtgcggtaagcatctctctggcagctgccggaccttctgcttcctgcgtctttccatcagagcgtccgtatttttccataccgactttgatcccgatatcatgaacgagagccgcagcttccagaacatacatcgtatcttcatccagaccctcactctggccgatcagccttgaaagatcatgcaccttcacaaaatgctggatatgcttcggatccccctgataataatggatcatttccatataaagtctgtcgattctgttcataatatcctcctctctgctgccatcctgcaactgtcacttttttctgtatactgctcagcagaaatctcctgctgagcatatccgttaacagatagctacataatagttacattatagcgttattatggaaaaaatgtcaatcctgctccactttcacaatgtaggttcctgacatatcatcttcaaagacaatgcttcccagactctgaagaacactgtcattaagctctgttccgtatttttctttttcctgtcctcctacaaagatataggaaatatcataacggctgatcagtttttttaccgtctctgcatctgtagatgtataaatagtctggatgtccgcacttttttcattgaggtcaggtacattatttctccagagccattcatgcacataccatcccagtacggtcggaagccccgtagatgcagaaactctctcatatccggtatagctgtccccgttagcctcgagcaccaccggagagcccttgatattctgcttcagccagcggatcgccgacgcatcctgcggaaaatcctgctcaagaaatgtagttgcatccagtccctgatactccgaaaccttccagacatccccaaaccaggaatgcacggcatttccgaaatagcccacggtccagagcagtacaaaaagccccacacctgaaaggatccggatgatcttctgtctggatatcaccagcatacgataaatcccatatcccattgtcattccgaaaaggatatatgcctgatacgtcagcttgaacatagtattggctctggcatttccattttcataaatatcccgcacatatacaagctccgggattaaaaccagtccgatagcacataagcccatgatcactgcaaaaagatccggaactgggatcgcctccagcagcctgtaaagacttttatgcttcagtcccttcattttttctgtgatgacagacaggatcagcaaaacagtaagtagcaccggaagtccccagaggatcagaagctgataccacagtgaatgatgctgtgccagtgccaccccctgtaccatcgtatcaaatttcaatgtaaagggcagaatcaccagataagagagacctatgatctccactgcctgtacgatcgtcactgctaggatcctgattatctttccctcaaatcgtatgatatttgcgatcaggacaactccaccggtcactacaaaatagatcacaaaatcccagtaattggtccactggaacatgccaagaaaaacggacgccagaaggatgtgcggcatcagaagctgtctcagccagaaaacactgcgttcctgtttttcaggctcaggccctctttttcggatcattttcagccatgcatagagcattcccaccagaaatgtcacaaacatcacatttaccacatgggcatgaagatcccccaggacaaaggaatagcatggaaattcatgtatggtcttatcactgtcattcaccggattataccctatgtaacgagttgcatccgggaaccagtagctggctgtttctgccactccctgtatcttccggatcagcggtaacacacaacgatagacgatataatgtacatttcctgcgatagataccgcaatgcctgcagtaattcctgccagtgaaggaatatatttcttctttccatccagccgtccatacagcctgtccttcgtcatctgacggaccagcgaaaacggatacacaaaggcaaacgctgccacaaaggtacgcatcagattataagtcacttccactctgcttcctgtaagcttcgtaagaaacactgcaaaatactgcccgccatagtaataattgatggttccctgtgaataccagagatcacgtgcaggaagagttttgcttcgcatcatagcctccatgaagccataatccataaatttctctgttccatatgcctgtggccggaatcctgccagataagtccacagcagaaagatcccaaaaaacagaagctcctcccgaaagatcagctgcatctttcctgacggataacattcaatgccatgcttcagctgaacatgaaaaagtacagcacataaaatgccaacagccacagatactcctacacacactgctgctgtaaaaggaagaatttccaccgctaccagaagccaggtgagaaatccggtaactgcaatggcaagtacctttgaaaaaagccagccccggtcttcaaagcctccgaaaagccttcctgtgaccggcattgccaccattcccataaacagtgcaagcagccaccacgtccagaatgtccatacatctcctcccaggagatacgcagaaagtactgtcaggatcactgctgcagtcaactccggaaataattctttgatcttttttttcatccttctgttcctcctgtatcagatcctgccccgcagacggtaaaagtccgcaaatgcctgtcttccgatctttatgatccgtttcatattgatagaattttttccggcctgtctcggtcggaatgtaatggggatatattccacataaagatgatgtttttcatagatcacggtcatcagcacattggaaaggaaaaatccgcctgggatacgcttcagtactttggcgagctgttttccatccatcagccgatatggcgtatttgcatcttttacccaggttccaaaaataagaaaaagcacaagccgcagtattcttgtcacaaaaaccctggaaagcccgtcctctcttttctgccggtagccgataagaagaccgcacttttgacgtttttcccagaactgccagaattcctccggaagtgtctggccgtctgaatccgtctgaaaaatataatcggcacctttttctactgcgtaacgatatcccctgagtattgttcctccatgtccttcattcggtttatcgattccgataagacggtcataatttttctgataattctgtatttttttgtaggtagcatctttgctgccatcattcaggatcaccaggcggctgtccccgccgatcctctccactatcggataccattgctcgatcacggtcccgatatttttttcttcattatatgccggcataatgatatataagctgtcatgtttcatagattcttattctcccatcctctgaggtatacaccaatggatatgtctccctgatgatatcctcacgacattcctgctgttcaaattccatatcctcctcaaacaggatatatgtgatcttttcctgttttacggcagctttcagtagctccggatcatccgtggtatacatgagcactgcctggccggcacgatagcccgtatcgtaccctgcagaccatgcataataaggccatccgcaatacagcatagcaccggacatagtgacctcgttcatggtatattccggtgtcagcagaagatcatttttcttaagatttgcactgagccagtccgtcaggctgctttccatatttacagtcatcctgtgtgcggaatcgttgtctcttaagatgatcacgtaatcatagatccccgttgcactaagacagatacaaagaaccgctgccgctgcgcgaccggcccatttcttccagctgtttttccctgcaaggaaaacacatcttacgatccatccccagaaaactgtcacaaaggcataggaaatcatcacatatttatgattgacattgatgtccggagtcagagataccagaaatgcaaatgccattggaagcaaacagcccatcagcactacccgctgacctctcttcagaaatactgctgccacgatcattcccacaaagaaaaatccactgatctccaccagataccagagtacaccggaaatgcttttattgtctgccagaaagccccagtaaaaggatggactcataacacttcccgacacaaagatcttcgactgcagttccgaaaaaagcaccgccaatccggcacagatcacataatccagcttaccgtcagaaaacactgccaatccggcaatgatcagaagtccgccgatcagcgcagctccgttccagaaggcagttaatcccagaaacagtcccagaaggatcgccgtatccacatttctgcagatccaggctttttttgtaaaaaaacggttacggacccacaaaaatccctgctccttgtgactgcatccggcttccacccaatccataaaggtccataccgctacagctgccatcagaaggccgaaagccagatgacgctggttcagatatacattgaaattccataatccccagttttcattggtagtataaccgataaacgccgtattttcttccagagtccgtacaaggtcccccgcctgaagatgttcccacagataacgccagaacgctgttccgctgcggaaaaaaaagaaaacaatggcagctgcccctgcccagaagcttttgaacatccggtagctgatcccgtaaagcaccataagaaatcccaccagagacaggatgcttaccagattatatcccagatcaagacgaaggcccagatactccagatttcccacaaggaactggaacataaaatgatatttcacatcctgcccgccataatgcggatactgggtaggaaaattatttccccttgaaaaagatcgcatcattgccgtatggggtgcataatctccgtataccgaaaagccggagtacagaatgccgtctttcatatggaaaacgtaaaacatcatccatgtcacaaaaaccgtcaaaatgccaaaaagcagaagctcttttttcaggatccattttctgctgatcatccgttcggatatcacaaacattttttgctgttttttctttttccaccggaagattcccgaaagcagcaggatatctaccagaaatacgatcagatttccataaaaaagaggatgctctgcccccgcgcatatgctgaacatccaggaaagaatatagactgcccaggtcagcatcaggattcccatcccaaacgctgccggcaggaccacccatatcctgtttcctctttcagttgtttgacgcggaaacagacatcctgccatttccattcctgttaacatacataatataagataaatgattccaagcataggattctccttaattcacgtaaagtatagcagaatcaccttcctatgaaaaggctattcacatttttttcaattattttcgttttccttctgttttttcagatatgtaacgattccatcagccacagcctctgctacctttctctgatacttctctgtctgaagcagggcggcttcctccggatttgtaagaaatccacattctacgatattgatcacacccggacttctcttcagaagataataggttctgtttccttttgccacccgcggccgtgcaatggaaagcttccggttcatgttttcctggatcgcaagtgccagttcttttccgccttccgaatcctcataataaaatacctgcggaccttttactccgggatcattgtagctgttctggtggatactcacagaaagcaccggttcatatttccggatctgttcaatacgattctgcagatcctgtgctttcatattttttgtaccattttcataaagacctttatcttcttcccgggtcattactacggcaaggccttttttttccaggatcgtttttagcttcatggcaatatccagattgatccctttttccttcagtccaccgattcccaccattccggaatccacaccgccatgaccggcatccaccaggattacctgatctgcttttatatttccagatacatctataagtctgcctgcagtttctgccgcttcccatgacagaatataaaaacagaccagcataagaactgccattgccaattctatgaaatgttttttcaacgcaaaacacccccggcatatttattttaatatatgttgccgggagtgtttttagcattgtgaagatcacaatgttttcttctgtttatgacaggttttctgtgatcacgctccagatcccgctgttctcgaatccaagcttccactctgccacacctgccagtttgtattttttgatcagtttaaccttttccgcaatagacttagagtcctccagccagatctggtatgtggcaccgtccccttcataggttccataattctgacttgtcttcttgtcccagtatgtttctgctccgttatcactgatcgtctgctgtgcctgatccataccgatggcctcacttgtcagtgcaccgccatctgtagtcttccagagccttgtgtagaacggaatcgcaaggatcgtccgttgagccgctacttctgaaagcgtatccttaaccccctgttctacccatggcagagatgccacagaaccggcatcggagcctacgtaatgctcatcatagcccataatgatcacataatccacaaccttgccctgctccgcacggtcataatgactggtaaaatcttccggaaccggattatctacagacagtaccaaattattggcgtgacactggatagaaagttctcttaaaaactgaaggaaatggattcctactccttcgctcaaagattcaaaatcaacattgattccatccagtcctgctttcagtgcataagtgatcagctgattctccagattctgccttgaactggtttttgaaagaacttctgtggtactcatgttctcattaaaattatccaccagtccccataccttcagtcctttttcatgtgcctgcatcacatactccccagatgcaagacttgaaatatttccggagttatctgttacagaaaaccaggttggagagatcacattcacgcctgtcatattctgtaccgcatctgcgaaatagctgtttgcatctgtgctggtaacctggtgccatgccaggttcaccggctcatccatggtaagatatgtataggactctgttttaaaatccctttcataatccgttgtatccacagcacttacttttttcttctgaatataaccgatgtaaccgtcatcggttgccacctgatcccagtcctctccttcattcatcagccggagaactgtattcttcgccagtttggaaaggatcggcgccttgatcccgccccggtaacggatcacggtatctttcttcgtggtcacggtctccacattggtaaatttgtactgtatcgcaacccttgcaggatcctgctctatataagaatcgatatctgtatacttttttacataatccagtttcagataaaccgtgtcatccttcagccacacgtttccgtctgccttatctgaagccggttcctccgtgagactggatggtgttgcatacagtatcttcttgttttcgctatcccagtaatatctctgattcaaatatccgttcactacatccagcggaagatatacatcttctcctgaaataagtgccttctcttccagtttctcagttccaagtatcaacgcagcctcaccgtctgcattctggccatagtattctgtcagatccatctgtttcctgcttggtataagcttattgatcccgtaaacagcccctccggcaagagcgaccagaacgatcagcagacctaccacaaggaccggtatgtgtttttttatcatgtttttttcctttcggtataaaatgtcataatttgtttcattataacatatcttgtctacatttcgttataaaaatcgacttttaataatttttcacaatttctttagaatttcggttccccgcatggtatgcatgagtgcaggggatgatcgttatccggggaaccgttttttcttatgtacggtcattctttgcgaataagatcaaagcttacacaggcgatatggccgtcttcatcttccgtataatcccgcatatagaccccgttttccgcaatctgacaggcttttgcgatttttttcggagtgcttggtgctccattgagataaagagaaactccgttctcacgataaagctccagctcccttcgaaggggttttgcggatttctttttttcctgtgatatatttggcgtatcccgacctcctttcctggttagattttcagaaaacaccagcaatggttctcgaaaagctgcaacttccctgttaggatgatacttgtaataaaatataaataataaaatggggaaaatttctctgtgtaccgacagactcgccgatgaatttcacacagaatccttatcttcagaaaaatatgactttaagttatcgttactgtcttcttgtttccgggaggagacagcttttctgcttttcattatacctgatttcccttcagatgcaagtcttttataaaagaatcagaaattttcttttttctccggtttctacatctttacatcttgtgtataactgttatataatacagtatgtaaaagattaaatttatttacctataggatgtgatcatatgaaaatagaaaaaatcaatgaaaatcagatccgctgtaccctgacgaaagaagatctggacagtcatcagatccgtatcagcgaacttgcatacggtaccgaaaaagccaaacgtctctttcgtgatatgatgcagcaggcacagatacaatttggttttgaagcagataatattcctctgatgatcgaggctattcctgtcaatgccgaaagtattatcctcattatcactaaagtggaagatcctgaagaactggatacacgtttttccaaatttgcacccttcaagggcaacaaaccttccgataccgtagagatcgatggcgctgacaatatcatcgatatcttccagaagctctgtgaatccaagcttaaggatctttcacagaaaccggaagaaaaaagggcggaaacttccgcctctcaggcaacagaaactccggatgcatcacagcagccggctgagagttctgtaaagcttatacgcctgtactctttcccggggctggatgatgttattgccgcatctcatggtatgaatggtttctttaccggtgataatactctctatcgtgaaggagaagacggtgtctatcagctagtacttcatcagtcagactgtacacctgaagaatttaacaaggtctgcaatatcctttccgagtatggcatcggccgcgcattcacaccagccggtgaagcctacctcagagagcactgtgcactgatcgctgatcatgcacttcagaagcttctgaatatctgacaaaccaaatatcctacagacaaacaaaccgctgtcggaatgcgatccatatgatctgcatttcccgacagcggtccttttgtttcagcaaaaaagcttctgtttattactcaccaagaaaatcattgatctgagctacgaggacatctgcgtccaggccatggaccattgctgcttcttccagagattccatctgtgaagacgggcagccaagacaatgcattcctgctctcatcaggattggtgcgatattcgggtctacagtgagcagttctccgatcagcatgctctttgtaacttttaccatgattgtattctcctttactgttttatcgaaatattttcattccgttctgctattataatacgaatccggaatggaatcaacgggttacgaattttcagttttgtttataaatttatacttgtattctttatgcagatatattagaatgggaatagaatccctggtaggggatacatataatacacaatttaaaaggaggatatcaattatggcatatgtaatttctgacgagtgcgttagctgtggaacatgtgagggtgagtgcccgaacgaggctatttctcagggagacgagcattatgtaatcgacgcagacgcttgtgttgactgcggaacatgcgctgaggcctgtccagttggtgctatctctgctgagtaatgcaccatcagcttgataagctgctataatgaatgaggctgccggtttaccggcagccttttctgttttttttattcttttttccctcacaggaagctgccgcttctcttcttgcctgctgctgcctgcggatcgcttcatccagagaacgacaccggtactctccttctttctttctctgcatttcctcacggatcaggcgttccatgatttcctgaaactccagtatcttatcgttatctgctccgcacttctctgtattcccggattccgctttttccatgaactccttttcagatcccgtttttttcattgggatatcttcaagctcaacagcttctccatccaggatcctgataccagattctgaaaaatccggtgtatctgcctttcttgcctccggtgggatcagtgtacggattgctttcaactgaagtcctttacttttcagctcatttattttaagaaaaagctggatatcaaacggtgtataatagcgatgtcccagttcattgcgtccgatccgaagctccagttcttcctcccagtaacgcaggacataagatttcactccggtcagtgttacggcctgtctgactgtatatcttttttccattgtgaacgcccccttatatagagattcactgctgctgtctacagtataacccctgagatcaggaaatagcaagaataatcggttgacataattttaccaaatatgactctttgcctatatccatagcatcccgaactccacgatcacacagacaaaaatacaaaaggccatcaggataactataagctttcatcctgacagcctttcatttaccgtctgcacggctctattttttcatatttacaaactgggtatatctcggcagccataccagctccacagttccgataggaccgtttctctgcttggctatgataatttccgcaatgtctttcttctcggtatctttgtgataataatcatctcgatagataaacatgaccacatccgcatcctgctcaatagctccggactctcgaagatccgaaagcatcggcctgtgatccggtctctgttccactgcacggctaagctgtgataacgcaattaccggtacatcgatctctcttgccaacgctttcagcgatcgtgaaatatctgaaatttcctgctgtctggaatccgattttccacttccgctcatcagctgaagataatcgatcatgatgatccccagattatgctcaagcttatattttctgcatttggaacgaagctccgcaatggagattccaggtgtatcatcaataataagattggagccaccgataatatccgctccttctaccagcttcgtccagtcctcatctttcagatttccggtacggagattctgggaatccacgtgagattccatagcaagaagacggtttaccagctgctccttggacatctccagactgaaaatagccacggtcacatctttacgaaacgccatatactgggcaatattcaatacaaaggcagtttttcccatggaaggtcgagctgcgatcagtacaagatcggacgcgtgcataccggaagtcttataatccagatccacaaatccggtcggaatcccggtaacggagcccttcagcttggaagccttctcaatattgctgactgcattcaacacaacctgctggatcggcacataatcgctgccatttgttctctgcaaaatattaaacagctttttctcggattcctcaagtatggtttccgtactgtccttttccagataacaggcattggcaacttcttccgtagtccgtatcagccgacggagaactgccttttcgcttacgatattggcatagtatttcacattggctgatgtaggaactgctgcgatcagatcacggacatattccatactgctgatgtccggcggaagctctttctccttgagacgattctgcagagtgatcagatctaccggctgtccttcattacagagctccaccatggcatcaaaaatgatgccatattgtttttgataaaaatcatcactggtcaggatctcggaagccaccaggatcgcatcacgatccaggatcatggatccgatcactgactgctctgcctcaatgctgtgaggcagaatcctcttgatcagtgcttcttccattgattacgcctcttttacccagactttgagacttccggttaccttcggatgaagtcgtaccggaacattggtaacacccaggttacggattggattctccagctggagctttttcttatcgatatcaagattcagctgttttttggctgcctctgagatttcttttgaggatacagaaccgaatgttcttccgccttcacctaccttcagagtaaggataacctcctttgtggaaagctcctctgcaaatgccttggcagcgtccaggttttcctgtgcaaccttttcttcatttgccttacggagtttcaggtcattgagattcttggatgtagcttcaacaccaagcttttttggcaggatcatgtttcttgcatatccgtcacttacatttacgatctgtccctttttacccagggatttaacatcttccagaagaattactttcatttctatttgtccccttcctgatataactggtctataatttctttcagcattctttcggtctcatccatggtgtctttcacctgtgcaccggcaatattcagatgtccgccaccgcccatccgttccatcatgacctgtacattcacttcatcaatggctctggcactgatgtaaacctcattattatagctggtaagaacaaaagatgccttgactcctgcgatattgagcagctcattggccgcctgtgctcctacaacggtaggactttccagaccttcactcggacatcttgcaatggcaaaataatctctgtagatctccgcagtacgaactgcctccgctctcgccttataggaatcaatattatcccggagcatcttacgtacacgtgtcacatctgctccgcatctgcgcaggaatgctgctgcctcaaaggtacgcacacccgctcttgttgtaaagttgttggtatcgatcatgatacccgcataaatacagtccgcctcaatactgcgaagtttcagcccgtctgcaaaatactgcaggatctctgcgatcatctcgcagcttgaggatgcatatggctccacataggacagaactgcattctggatcacctcgctgccgcggcggtgatgatccaataccacaatagtctttgtcatatagagaagatcctggcattcggtatagcttggcttgttggtatccaccacaattactaccgtattgttatccaccagttctttggcctgattactgtccacaaacatggacggctcataatccggattctccataaatccactcatcagcggccgaatggatgtggtcggatcattgatcacaatatgcaccggcttaccaagagtcttaccggcacggtaaataccgatcccagctcccagagcatccacatctgtgatcttgtgtcccataaccaccactcgatccttggtgctcataaattccttcagagcctgagccttcactcgtgccttcactcgggttgatttctccatctgctgtgccttgccgccaatgtaggtaatattattttcatttttgatcactacctgatcaccgccacggcccagtgccatctcaatggcaattctggcatattcgtaattctggatatacgtagaagcattcagaccgattccgatacttaatgtcacagccatttcatttccgatgttaaccgtcttaacctcatccaggatatgaaaacgctgttccttcagtgtttccagtgaactctggcgcatgatcagaagatatttatctttctccagtttcttcacaaggccgtcaaagttggaaaaatacttggtgatctttcggtcgatcagtgcgataagcagagatcttctcacatcctccacgctctccagtgcttcttcataattatccagataagccagtgctacaacaagcttgttatcctcatttttctggatgtattccttaagctctgtttcatcataaagatacatggcgatcagactgacattctgggacatattctccagaatatccgcatggctgactacttcacccatagtcacccgctgcatggaaacccgatagatccgatccccgaaatgtatactcatctcggaaatttccggttcatcggctacaggaagcttgtccggagtaatatccgggaaaactgtgctgatattttttttataaaactgatctctccccgtgatctctgaaaaaatacggttggaccagatcatgcggccttccatatccataatggcataaggaagcgccagttcttccagcatccgcttttctaccacatcatactgattggcaaatgcgatcatatcattgatgatcagcggtttgtgatatcgaaaaagctgtactgcgataaaaatatagatcacagtacctacagacaccagaattccggcctttacacttacaataaacaccagcaggtccagcagcacgaccaggaccgaaaggtacagcggccagcgcatgaagtgtttcataggccccttgaatttaactttgttgttcattgctttttcctgttcttaatgtaatttaacccacaagttatttaacattataccagattccttattataattccatagcaatgataaaatctgttttcctcataaaaaaaacagggccgctgcctccagatgactgctcatctgtttcgcaacgaccccgtataagatcagaattagtcctgaacgtatggcatcagggacatatgacgtgctctcttaacagcaactgtcagtgctctctgatgtttcgcacagttacctgtaattcttctcgggagaattttacctctctcggaaacatactttcttaactttgctacatccttgtaatcgatctcgttattctctttaccgcagaatacacaaactttttttcttctgcgtccgcctcttctcttcatcggagaatctggtctctcgcctctattgtaagccatgattgtttcctcctatcttattcgtctcatctgtcttgatcagatgttctaattgaacggcagctcctcatcaattccatctggaatgttcatgaagccgtcggcgcttgctgcgctcggactcggcatagacgttgcaggtgctgcctctgttctcggatgagctgctgcatagctgtcgcttgatgctttgctctcagcaaattcctgatcctcaacaacaacctctgtcgtataaaccttctgtccctcacggttcgtatagcttcctgtctggatacgtcccgtaactgcaattttcagtccctgtctgaaatacttttccgcaaattctgctgtacgtccgaaagaaacacagctgataaaatcagcacttgcctctccgtcacgacggaatctgcgatcaactgccagtgtatatctggcgattgccagggcattttctcctgcggaatatcttacctcaggatctcttgtcaagcgtcccattaatattactttgttcatcgttctacctctcttatgatttcacttaactgaacaggttcttaatggtgttttcgaaaaatccgctgcaaaaattatgcctctttcttgacaaccaggtatcttaatacattgtccatgatgcggacatgtctctcgatctccgccgggcactgagaatctgcttcaaactgaataaaatagtagaagccttcatgcattttctgaatctcgtaagctaatttcttcttaccccattcttcaacttctgtgatcacgccgttgtaacgtgtgatgtagccttttgctttctcaactacagcgtcacgtgcttcgtcctcaagcttagcgctcacaactaatgctaactcgtacttgttcatgcttgtcttaacctccttatggtcttttggccctttgcctgtcaaagagcaaggatatgaaatatatcacgattgttgattctagcacatctctcccgtgatgtaaagcataaatttaatttttttcaatttttttcaaatctcgtgtatttttctcaaccagcttacgtgccaccatgatctgatgtccgcagcccttgcatttcaggcggaaatccgctcctacgcgaaggatctcccattctttactgccacagggatgagccttcttcagtgtgacaatatctccaacttcataatttaatcccatttgatactcctcatttttatttttgcagatcatcccaggttcccatattttcaaactcttatctgagaaaacacctgcccgatcggttctttaataagaagatccgcatatttatccctcggtgtcggtgccttattgatcaccaccagatgatttccccggaaataatcgatcaggcctgctgccggatataccgccagagaagttcccccaatgatcagcacctccgcctccgagatcactcttactgattcctggatcgtatagtcatccagcccttcctcataaaggaccacatccggcttgatcatgccgccgcagctacaccgcggaacacctttcgattccttcatatatttaaaatcatagaatttcccgcatttcatacaatgatttcggtaaacgcttccgtggagctccaggacctttttacttcctgccatctggtgaagattatcgatattctgagtgatcacagccttcagctttcctgtttgctccatctccgccagcttaagatgtgccgcattcggttttgcagtatcacaaagcatcttatctctgtaaaatttaaagaattcctcaggttttcgcataaaaaatgtatggcttaagatcgtctccggcgggtaatcatatttctggttatacagtccgtcctggcttcgaaaatccgggatcccgctttctgttgaaacacctgcgccgccgaaaaatacaatatttctgctctcatcaatgatcttttgtaatttttctatctcatttcccatatcatttcctcccaaacttatccgcaaaagctctactgtgggttcaccgcattcactctttttccctgtaccacaaaacgtgttgcctgattgccggtacaggttgataatgtaacgatcttatccttcacattggcttcacttgcagtggcatctgttctgatctccgaattctggaacatttttttctcatattccagaaactctttgccaggtcctttaaataaggtatacgtatcgctgtttacagaagtcgtatacgctgcaatgatctcataccggtaatctttttccggtgtgaggatccagaaatatttgctggtattataaagcgtctcatccgctctgtactttttcagcattccaaacatggaaccattcttcatgttgtgtccgtacaccagggtattacaatcgctgaaatctcttttgttctcataatcaataaagatcgttcccgcaaaattataatttttctcatatgtctggtgcagataaaaattattatcctctccctgtaccaccggataactgatctcaggcaatgcttccatatagatccagccgatcacatcctcattgatactcctgagagaatcaaaatcaatgctcacaggtgctacaggctgttcatccggctgatctatctcttccacctggtccggatcacgttctgtcactgccatttcggaaatgctgttatattcatcggttccttttttatattctgtataaatatgataaaggttaaaagctgcataacagaaaatacagattgccacgatcagaacgatcgtcagaatatgatctccaactgtttttttctttttcaccttgttttttctgctcataatcacactcctttaaatctgtcaggatcatctggtttctgtatttattataaatatccctccgttttcttgcaaccgttttgtttttgtcctgttttatacagaaagaagccgcctcggaatgggcatccgaagcggcttgtaaggtatattctatttcagagctgctgttatttttcaggccagttcttttcctgtaagcattttatatgcctggagatatttctcaatagtcttgtcgacgatctcctgcggaagtgtccagtcgttgtccggattgactttcagccagtcacgtgcaaactgtttgtcaaaggatggctgaccatgtcctggttcatagccttctgccggccagaaacgggagctgtccggtgtcagcatctcatcaccgatgaccatgtttccgtcctcatcaagaccaaactcgaattttgtatctgcaatgatgattcccttgctgagtgcatactctgcacattttttgtaaagagcaatggtgttgtcacgaagcttttctgcatactcgcgtccttttcctgggaagtatttctcaagatgatcgatactctgctcaaaggaaatattctcatcgtgatcaccgatctcagccttggtagatggtgtgtagatcggctcaggcagcttgtcggattccttcagtccctccggaagcttgatgccgcatacagtgccattctccttgtagcttgcccagccacttcctgtgatgtatccacgtacgatacactcgatcggcagcatgttcagtttacggcacatcatggattttccttcgaatttctcctgctggaaaaactccggcatatccttggtatctacagagatcatgtggttcggaagaatgtcctcagtcatgtcaaaccagaatttggacatctgggtcagtacagcacctttctttgtaacttcgttattcagaattacgtcaaagcagctgatacggtctgttgcaaccatgatcagactgtctccattgtcatagatctcacgtactttaccttctttgattggttttaattcctgcatgttctcacacctcatcattcggttatttgatttttgttttcgacaccgttaccgtatcacctcacaagccctcctgtcaagatgtcaagcccctttcagtcataagtattcgttaagggatcattcatatttctaatagcgacgcacattcctcctgaagctttttctcctgcttccggtaaagaagcttctcactgcaggcaaaataaggatcacaaccatactctcggataaaggccgccgcatgactgttccgggtcaatccggtgacaaaaagcaccgtttcctgtccgtccccgaagcattccttcataaatgtaaatgcctgttccagctccccgctgatctttttcgcacaggcttttctcttctccgccatttccgtaaaaagctgccggatccgttcaaagccagcctctgtttctgtgatatgctcctttcggatagtaaggctgaattcctccagagtgcggatcacaaactcttccgtagtctgctgatctgcggtaagaagctccgcctccagacggacagccagacttttcttcttcatatctgtaaattcatccagcgctgtcatgtcctttttatcctgaagaaaagctttcagatgcaaaagttcctgataaacagcacctgtctcaccatccatcttctcataggtcagaaaacttccgttcagaccgtcaagcagaagccctgtcacaaggaagcgttcctcaaaggaagcatccttcgccatttttacctttttctgctgttcctcctccggcatctctccggaaagcagacgttccaggccatagtcctctccgtacttccggtacagctgatagctggcaaaaaagcttcttgcgatctcctctctgcataaatactccccgaccagattctctgtgatctccacgcccagctcctcataagccttcaggatctcagacaggtcttcccagcctcttgctgtcacgaagaatttcccgtccactgtattctccacagaataaaaatgatcctttttcatgccgagataagccaggatcgatccgtggatctcctttttccaggcatactccatccatacctcaagatctgcctcgatatccatcctccgcacacggtccagtgttacaatatcaaactcccggaccgatttattatattccggaggatttcctgctgccgcgatcagccatccttccggcacactgtggcttccgaaggtcttgttctgaaggaactgcagcatggtaggcgcaagtgtctcggagacacagttgatctcatcgataaacaggattccctccttctttccggtacgttccatacaatcgtacacagaagcaatgatctcgcttaaggtatactctgtgatgctgacctcttttccgttgtagcaccgggtcacgatccttggcagtcctaccgcactctgtcttgtatgatgggtaatggtataggctaccagacctacattacattcctctgccacctgctccatgatcgctgttttcccgattccgggaggccccataagcaggatgggacgctgccggagtttgggaaatgtatagcgcccggctgcatccttccggttgtaagccagtaaggtatgtttgatctcttcttttgcctcttttatgttcatgttctgtaacgcactccttcctgctctgccacaagccggatcgcccagggcggaacaagctccattttttctgttttatgtaaaaatacaaaggccgtttcataatccggtttgcttccgggatatatcccgtccccgtctgtaaaatagatcagagccttaagactgcggatttcttttttctcctgctgctccttcacataccggaacaccggccggaaatctgttccgccccggccctgtatggtgatatttttgctgtattccttccattcttcctcggaatggatcaccttaacatcctggatacagcagtcacactggatcaggtacaccttcattttatggaaaaaattctctttttcactgagaatggaatacgtttctccaaggaatctccgcacagtctctccgtcacaggagccggaagtatcaatggcgatcaccagctcctccagacggttcacttccttatattccagcggctcgatcagcggaagatttccataatgctccatcccgtaattataaaaaatataatcaaagctttccgtatccagctccacctcttcccgcagcacagaaaactgacggagaaactttttgtaatcgtaccttccggatcttaccgttcctgcctcttccttctggtcccctttctgacttccccgccgtttccggtgatcctgacggtttgcggcagtataggaaagaagcttgttccatttttcctttgttctttttcctttttctcctgtgcagatatcccacagggtgtggtcatcaaaatgaaaggcttcctccagttcttctaggtgaaacggaaaagcctgttccttcagcttccggcatatcttttctgcggaatccgacctgtctcccagaatatgaaaaaccttttcacggatttttttcgcatcgccgcctgtctccagaatcgggatcttttccctggaaatgatctgttccaccgcaatatcacaggccaggttccataagcgtctgtcctcctgatcctcccgaaaaaggtgcagatacagacagtgcagcagcatatgcagataacctcttcgcactgcctccggcttttttacataaagcttcagaagatattccggggaaaaaagaaaaaaagctccatctgttccaatggttctggtctgctctgagcccttcccggaaatgcaggcaaaagcaccgtccagatatggaaaatagtagtacagttcgttccttatgttttccaggatatgtattccaagctcttcctgcctccgttccaccgaatccgcctccattcccgatttcctgaaaaaatcacagctcgaatttcttctctttaaatccataatttgcttttttcaaatggagaagtcccatcagcgctgcaggtctcctccactcttcggccagtttcaggaacacttccagttcctgttccccaaaccattcgttctcataaagcttctcgatcttttcccagtcatcttccaggatcagacgttccacagccggacggatccttttcttaagatatgctccataatgcgcgcgttcctcttcctccacaccttcctccagaaaatatccccgcagggcaactgccagccgcagcggctcctgcttggtacttccgaatttccggtaaagatgaatggcctcttctttggcatcctcgttctctgcccgcatttcaagagcagtggcagcaacttccacatctttttgaaaacggcttaattctgtcataatgatccctcctgtctgctgtctgtttatagtgttcgaggaaatgcttttgtatgacattatcatatcacgtaccgctttgtttgaacattattttttgttaaaaaagaaaccgccattgccttttcacgacaatgacggtctgaagatttttctcagattccctttttataaagaataaatgaatagatcattggcacaaggatgaccagcaaaattaccgcaaaaacaatttccgttttcaggagcagcgaattcataagaaaaagcagccctgacaggatcagtatccagcctgtcatacggttggtacggttccagttctcctcgctgttcaaggtccagggaagctttattcccactgtataattctgtttcaccttatgaacgtaatttccgagaatgataaacatgatccccaccatgatattcacgatcacacctatatcaatgtccatacccagagcaagaccatagattgacatgcaggtgatcacagacaccaccggaaccatccacagggccatggtaaaaatacgcctgttgatattttttcgctttggatcattggctgtaaaaaacacgccaaacagatggatcagcaaaagcagaaatggaattccaaaaactgccatcggcttgctgctccagccgttggccacattgtgctgatcaaaatgtgttgcgatcttctccggcagacggttccacagcaggatccctgccagtgacggtgagatcgtaaggatactcccggagatcagggacattttatattccttcagaaactcttttctttcttcacctttcatcattctttccccctttcagatcactgagccacagaagcagctcctctacaactgtggtattcagttcgtaatacacgaaattcttcaccttcgtctcccacacaagatctgctttcttcaaaattttcagatgataggatatggttgcacctgtcatgtcaaaatgtcctccgatctcaccggctgacattttcccgtttttcagaagctgcaggatttctctccgcacaggatccgaaagtgccttgaaggtttccgcaaacgccatcgtgtatgtcttcctcctttcggatagtatttagaaatatttctaaatagaatatatcattttcggatttcccagtcaataagtatttagatttttttctaaatacttacatttgtcatctataaaaaaatgaggataccgaccatcgcctctgcgaccttacgatatcctcattcaccatcgatcaaccattatttattttttcccctcttttctctgtatatactattatattactatgatataaccatttgcatagagtaatttttttataaaaaaggtgatttttttagatgttatcttctcctatttctgttacaatataaaaaaacaacacccaggaggtatcagaatgtcaaaaaagaaccttatcgcaggacaatccggcggaccgaccgcagctatcaacagcagtctttacggtgtggtatctgaagcacttaaacatacagaggagatcgaccatgtttatggtatggtcaacggcattgagggatttttaaacggaacagtccttgatttccaggaagcacttccgggagagcagcttctcgctcttacctggacacccggcgcctatctcggctcctgccgttacaagcttccggaatccctggaggatccggtttatccgaagctttttcagaaattcgaggagatgaatatcggctggttcttttatatcggcggcaacgattccatggataccgtcagcaagctttcccgctatgctgaaaagatcggcagcgacatccgtatcctcggtgagccgaagaccattgataacgatcttgtaaacaccgaccatactcccggattcggaagtgctgcccgctacgtagcctccaccgtccgtgagatcaccctggacgcctgtgtctatgagaaaaaatccgtcactatcatcgagatcatgggacgtcacgctggctggctcaccggagctgctgcccttgcccggaaatacgttggagacaatccgcttctcatttatcttccggaaaccgatttcgatgtagaagaatttctccagaaagttcatgctgccttcgagaaaaactgcaacgtcgtagtctgtgtatctgagggaatccatgataaagacggcactttcatctgcgaatacgacagcgctgccggaaccgacgccttcggtcacaagatgcttgctggctgcggtaaatatcttgagaatcttgtacgcagccgtcttggcgtcaaagcccgctccgtagagctcaatgtaagccagcgctgctctgcagctatgctcgccggaacagaccagcaagaaggcatcctcgccggtgaatttggtgtacaggctgccctgaacggcgaaaccggaaagatgatcgcatttaaacgtcagagtgattctccgtactccatgaaatgtacactggaggatgtcaacgttatctgcaacgaagaaaagacggtccctgtggaatggatcacagaagacggctcagatgtcaccgaagactttatccgctatgcccgcccgctgatccagggaactgtaaatgttccggttggtgaggatggactgccggcgttcgtgtatcggaaataagatttgtggtaatgcggataaaaatatccacatttgctgcgtaactctgtcctgagtaactgtttatccgtcattcaataaaaaatgcaccgggaatttcctaatagttcccgatgcattttctttatttctctatatatatttttcttttttatttcttactgcggtatgcttctgcttcccagtgtgtgataaaatatgtgatctcatcggtcatctgcagcgggccgccaaagctctctgcatacactgcaagcttgatcgcatcctttaccagaagctgtgcctttgctgcctttcctttgtcatcttccatgataaatgcaccaacgccctgtaccaagatcagtcttggctctttatcatgctctgccataaatgcatccatcgcatttttcgcctcatcaatattttctacaaataacggataaggtccgcaatatacaatatgatccggagtaaaaggcttcagaagaggtgccgcagcagttttatcttttacaaaattatccgcctccgcagccggtacgacttccaccgcatgtccgagcagactggaaagcttctgtgctgcctgctctttttcaggtgtaactgcatcacttacatctgcagttctctttacctgcttttccagctttccgatcacaccatcgaataaaacgccaatctcctctacagtatcagccgcaacaaaaattccgtgattctgaagtagaagaacctgcacgtcttttcctgtttcttctttataggcattcattttctcgaagcagatacgggcaagtgtgtatcccggtttgcagatatcgatccagagtacatcttttccaagaagctcttcgcaaagagcctttgcgccctttccgcaggtcagtccattgataagtgtcggatgaacatgcaggacatacgtataagcaaacagattgtggagcagtgcttccacgctgggacgtttggttttatcctcatcggtcactgccgccattacatctgcaagatatgcagattcacgcttcacatcatccgccggatattccgttttcatgatctcattcagacgggctctgtccattttgacaaattcctctgccttaatggtagcaagctgtgtaccggatccctttacatacagtgttgtatcgtcttttacagaagtattaccgcctcctgccagaacataggccggattgcttccgtaagtgtttgacatttttaccaaagttgaaagctccataagtaaaattcctccctgttgtgtcattatatgatttttccatatatttatagtacacgatacaaagtgaattatctatatgaatattttttccaaaattagtactttcgtatcctttttttatttttccaaatgtaatatctatgcatcttgtgcatctactctttccaaaggaaatgatctgtttctgcttttcatattttttccaattctcatcatctcacgtcagcagttcaaaggtatgatacagatccaccttcccatacccccactccgggtttgggtactgcatgttttcttctcttcttgcgcctctctgcagataatatttcacgctgctcccggtaaaaaacggctggttatcccgtatgatcgcccattcaaacagaagtgccgcgatgccggcggtctgtgcggcggatatactggtcccggagcgggttccaaagccgcctcgtaccagcggcacttttacgttaacgccaggagctgccagatgtggagttatcatgccatctggcgtatagcctctgcctgctgcaatgtagatgcttccgtcacgatgctggtaggcagttgtcgtaatgctgttcctggcgtctcccggcgctgtcaccgtggtatagggggatggttccagaaaataggtatcctgggagatcagtccttccacaggaagccatatatggaactgtacgttctgtcgatttcttgcctgggtaaaaattttccagataccggacgccggatggaaaaatcggatatacaccagggaatatccggtctgacgctcgatcaagatataattcacatacacctttgtttccacaaaaacaaatgacagctcctgggttctggaacctatggaactgctgacttccagtatctcaccggttggtgactggatggaaagctcatagatttccggcggttctccccagaattctatggtaaagccctgctctctttccgctacacggagttctgtcacgatctgttcccttccctgagaaaaaatccccgtactgtggtttcttgtatttccttcgtttcctgctgccacagatacggatacctgagaaaaatttgccacatagtccacatactggcttaacgcattggtccccagatgcgcgccctggctgcttccgatccccaggcagatagaaagtggcatcttcagctttttggcctgggaaatcgcaaaagcaatggccatcatcacatcattttcctgaaaagcttctgcctccggaggataaagataaaaattccggagatattgctttgccggctttaccttgatgatgatcagggttgcctccggcgctgctccggtaaaattttctccgggtaccatatttccggcagcaatacccgccagtgccgtgccatggccgttggtatctctggatggcacgatggcaaacggctcctcggaagccagtgcccggtcgatatcctttttccggaataatttgccatatggaacttctgtatctgctatatcatcccccggcaaattatctgcatctccattttcagcttccaactcccgtccagactgattttgttcttcctcttctatggactgatcccataaataagcgattctggagccgcctgcatttcgaaacacttcattctgataatcaatccccgaatcgatcaccgccaccgcagtaccttttccacgcagcttcagataagggtgatcgtgcagcctgttgatccctgattcccctgctgcctccatatccatgtaggtataacatttcgggatcgaattataggaggttcccgtgacctcaatttctcccatactttccagcggaacataaagaaccccgaaaatttcattgatcgcccgaaaagatgcccccggaaaaagttccatagtatcctggacattctgcatatatttcacgataaaatccccgaagcgctgactctgtgccggattttccgtctgcgctccggggatcttatcctctgttttcatatttggttcaaaatcttcttttctgagcatgacaggcctgctttcgcctttttcatagatgtatgcagcgaaaacctgtccttataccactattgtccaactttttcctgatacatgggacttccctgatccatttaaacactgctcttgctatctctttttttcctgatcaatatcagcagcacgatccccgcaatccctgtaaaaatactgataaactgggaagtcgacaaaattcccacacttccacggataatatccccacggaaaaactcgatcacaaaccgtccaatgctataaaagatcagataacaggcagtaacctgaccatcttcttttttgttccgtgcgatcagcaacaacaaaagaaaatgcagaaaatccagtccgctggaatacaactgcgtcgggatcagcgccacgtgattgggcgcatattcggaattctgaaatatcacagaaaaaacactctctgtctcttttccataacagcagcccgccaggaaacatccgatccgtccaaatccctgggccagtgccacagatggcaggatcacatccgcgtatttaaaaaatacaagctttctgatcctgcaatacagaagccccgtcagtatcccgccgatgataccgccaaacaccacaaaaccggagcttaaagtttccattataaatcccggatcctgaacaattgatttccactctgtgatccagaagagaagctttgcacagaaaaatccacccaccaggcaccacaggatcattggaaagatctgttcactgtcaagcttctgttttccggctctatattctgcagtcaggcagcctgccaaaattccaatggcgatcatcagaccataaccgtataccgtaaatggcccgatggtaagaagttcatttttcatcggtttcctcctgttatctcattcttatttccgtcatgatcttcgctcccgtatgcggacagaaaacactccagcaatgcagcattggcccggtcattcaaggcgctgtttccagattctgctacatcacattcaccacagatatccacgcccaggattccctctgcacatatttctctgactctcttcagacattccagcatcgtattcaggcgcatatccccctggctccagttcgtgtccgcatcatccttgcagagaacatctttatccacagaaatgtacagcggcagctttcccacatgcttgcttacaaacgcacacacctgcgcctcttccatttccagaagcttctctctgctcaagaattccaccttttcctgaatctccgattccactctggaaaaagcttcctcatccgggccgatcaggatcacccttttaagcaatggaagttccataacagaatcgtagatccatcctccgcaggaaagcagacctccgaatgccggcggctgcatatccgtgtgattgtcaaatacaagaagcgagaaaggctccgatatcttttccagccagattcttgtcatatagtgatagtttccggaatcaataaaatggatccctccggaagaataaggggcaatacggctgcgaatggcattcatcgcatcctcatcacagtagcagttggttccgggaatgtccctggcctccacccgggatacttcttttcccctccagaactgctgatcctcatatattccggaaaaatccatcatcagtatctttatatttttatctgtatttttcatgtgcacatcttaccacggaatggcagatgatgcaagagaagggtcagtccttccactcttccagttcttcatcggaaccgtccagaagatccttcaggctgccggtttccgcctggtctttgcctacagcccagagcttcatctccacattctccggttctttttcccatcgggaattcttctgcttttgctcttcttccggttctgtggattcttctgtctcttttctgtccgcagaatatccgtctgcatcctgcgccggcatagccgctgtagtctctgctgtagtttctgttggatattctgtttccttcccactctgctgctcactcggcgcgttttcatcctgggttcttgtatcatttggcacatccatatctgccgtttcatttacagcatctgcactgtctgcaccagaatcttccttctctgtctccgccttttttgcgatctttcgaagccccagcttcataataatatagaatacgatatccgcagctccgtcacacaccagcacccagccggaaaagatcagcagagtcatgatcttcggaaatcttccaaacagcatcacgattccaagtgcaatgaaaacaagacttccgatcagaagtacgctccatgcgccgtttcctccttttttcagaaggaaggctcctttaaacttccacagactgtcaaccagtacaaatgcgctgagcatccatggaagcagtttgatcacgatggacggtgtcataaaaagaaacacacccagcacaaaaacaaccacaccacttagaagatccatgatcgtagctttcgcttttccacgtatgtaaatatagatatgataaatgccagctccgatgaggatcagcccgaatactactttgcagatcacgtccaccgtctgcgtggggatcaggatcaggcaaagtcccagcagtatataaaatactgaggagatgatctcaccctttagaatgttgttgattttttcacccatgttccttcatacctcctctgttattccaacagtatagctcttttccactggtcagtccaccctgaaacgtcaaaaaaatttcttttttccagaaaaatattcttataattcaatacagcccgaaggacttttccggcgtcatttcgccttgttccttcgggctgtattttactttttatgtttcttcttttttgtcataagaccaccgatccgtccggtttcttttgcagaaaggcttttccacccgtctttgatcactttatccagaactcccatctcatcggcaatctcgtatttcagtttttccgcctgggaaagctttccctcaagatatgcttttacttctttctccctgttcatcttccacactcctcatcttttttatggagtatggacaatttccggataaattatgcattctgaaaaatatgtctgtcctttatgggtactgtcatttttaatccgggataatgatcgccgcaatgatatacgccaggattccggctccgcccatcagcgtgatgatcacccataccagccggacaagagtcggatcgatattaaagtattccgcaattccgccgcagacaccacataacatacggtttactgatgatttgtatagttttttgttactcataatgcttcctcctttaatcttcttcaaattcaacctgaacgtttcccattccgcaatccagttttatatttttcgtggcaccttcatttgtgatctgtttatttccggaagtaatggatgtttccagagaatcatccacctccagatttccaagaccacatttcagctcataattatactcagcagcttttcctgtaagtgtaagctccatatctcccataccacagcttccttttaaattctccacctgaagttcactgatgtcagcagttcccactccgactgtaaaatctgcttcctttatatccaggctgctggaattttcaatggttccggcccccacatttacttccatctgctccgctttaaaatcaccatccagttcgatggttccggctcccatctgaagctttatcttctgaaagcttaagttttccgggcaaaaaatttctatggaacggtttctcactttttgattgcttgcaattctcagactaccgttgtcattgctgatctgaatgcgattgtgatccttccctgaaactttcacctgaactttatcctcattccatgttttcaaaaccagttcttcgtatctcagatcacagaaaaggtctgacacagccgaggcctcatatactttcgtatatgcggaactgtctgcactgtctgccagaacgcccttctcagttaccgcgctctctgcagctgcctgaaaatcgtcctcctgctcatccatatcttcctcggaatcttccacttcccagctgtcttcatgatccagaacacgaagcacctgcgtgattccatgatccagaacactcacatctcccatagtcgctcccatggcagctccgccggcagtaagtcccaggcctgctacaccgaatactgctgcaaggatcagaattaccttcagaaaacgtttcatactttttccgcctttcttccattcaggagattgctgcagaatcccgtaaatttccgcaggatcgccggcagtatcttacctgtaaaccacactgtcagtaacagtaacaaaagtccaagtgccatcatcaggcatccgataccgatcgtcaggatcccggccggcggaagagacaccgtcatggcaatcccaacaacaatgcacgtagctgcaccgatcacaaggatgatcgatcccgctcctgcaaaaaatgtcagcaggaaaggcagcaatgccagtgtcaccaaaatccccagtactccgccaaataatccttttatcagaggagccgcaaaaacaagaacgatcagcgcaaaaatgatcactgccttattctgctttttctctgcgtgatagccgcgctgggcacgtcttttcctgcggtcttcgaaattttctgtatttcccgtatcacgatgggcctctccctgtctatttccgtatacggttacttctgtataatggtccggcatttccccgttctctttcacacgggtatcctgatatccgttctctgtgtattccccgtaatcttcactgttctcctgaagatctgccttaatgatcgcagcaaccttccccggatttcccagttcccggatcacttctccttcattctcaggacctgcgtcatcaaaatatccttcataatattccagtgcttcctgtctctctgcctctgaaatatcggaaagcagccgttcaagctgttccataaactgctttctgttcataatcaaactccctcctcaaacatcctggtgatcttggatgaatagatctcccattcacttctgtaaagattcagctgcgctgcgcccttatctgtcagcttataatatttccggtttctgcctgcatattccatattgtaggcttccaggcattcatccttctgaagcctgcgaaggaccggatacagcgtagattctgaaacctccagaacacttcgcacatcctgggtgatcttgtacccgtaggtaccgtccttctctctggaaataacagccaggacgatcgcatccaggagggctgctcctgtattaaataccatctgctcacctctctatgacctgtaaaacggacattcacattccgtcttactacatgctgatgaacgcgatcacttcacgatccaacgctcacatgataagtcatgtaatattgttctgtgaataatactatatatcgtataatatagttttgtcaatagtatttagaaaaatccctctatactttataatatttttcggaaaccactcttttcacacaatatccgagagagtcaagtttatattatggaggaaattatgacagattcagataaaatacagacattaccgcttccttttctggagcgtatgaaagaaatgctgggaaatgattatgatgccttcctgaaaagctacaaaaatccccgcacctacggtctacgtgtaaacaccgccaagctctcctgccaggattttcaggcgctttcccctttccctatccggccgatcccgtggatcaataccggatacttctacgaggaggaaagccgccctgcacgatgtccttactaccaggcgggcctttattatctccaggaaccaagtgccatgacaccagcttccaggcttcctatcgaacctggagattttgtcctggatctctgcgcagctcccggaggaaaagccactgccctgggtgcagccttaaatgacaccggatttctccttgccaacgatatcagtacttccagagccagagcccttcttaggaatctggagctttttggcatgaaaaatatgctcgtcaccgacgaaaagcccgccaaacttgcccagcgttttcctgctttctttaataagatccttctggacgctccatgctccggggaaggcatgttccgaaaagaggaagcccttgcccgcgactggacaccggaaaaatccgcagagctttctgatatccagaaagacctggtcttaaaagctgccgatatgctccgtccgggcggaatgctgctttattccacctgcactttttccccatgtgaagacgaagaagtggcagcctatcttctcagacaacgcccggatatggaacttatggaaatgccaggatatgaaggcttctccggcggccgaccggaatatgccggcacagcagacacttccgattccgaaattgcattaaacttaaatacatttaatccggaagaacttcaaaaatgcgtccgaatctttccacacaaaatggatggtgaaggccattttctcgccctgttccgcaaaaaaggcgactctcttccacctgttttccgcttttccgcaaaaggaccggacaaaaacacccggaaatggctggaggaatttttctctgagatcggcctgaaaaccatcggcggtcaggaatttgactggaaccgtgtggaagtccgcaaagataaagtatactatcagctgcccttcccgctggatctccgaggaatctcctttcttcgaaacggcctctatctgggtgatctgaagaaaaaccgttttgagccgtctcaacctctggcgctggctcttcacaaaggagatgtggaagcagttatctccctgccggtttccgacgagcggcttacccgttatctgaaaggcgaaactcttatgatcgagccggaagaggccgcacacaaaaaaggctggcatcttctctgcgtggacggttatcctctcggcttcggaaagcttgtaaacgggatcctgaaaaacaaatatcctgcaggctggagagtataacctctccgccgcaggatatctgcccacattaacatatcttttcattttcagttcagagactgaacgcttctccaagagtaaacgaataaatataccgttccttcaccttccggcctgtcatccgttccaatgcctgggcgtaatcctccagctgtacatgataacggtcgatcagcttcttttcttctccacgtctcacaaagtccgttttatagtccaccagaacgatttcttcatcctctataaaatacgcatcaatgattccctgtaccagaacattttcctcacactgccactgcggatcaagctccgaagcttttcttgcgatcacaaaaggctgctccctgaacagaagtctcttctctgaagctgctttcatccgctgtccgagaggtgtttccacaaaattccagatatcttttacccggaccgactcagcctcttttctttccatcttcctggcgtcaacccattctctcagctgtctgcggatctcatccctgtttgctgtcttctgatagtccaggcattccattacacgatgataagccgttccacgaagtgcccctgtatatccctcctctttcttctcctcgataaatcggggaaccagcggctggatctcttcttccgtctcataatccaccgtttcttccagatcctgctcactgtggtagcttcgctttttcagttctgatacactgaccttcacaggaagatcttccagatattgatatggatatacaaaagaaaaacgtctctggatctcctcccggatctcactgtcaaaaactctgcccggattccagttctccagcgtttccttcttcatttcccgctccgcctgttccataatctcactttctgtcagttcccgtgctgtgacccttgtaactatgaattctgccggatctttgtacagaggatttgcggtattcataaagatgccatattcatgaaataatggtgccatgcagcgatgtcttaccagtgccggaagcacataatcccagtaagtctttccgcaaagccttcttcccagagaaagcaatggttcctcactgtcccttaatgcggacaattcctccaattccggacgcaaggctccaatagttccactgaggatcagtttttcctttgcacgtgtaagcgctacataaagtaccctcagctcctctccgaggctttccatcaggagcgttctccgtatgatctgcttgcacaaggatggagcgatgatcctcttctccggcaggatcgcatccgcaccgatccccagctccggatggatcaggatacttgcgttcatatcccggaaattaaagcgttttcccattcctgctgcaaacactaccggaaactccagtcccttactcttgtggatcgtcatgatctgtaccgcactttccccggttccggaaagatttacctccccgtaatccacctgatactgctgaagcttctggatatatcttacaaaattaaaaaggcctcgatagcttgtcttctcatattccattgctttttccacaagcatgttcaggtttgcattcctctgttcaccatttggcattgcctttgcatggtctccatatccggtacgtgcaagtacctccaggatcagctgatggaccggcgtgtaagccgccttgtcacgaagtgcattcatagtgtccataaaacaggacagcttctccccgaggatttttttgttttcctcaaagctcccatgctctctgtaatcctccacaaacctgcacacacattcatagatcattccttccggatatgcgatccggagctcagccagctcttctgtggtacatccaacgatcggtgaacgcagtacgccggtcatgggaatatcctgcagcggattgtccaggatccggagataattcagcagtgtcacaacctctgttgcagaaaaatatccggttctggatgccgtatataccggtatccctcttgcactcaatacctccccaaaggtttctgcccagcctgaagcagaccggagcagaatcacgatatctccatattgaagaggtcgatactctccagtttccttatccagcacccgttcatgccctaccatagatcggatccttcctgcaatggcaagggcctccagctctctctcattctccgctacttcttcatccttctcttccagcagaggactgtatttatccacaaggaggatctctgtttttacaaattcctgatcctggccttccggaaaagaagctccgggatacagcgctgccgcctcgtcgtaggcaattcctcccagatcttcccccatgatctgccggaaaataaagttgacactttcaaggacttccggtctgcttcggaaatttttgtgcaggtcgatccgctgttcctgactgtcttccagcgaatagctcttatatttttccatgaacagttccggacgggccagacgaaaacggtagatgctctgctttacatctcctaccataaagatatttttacgttcattgacccagccggaaactgtctgcatcaggatctcctggaccagattactgtcctgatactcatccagcagaacctcatcatatttttcagaaagctctcttgccgcctggctgggcacatagttttctccttcctttttcagaaggatatccagggcaaaatgttccatatccgaaaaatccagaacatttttttcacgcttctttgcctggaaacgctctgcaaaatcctttgtcagcttcaccagcatctccagcggtggtgcagatgcttctgtcagttccgtcagctcatccagatttccgtaaaaatatcggattcccagttccttcaaattgtcttttgcatcttcgcgaagagcttttaccagatttttcagctgctccgataccccctccattttttttgaggaaagtcttgcaaacttcagatcccggagattctgtgccatctcatcatagtcccttttaacggacagttgcttcaactgcaggatcagcatcatatctttttccagagcctccagataaagctccggtccatcctggagctgacaggtcttcattgcggtttctgtaagctcttccgcttctttcagtgcacagtctgcagcctcccacagatatcggaaccatctcgttccctcaagacctttttccggatccagatgataattctccacacagctgtccagccatttttcgggccatggattactcatcgcagcattataaagctccagcacatgttccttcagcccttcatccgtttttcctggcgcatagcattccacaaatgcagtaaaatctgcctttctttctgcataatgatcctcaaaaagctccttcagcacatcttcctgcaaaagcttcagttcaccctcatctgccgtccggtaacccggatccagtccgatcagatgaaaataatttcggatcacataggcgcaaaagccgtcaatggtagtgatctgtgccgtatggatcagcgtcatctgtctctgcagatgctcattatccggatcttcagccagtgcctgatccagtccacgttcgatacgttcccgcatctctcccgctgccgcccttgtaaatgtcatgatcagaagacggtcaatgtccaccggtttcaaagggtccatgatcttacttaagatcctctgcaccagcactgcagttttaccggaaccggctgctgcgctgaccagaatattccggtcccggagcgtgatgacctttttctgctcctcagtccatttcactgccattctcttcctctcccttcatgatctttttccacagtgcatcttctccgatggacgacattctgtgaaactcatatcccggtatcttcctgtcaaagccgcacacagtaagatacggacagtatgtgcaggcattctttttttcaagttcatagggttccactgccgcatttccatccaggattgattccctgatgtcacagatctttctccgcacatacgctcccagcgcatcaaactgcttcctggatgcaacagaagatcttttgctgaagcttccgtcccggttcagggacaccggtatggaggccatagtgctgtcgattttggtactcatattatcatctgcctgtacaagcccgttcattttcattttcttcagcatctgctcattgatgctttccatatccgcatggattttctcctgtatcataggatccttcacattgtaataaaacacacctgccggaacgatctcgcgatccggatactttcttttttccacctgtaacgcaccatccagatagaccatcagctgaagctgaaggccatgatacaacgccagcagatcaaacgaagtatttccggttttataatcgatcaccttcacatagacccgattgttctccggttcttccatgatatccacgcggtcgatccttccgccctgaaacctcacctcaaatccttccggccggaatgctccatgcttcagctgttcctgcaaagcccacacggtacgccgcaaaatacgtctggtccgttcgatcatatattcatttctcgcactgcttttaaggatcgtatttccgtaatctgcggaaacctgatccagacagctgtctatgatacggtttcgctcttcctccgtaagctctgcccagtccagtccctcttttcggacttccaccgcaaatttttccagtgccatatgcatgacatttcccatatccatagcccggaactcatactctgcacgttctgtaaccttcaggccatactgcagaaaatgtgcaaatgcacaggccgcaaaacgctccagccgggtagcgctgtacggagaaatttctccatagaggatctttgccactgtttttccgatcttgtctgacggtcgttctgaaaaagatgcctctgtaagtttttttacaaggatcctgtattccgggctctgaagataccagctgtacagttcctggaagaccgcattatcctggtaagcttctcctgcaagccctctcaggaaataatccaggctgattcccggaagctccagtaattccataggttcctgcatatctccgcactgccggatctccatttccggaaacatctcccggatattactgacaagaaaggccggactcagggcttttccctggctgtcggactgacagaaggacagacagagcagttctcttggcttggtcatgttcagatacagataaaatcgctgcatgttcatcagttcctttggccccggtgcaagctggatcccctgatctttaaaaaattctctgtcaatctccgtaagcattcctccaccggatgtattcttcggaatattcccttcatttactcccacaaaaaacagtgcacggatatccttcagcctggttctctccatatctcccacaagtacctggtccatacttggcgggatcagagccaccttggcctggttcagtcctgtttccagaagctgacggaaatcctgacggttcacggtttcctcacccagaatctccaccatattatccagaagttccataacgattccgtatatctgggcatattccttttccatggccttgtcgccctgttccttgaatttcagttcctgatgcttcagtttctgctgcacctggctccgcactgcaaactcgtagagaaaagtacaatattcccggaccgtctttttcccgcctttaaagcttagcgcaagctctctggtctcatctgcgaaccgcttccggatctcattaagcctctgaatgctttccggcggcattccccggtaaatacgcacccacacttcatcccatctcttaaatccacggataccaagagccagcacataattctccagaaggtctgcttcctccctggtcacacaggacattccacagcggagatacctgaatacactctcataggaaaaatcctgcactgccatctcaagtgctgcccggaaatattctacaaacggattcatcaggaccgtatgcttctcatcaatgaaatacgggatccctgctgctgtaaatacctgctttgcaagatttccatactcctccaggttacctgtgatcacggcgatctcaccgtaacggcagcccttttcccttacaagtctggcgatccggcgggcagcttcttccatttccttctgcgggttcactgccgaaaacatgcagatctcatcctgcgcttttttatatatattttttcggtaacggaaaatatttttttcaaggaaatggagggcaggtgcctgggaaaagcgggattttcccacatccttcaaaagaatcggcgtctcgatctccctggtcagctccgaaagcccgtggatcatctgacggctcatataaaaaagctgataaggttttcctctcatgctcagattctcatccgcatccatagtcaccgttaccatcaccttttcacagacagcaagaagttctcccacaacacgcatctgaataggagtaaaaccggtgtaaccatccagaagaagtacactgtttttcattttttcagaaaacggaagagctttttccagcgcatccattacttcttctcccgtcatataatgatccttcagatatccggtaaacgcctggtaaagaacagctacgtctttcagcttcatctgaagtaacgctctgtcaccggaatcctcgatcatctcctgaatctcactgtcccggatatcgtactgcataaactccgacaggatagacttcacttcatccaggtatcccgctttacgcatctgacctcccagataggaaagctcctttccatgctgctgtaccatcttctgcagcaccatactcttaccggtttcttccagaagggtgcggctgtctcctccaacttcctccagaacacggtatgcaagacgctcaaagctcaggatatcaatattcaggattcccctgcccggactcatctccaccagtgtcttctgggtctgcatggtaaactgctccggcacgatcacataaaaaagcttctcaggatgcagccccgcctgttctattatattctgataagcataacaggattttccgcttccggaacttcctatgataaactgtaatgacatcttcatcctcccgatcacttgcagattttcagtcattccggcgccctcctgcgcctgaagtattcctatcataccacaaattctactcctatagaacggtcgttctctatattctgaaatatctgcctgctcttttccttatttttctaggcacagtatcgaataacctgcgcacagctgtggcataaatcctccatcccgataataaactatacaaaaagctttgggaggcgtgcgccatgagttccaaaaccaggatcatcgttctacatatgaaagagatcatttacacagctgtctttctggctctggctgttgttctggctgtcgttcttttcttcatgttcggtcccggaaaaaatgccagtcatacagccagcgaaaaatcccgctacaagccgggcgtctatacctcttccatcactctgaatgataataccttcgatgtggaagttactgtaaatgctgacaggatcaaggccatccgtctggtgaatttaaatgaaaccacaaaagcttcctatcctcttatggaaccggttctggattctttggcaagtcagatctattccagtcagtccctggaagacattcagtatgcaggagaccggaaatatacctcccaggtactcctttcagctatcacggatgcagtaaaaaaagcggagaacacttaagctctccgctttgcaatctacgttcagatttcaatcttctccagcacatcctgccagatccttgcacttgcatcacttggcattctgagatctcctcttggagaaagtgccacactacctaccttcgggccatccggcagacaggaacgcttgaactgctgggcaaaaaatctccgatagaaggttttcagccatttcaggatcgtctctttatcataaatcccgtcaaaggtcaggcaggcaagcctgtagatcttatccggtgtaaatcctgcacgcagcatgtaatacagataaaaatcatgaagctcataaggtcctaccagatcctccgtcttctgggcgatcttgccatccttaggaggaagaagctccgggcttaccggagtatccaggatatccagaagaacctccttcagttcctcatctccgcaggtatccgcataataacgtaccaaatgacgtaccagtgtcttcgggacagaagcatttacaccatacatggacatgtgatcgccattataggttgcccagccaagagccagctcggaaaggtctccggttcccacaagaacaccgccttccttgtttgccgtatccatcaggatctgagtacgctcacgtgcctggctgttctcatacgtcacatcgtggatctccggatcatgtccgatatcccggaaatggatatttaccgcctctttaatatttacctcggtaagccttgcaccaaggcagcggcttaacttgcaggcattctgataggttctgtctgtggttccaaagcatggcatggtcacacagtggatctgttctctcggcatttccatccggtcaaaggcacgtgccattacaagaagcgccagggtagaatccagtcctccggaaagtcctactaccgcactcctgctgtggatatgctccatacgtttcttaagtcccatagcctggatgttcaggatctcctcgcagcgctcatcacgctcttccttcacagacggaacgaagggatactgtggatattttctggtaagtcttgtttcctcctctgctacggaaaaatcaactcttgtatgactgcaggtagaaactgccggatacgtggacattcttcttctctcatcagccagtctctgcacatcgatctcactgtaaatgatgccgttctcaaagcgtctgctttccgcaagcatggaaccgttctctgcgatcatattctgtccgccaaacacgagatcctgggtagactccccttcccctgcactggcataaatatatccacagatcagtcgtgctgactgcccgcttatcagagttctccggtaggaatccttacctaccatctcatcactggcagaaagattaacgatgatatgcgcaccgttgacggcatgacggatacttggcggcgcagggacccagagatcctcgcaaagctctgctgcaacggtgaattccggaaattccttacattcaaagatcagctctgttccaaaaggaatttcatcccagaactcatcctcctcatttttctcgcacttcaggaagtccacaaattccacatcttcttcctctgcacctgcaaactgtctctgctcataaaactcattataattcggaatatgcgtcttcggcacaaatcccacgatacggccatgattcagagctgctgccacattatagagcttgcctctgtgacgcagcgggagtcccacaaagatcagggcgtccgtctcccttgtctcctctgcaatatgcagaagctcatcccacgcactgtccagaagacatctctggagaaaaagatcgtgacaggtatatcctgtgatacaaaattccggaaataccatcagcttgacatgttccttttccatttcatgaatggccttaaggatttcctctccgtttgccttgcaatctgcaacggtaactctcggcgttgccgctgccaccttgataaaaccatgcttcattttttcttcctcccgagttttatcgcttgcactctcttatgatcctcttaagatcttccacggtaaaattataattcttattgcagaaatggcagttcatctcaatgtccttgccttcctggatcatctcgttaagttcttttcttccgatgctgatcagcgctttttccacacgctctctgcagcagttgcaatggaactgtgtgggcagtgtatcattgatctctatgtcaaagccttccagtactttttcaagaagactttccggtgtgtgtccctgctccagaagattggtaacagaatcgatctttgatacgttttcctcaagctttgcgatcacctcttcctctgcaaaaggcatcagctgtacaataaagcctcccgcctgacggactgtattatccttattcatcagcacacccagtcctaccgcagacggaacctgctcgctggttgcaaaataataggtgagatcttctgcgatctcgctggtctgaagagcaacctgtcccacatatggctctttcagtcccatatccttgatcacatccataaagcctacgccgacagctcccgcaacatccagcttgcctttgctgtttgccgggatacatacatccggattccccacatagccctttacatttccgtgagaatccgcagttactgtgattccctgcagtggtccgcctgcatggatccgaagtgtaaggagatccttttcccctttcatcatagctcccatcatggcaccgccggtaaggagacgtcccagtgccgctgttgccaccggactggtgttatgattctttctcgctgtctccaccatatcggttgtaacagccgcaaatgcacggatctggctgtttgccgctgttgctcttacaatataatcactcatataaaaaatttcctcctttatttctcgtctgacggaatttcctttccatgttctctggccacaaaagtcagtcttccgctgtccggcttcggtgcatccttggtgtatgcgtcataaaccgccagcgggatcaggcctgccttttcaagaagttcccttactttctccggatcataggccttctggtaatgaatttcctcgtctctctcataaagaccatcttctctcggaagaaacagagtcagatcatacacattgatcccggtctcctcatcaaattcattttcccagataaagcttccctcttcccgattctctgcaatagtcgtatttccaagcatttcccggtatttatacggggtgttcatatcaaatatgaaaattccatccggatcaagataattgttcaccagtttaaatacagtaagcagatcatcctcctctgtgatgtaattcatacagtcacagacgctgacgacagcacgtaccgttccataaagttcaaactcccgcatatcctgttccagataaaggatctcatgaccggattctgcacgtttttccatggcttcgccaagcatttcctcagagttatccacaccgatcatatcataaccggactcagccagaagctctgtcatcactccggtcccacagccaagttccagcacgatcccgtcttcaattccgtattctttaagacttcctataagatattccgcccatttttcatattccacattgtccatgaaaatgtcataaactctggcgaaatcactgtatgcttccataaaaacctccaaatattttccgggcgttccatcgcccgcagcgttcacattataccatgtcttcctgtataagtatacgcctctgacataatatgacacaaaaaatccgggaccgcagccacaaaagctgtgatcccggaattcttatctaaccgaatctcctgctgctccaggctttactgtacaggcatatagtatacgtctgcagcctcaccgtgccagtagaagcttgttccatcctcttcatatacatcacagtcatactgagaagagaaggtgaaacggtttccttcgttatccatccatgcaccgtttccgtccggaacgataacacgtggtttaccatcggagtttctgtaaatagttcttgtctcatctgtgttgccaagctgctcatctgtaaatccgccatttacgatagcaccggaggagctgctgtcagtggatgcagttccattggaagaaccatcagatgtactgcttccgtctgtagatgttccgtcagatgctgcacttccgtctgtagatgtgcttccgtcggcagctgtagttccatctgctgctccgtcagaagaagctgctgcattaccatctgcagatgcacttccgtcagaggaagctgctgcattacctttaccggcagtcttggctgcggaaccatttgccgcactcttcagagtggaatcaccaaggatcgcaaagctgtcgacagactcctggacctttttcagagcatcctcttttttaacagatgccacaaggctgtaatactcactgtcatttacaaagtatttattgatagcatatacataaccgtcactcttggtcgtatccttatatttcacagtataggaataaatgttgattccgtctttctgatctgccttgtaatcctggatctcaaaatcggttccatttaccatgttctctgcctgtgtcatggaaactgccatatcctgggagttcgggatcactgcggattccagatctgcgccggatccgtgaaggatcaggatcctgccctggtccggagactcgaagcttaccatatctgtctcgtcggacttgttggcccaggttgcatccggaagcttgatcgctacggatttatccttggatgtataggttgtattctgtgcgtctgctgcaacagtcggtgtaaccttcgcttttttcgccggtgtcggagtaggagtagactccacaaccacgctgtcctcttttcctcctccgaaactacatgccgtcatgacaccagaaagagcaacagtcatagctaaaagtgcaataaattttttattcttcatagtatcctcctcataatcatcatcagtcacaaagtgtgtccggaatattcactcctgaacacactctttgctatagtttacgattttattacagctttgtcaattgatttctccctgtactttatgaatatcctgtaagcagatatcctgctccgtacaggatttttctaacattataattttcccagatatacctatcttattctcttcttatgctgatcctgtatttcccgttttacgccttcattacgaaagttctgatttattccccaccaagtaagcctcctgttttaatgacaaatatctcctcgaatctgtcccctcttttttttctataattgtgtctttattcatgtacactcatgttgtaaagtatacccaaccaaaaatatatgaaaagaggacatccatacatcgatgttttcgggaaaggatctatcactatggaaaaagcagttcagacatctcagagaactgaccaggagctttcatctgttcagtttctcaccattacagccgcatttgttgcactgacttatatcttcaccgcatttattaatgttaagcttccgatcgcagccaacggcggactgatccaccttggaaatgtaccgttattcatcggtgccattttattcggaaagaaaaccggagccattgccggtgggatcggaatggggctctttgaccttctctccggctggaccctgtgggcaccatttactcttattattgtaggaatcatgggcttcacagtaggtaagctcacagaggatccccggcaccagaacatgaaatggtatgtgatcgccattgccgcagcctgcgtgatcaaggttgcaggatactacattgcagaggttatcatctatggaaatccactggcaccggtatcttccatcccgggaaacctggtccagatcggtgttgcagctgtcatcgttctcgtagtgatcacaccattaaaccttgcagcaagaaaaaccggattaaaaaaacagctgtaacagctgccgtaatttgcggaaataatataaagatcaagaggtgagcttatgtataagatcatgacaccgggacctacacaggtcgcagaaaatgtccgtctggcaagaagcatggaatgcacaaatccggatctggacgaagattttgtcgaattttataaagaaacctgcgagaagatcagctctcttctccatacctccaacgaaactctcatcttaagcggtgagggtatccttggactggaggctgccattgcttccatgactgagcccgaagataaggttcttgttctggacaatggtatctacggaaaaggctttgccgattttgtttccatgtacggaggcagaccggagctttataccagagattatcagaacactctcgatgtaaaggaactggaagccttccttgcggataaccatgactacaaatatgcaaccgtagtacacggcgatactccaagtggcatgctcaacgatgtatctgccatctgcccgctccttaaaaaatacgggatccttaccgttgtagattctgtctccgcttccttcggcgagcctctgaacattgatgcatgccagatcgatatcatgtgcggcggatcacagaaggtggtatctgcacctccgggacttacctttgttgtagtcagcgatgatgcaaagaaatccatggcagaccgtaagacaccaattgcttctttctatgccaatcttacagcttttgcacattattacgaagagaaatggtttccatatacaatgccgatcagcgatatctacggactccgcgctgccattgacaacatcgcagcagaccctgccatcctctcccgccacgcaaagatcgccagtgcctccagaaaggccatctcaggcgcaggcctgaacctttacctgcacagcggatattccagtactgttactgtttttgaagtaccggagggcacaacagccgaagcgatccttgagggagtaaaaaaagactacaacattatgctggcaggttccttcgatgtcctggctggcaaagtgatccgcatcggacatatgggaaacaacgctacattctataatgtaagagaagttttcgcagccctggacgggactttacgcaggcttggcgttccgcttaaggcttccatggaggatatcttctgcaaaaacatgcagtaatttctgagatttcaatagtaaaaagcactgtaagatgaatccaacttttcatctcgcagtgcttttttataattcttataatatttttctttattcttttaccgcaccggatgtcataccacctacgatgtatttctggccgatcatgtaaacaataataaccgggatacaggtaagtacgatatcagcaaaaatatagttccagtaactcttgttctttccgaagaactgatatacagccattgtcatcgggaagagacggctcttgcttgacagatacaaaggtgtgaggaaatcactccatactgtcatgaactgaaggataaaacatgttaccatagttggtttcagaagcggcatgatgatcttgaagaacaggcttaacgggcctgcgccgtcgataacagcagcctcgtccagctcaaccgggacagagattacgaagttacgaatggtaaatacacagaacggaatcattgcactggtaaataccatgataatgccaactcttgtatcgttcaggtgcagtgtactgagtacacgtaccaatgttacatagttgaccgggaagaacagtccgcaaagtacaaagtaatacaggaatacattcaattttgttctcttacggcacataacaaatgcagccatggagcaaagtacaacgccaagtgttgtagcgatcagcgcatatgcaaaactgttcaggaatccctggatcagacttcctttttcaataacctcagagtagttggaaaatacccactctgtaggaagtgccagactcattctggctgcctctgcttttgtcttaaaagagttgatcaataccatataaaatggaagcacgacacataagcaaagcaggatacatacaacatgttttaataaattctgaattcttttttttgccattactgctgtacctcctgtttactcaatgtcttaacaataaatacacctatgatcgctgtaattacaagaagaacagtattcaatgcagaagacattccatactggcctctggaatagagctggaatgcataagttgtaagaacctctgttgcatgtccagggccaccgtttgtaagtacataaacaatatcgaatactttcagaccatatgtaataccaaatacaaggttgatcatgatagcaccactcagcatcggaagtgttacataccgaagtctctgccagaagtttgcaccgtcaatctgtgcagcctcataataagatttcggaatcgtattcagacctgcaagaaagatagtcataacataaccaatacctcgccatgcatctacaccatagatggatttccatacaatagccagatcagacagccatttctgtttgaaaattccaagatggaatgcatcaagaagtgtgtttaaaagtccgttattataattcaggatggatttaaatacaagaccaatgattacaaaaggcagaatagacggcaggtagagcaatgttctgtaaagccctttgcctttaagtccctcctgaagcataatcgcgatcagaagagccgggatcagcttaacgatgttggaaatgatagtaaacttcaatgtattgccaataccgctcagataagacttatctgatgtaaaaatctcagcaaaattctgcagtcccacaaaatgagtaccattaagaacacttctggagttccagtctgtaaaggagtaaccaacacccattacactgggaagcaggaaaaaaatgatatataatgccaacggcagtatcagaaaccactgtggatagattctcttcttattcacagaaagcacctcctgttttaagttaaaacagagccggcaaataccggctctgccttcgggtcaactagttttaagttctgttatttatttccagttctcgtcgcctacagtttttgctgcctcagcacggttggtatccatgttcttaagaacatcgtttgcttccatctcgccctggcagaatgcaaccatatcctgaccaaactgtgtccagtaatcgtttgtatattttgtacctgtctgaagtgttacaacagccttcttgtcatccggaactgttttaaggaactcctgctcctccggcagccagtgctgctcaagcttgtcatcgttaacgtcaaggtttgtgtatgccggagagttgtcaagaatttcctgaaggctctctgttgttgtaacgaagttgaagaactcttttacaagatcctcatgctctgttcccttgtaaccaaacattgtcgggccggagttgctgcttggataccaggtattgtcgccaagtggctcaaggaacattccaaactcatcagatgtgcctgtgtcttcctggatctgtttgatgaaactggaatttgcaagtgccattgcacagtttctgtcaccaaattcgttggacatgtttgtactgtctgttccgatccagtcttctccgaagtatcctgcatcagagagttctttgaactcattcagaacttcaagcatcttctcgttatctgcaaatgttgctttgttttcatttaattcgtcataaagaccaggtgttgcttcttcataaacgccgccgatctggaaaaatgccagctgatgctgccatccatctgcaccaggcatgaaccaaggtgtgattcctgcatcctggatcttaccgcagagttctttcagctcatcatatgttgtcggtacttcccagccgttctcttcaaacagtgtcttgttgtaaaccattacatactccggagatgcgttccagatctgaagtccgtacagtttgtcattgtatacgcaggactcttttcttgtctccggcataacattctcccaggaagctcctgtaaagtcgatgcagtatttctcaggatcaacgatggtagattcaattgcaaacgggttggactggatccagaagatatctgcacaggaatctgtagcaagtttggactgaagaagatctgaatactgatcagccggaattgtctgaaggtctacggtaacatcgtaggtatcctcaaaacgtttaattgtctcatcgtaacgattgtccatccatcctgctgaaaccaggatgctgagctcctcgcctgcgaaatcgctcttctcatccgctgcagatacgttcactgcaagtcctgtcgtcatggaagcgatcattgctgctgcacaggctactgccagaaatctctttcttttcattaatgtttcctcctttttttgaactgatttttcgttctctcttgatgatattagtttatcatctgatcattttaaaagccatggatattcctgccctgtatttgtacttttttcacagttcattatacttttttcatattttccgtaactatacacaagtttctattgacattttcaagcactatttcagaattgcatttttacggtttgtactttttttacaaatgtgctatacttttagccaatgttttgcacgaccatttcacacacagggggcttaccaatatgaaaacacgcagtctgcagtccaaactttttatcgcctatcttggcatggcctgcctgatccttttttcttttgccatattcttttatgtttttgcatccgggcagctgaagaaaagccagatcagtgccatgagcaccttaaattccacatttcagtcccaggtagactctgcaatccagaatcttgacactgtatctgtaaacatcaattacagcaacatgtcgaaatccgttctcgaccagaaatttgaccttaatatttccgatgaaatgctttctgccatgtccgatctttttatctccttaagcggcactgaattgaaagcagatcaggtaaatctttatgatttctccggatatgtgctccaggccggcctttccaccatggtcaaaaaaagcaacgactctcataatgaatggatccagaaagcccgtgaagccaacggaaaaaaagtcctgacagctccttacagcacttacgtctattcaaaatctgcccgctatccccagtggttcatctccctgtaccgctccttcaccaaccagtacggccgtggtgtcggcgtgattgaaaccgccaaacaatgtaaatccatctttaagagcatcatttcctatgagaaaaaaaatcacggaaatgctgccagtgtctatgttttcaatgagtccggcgatcttatctatccttatgatatcacagccgacgataccaatgatatttcaaaatattacaaacttactgattctgaccaggatacccttaccatacagagtcccgtcacagatcagaaagaatacgtctccagactgaattccgcatatacaggctacacttatctgactatccaaccggaatctgtgatccttgcccctgcatacaaaatgctgaagatccttctggctgttgttgctacttttcttgccgcagcagtaatcatttcctacaggctttcccgctctgtagtaaaaccggtgaaacacctgaagcacattatccagcgtatggaactggacactctcggccaggaaaaagtcacttcctatccggtttccgtcaatgaactggaagaactgtatcaggcattccagctgatgagcgataacctaaaagattccatgactcagcttaacgaagccaaggagcaggaaatgaaagcacgcagcatggctttgcagagtcagattaatcctcatttttattacaactctctttccagcattatggtgcttgcagaaaacggagatacggataccgtggaaaaaatgtgccgcaatctttccaggatcatgcgttatattaccaatactgctgaaacaactgtaacactccgcgaagagcttgattatgtccagaaatatctctactgcatgaaggtccgctaccagtccagtctgaattattccattgatgtggatgaatctcttctggatcagccggttccgaagctgatcatccagcctattgtggaaaacgctatcaaatatggttctgactgcgaaccgccatggactatcacaatcagcagtacaataaaccaaaacagctggcagatcgatgttacagacaccggaccgggattcactgaaaaagccaagaaaaaaataaattcagatatcatgaatgccattcgaaatcccggcatgcctgctttgaagatcaacggtcttggcactgtcaatgtatttctccgctggaaactcttctgcaaagatgacataattttcaggtatggaaatacagcggacagccacggaattgtttctattggacggtattttcagacagatgcggaggaataatactatgaactatactgttattgtggcagaagatgaagaacttcttctgaataatctggtacataagattgaaaaagcagatcctgattttcaggtgatcggcacagcacagacaggtgcacaggccctctcgctggtggaacagatgagcccggatgtggtatttacggatatcaagatgcccgtcatggacggaatcaccctgctcaccaggatccgtgatcagtttccctttacgaaatttgtgatcaccagcggattttctgattttaaatatgcaaaaaaagccatcacgctgaaggtttctgattaccttctgaagcctgtagatccggacgaactccaaaatgttctccttaagatcaaacaggaacttcagatcaaacgtgatgactacgaaaccgtattcgccccaggtgcttcctgcatgtcaccgggacagattgcagagcttctcaagaacttcatggtacagaattatgcagaggatatcaacctgaacctgattgcaggaaccatgaactacagtcccagctacctgaccaaaatcttctgtcaggtctatgactgcacccctaccaaatatctgatcaatctccggatgagccatgcacagaagctgctgatccatgagccttccctttctgtaaaacagatcggtgaaatgtgcggctatcacgaccagggatatttcagcaggatctttaagaaacatacagggaaaagccctctggaatataaagatgagggagagagccagcagatcagttaataaattttccaggtatatataaacaaaaaagtcatttcacgacgtccggttatgctctgttcccaaagcatccggcttctgaaatgactttttatattttatttcacaacttcatacatatacaattcatgaagagctctcgtcgccgcaatatatctcgcccgctccacgatctgacttcggtcttgcccaggaaatacagaaaatacctgatcaaactccagaccctttgccatgtagaatgttgtgacagtcaggcctttttggaagtttgtgctgtctctgtgaagaagggacaaacgctccttggtatcaaagccttctgcttccagcttctccttcagaatgtagtaagtttcccttgcttcatctgcagttcttgcgatcactgctgctgtttcatatgaaataatatcttcaacaccttcatctgcattctcagctatgactgcctgcttctcaagccgcagctctctcactacgctctccagtgcctcctcaagccccggaaattctttttccacaacaggttttccatgacgttcaaaaagctccacttccgtaattcccgccagtttattggcataagacgcaatctcaacagtattacggtagctcttgttcatcacgatcctgcgtatatcttttccaaagatcttaggcagaaatgtcagcacatcctgttgctcgccgtccatagtctgttctctgtccccaagaatagtcatcctgcatttaaagagtctctgaatgatcagatactggatcatggaataatcctgcatctcatccacgatcagatggcgcacaccggaatcctcctgctgagtttccagccgatatttcagatacaaaaccggatacacatcctcatagcgcagctttcttttttcatactgaacctgtggaagagaaggaaaaccctcctgtctcaggaaacggttgtacagcacatagagatctcttgtctcatacatcctgtagaaacggttcttcacagcctccctttcctcatccggaagatcgaatcccttaagagtctccacctcatcaatgaaatattctgctactgcatccattctggaaagcagcgggatatccatgaatttaaagtaaaaaagctctatgatctcctgctcttttttgaccacgcctctgtgttccacatcacggaagttcataaggctgtcctcaagctccaccagatatccttccatacgatccagaaaatcccgtgacagtttctctttcagaagcttttcatcgcataatcctgcaatctgacgctcgatcagatcatatctgtcttcacagtcagaaacaacatttttcagtctcttgtatgcaaaaaggtcaaagctcatctcccggatattctcctcgccaagctccggcaggatatgggaaatatagtccgagaacaccccattcggtgaaagcaccagcacagaagaagatttcagatttttcctgtcatgatacaggagataagcgatcctgtgcagggcaatggaagtctttccgcttcctgctgctccctggatcaccatgatacgatccgaagtgtttcggatgatcgcattctgctccttctggatcgtgcggataatattcttcagctgtacatcaccgttgcttccaagctctgccttcaggatctcatcgtcgatcttcacatcactctcaaactcatagatcatttttccaccgcggatcttgtactgccacttggcagcaatatccccgtggatctcgccaagcggagcctggtaggaagccggtcccttgtcaaaatcatagaacagtccggacacaggtgctctccagtcatagatcaacggaagtccgccgttctcctcagccaggttcgcaattccgatataaaatatctccggctcatcttctccttcatagcagaaatccacccttccgaaaaacggtgaatccatcatcttcctgaatctccgacgcagttcgatcttctcattgctggcattgatctcatggagaagtgcctgctggttatcaaaattctcatatccgtactggtccatctctgtatagttttcccagtagtactcatgcataccttcgatttctttctgcccgacctctatggattcatccagctgtgcgatcctgtgcttcaatgtctctgtcacatgtgaaaggtattcacgtccgttttttaccgctgccataagccttaatccaccactacagcagttccacttgctgttaccatcagcattccattatctgcaccaagcacttcgtagtcaatatccacaccgatcactgcattagctcccattgcacctgcacgctgctccagctctgccagggcttctcctctggctttctgaagttcttcctcataaccggcgcttctgccgccaaagaaattccgaagacctgctccaagatctttcatgaaatttactcctgtgatcacttctccgaatgcgattcctttatattcacggattgctcttccctctacagatggcgttgttgttatgatcatggtaaaatcctcccgtttctgttgttttttctcaggcataaaaatgccttattacagaattatacccgaaagccgtcacgatgtatagagtaaaaaaaggctgcccaaagagatgccaggcaccttttcagacagtctttccttattatcgcttatttattttacaacttcagtcacataggaaacttcttccattcccggataacttccctgacgcccgccaacagtcagagttcctgttttatcatcccaggtaagctctgttgttgcataagcaccgttttcaaaattgtagttatttccctcatcctcataaatagtgaacttgcagtcttcacctggatataccataagtttcaccgactcctcaggtttctgggaagcatatacaagtccctctgcaacaggaaggatacttcctgcttttacaaagatcggcatccggtcgatcggagcatctacggttacgtactggccgccttcatactccttgtttgtccagtaatcgtaccatttcgtacctgccgggagatagcatttccatgttttctctctatggagctcagtactctccggtccgtaatacatcggctctgtaacagcacagatcagaagggacggtccgaacataaactcattctcaaccttgcgtgcttctttatcctccgggaagtcaaagagaaggcttctcataatcgtataatcattaaaatgtacagcacctgcaagggaataaatatacggcatcagatgataacggagcttgataaacttctcgatggcatcatagaacatggttcctttttcaccaaagttccagatttctcttggtgtatcagttccatgggaacggaacatcggaaggaaggttcccatctccagccatcttgtatacagctcacagtatcctttatccttcacaccttcgttatatttgccctgccagaaccatttcggctccggatctgtgttgcagccgcatccacggttctgccacttatcagcaactgtaaagaaagcgccgatatccagtgtccagtatggatatccactcagtcccatattcaggccttccacaatctgtgtcttaagattatcccaggatgcacaggtatcgcctgaccacagcattgcagaatatttctggccggaagcatagccggaacgtgtcaggttaagaactcgtttctcttctgtagtttttctctgattctcataaattccctttgcatgcatcagtgcaaaagcattggcaacagcaggatccagatatttcttgtgctcaccgccgacaagctcatatctttcccatggctctctctttgctgcaccactccagtcaggaccggaaaacggttctgtggaatcgcaccaccaggaatcaaagccctggtcaaaaagtccttcctgtgcctgtttccagtacatttctctcgcttcttcattaaaagcatcataagtcgcataatcataaagaagatgaccagtcttaaaaaactctgtatggttcttgccgcctgcattcatattcggccatacggaaaccatggtatgggcattcagtttgtggatttcctccgcacattctttcatatctccgtaacgcttctgatccaggatcttctcgccccagtttccaggatcccaggtattccagtcctgtaccacacagtcaagcggaaccccgatcttacggtagtggcgaacaatctcaagaagctcttttgccgtgtaatactgctctttggactgtacatagccataagcccatttcggcagcatctgcgccttgcctgtaagataacggtaatcatggatgatctcatccatagtatgaccgcccataaaataataatcgatctgatctacagtatccagaaacagataggaatctttcagatcatcattaaaagtcataagtgaacagcagtcaacaagaattccatatccttctgtggaaaccaaaaccggcatcgggatacgcatgttatgctgatataagtactggcagtgacctctgtaattgtaaataccttcctctgcctggccaagcccatggatttcctcatcctctttccatgtgaagaacagttttccacgatatgctgttcttactttctcagctttcagattctggataaaattccgctcaccgtcaactgtctttacacggttgatgatcggctcctcatcgcctgtattatagtggatcacatctgtttcagtcagttccggtttcttctgggaaagccacttgcttccgtctgcatgcttccagatgatatcaccggatgcagtgttgatctctgcacaaactttcacagttttcacaatgatacttcctgcattttcctctgctgaaaaatcaacctcaggatattcttttttctcaatgatcagggagtcctgtgcctctttgatctcttttccggaaacgatcatgcggatgatctcctctgtcaccggaaccacccggtatgtcagctttcctgcttcaaactgtacatagctatctgttttaaccataatttcccttctccttatctgtccggtaaatcagacattaatattccgtttctgatatcggagcctttctaataaaaaagctccgatatcaggacaaaatttcttacttttatcctaacatcgaagcctgatttccgtctatgacttatccgctcatgaattttaactatttttactgtttcttctgcttctcatctttcggcggtttccccacgtgttttttgtaaagtctgtaaaaattggaaatattattaaatccgcattccatggcgatttccgtaacatttttatctgtttcccgaagaagctcacgcgcatggttgatcctcatccttgtgacataatcgctgaaactgatatttgtcaccttacggaaataagaagaaaaatagttggaactcatatatacggaagaagcaacttcttccagagtgatcttctcacagtaatgatcatctatgtaattaaaagcctgctcaagacgcttcattgcatttttcttctcacggagcatttcccctgacttgctcttatcctgataagcccggatcagcatggtaaggatgcgaagtacattcgccttgatcatcagcggatagccttcttttttctgctgccattcgtgatagatctcccagatactggaacggatctctccgcttacctcttcttccctgccgatacggttcttaaaattacttcctctctcaacaaaaggcttcagatattccgtatcaaaaatactcagcttttcggccacgaattccggtgaaaagatcatcacaagaagcttcatgtctccaccgatcagcttccatccatgaggctccacattattgaagatgatgatgtcatcttcttccattgtatattcctgcccgtttacaaaataatttcccttgccccccaacacacaggtgatctcgaaatagctgtgccagtgataacttccaggccgactgttctccggtgtcagttccacctctgaaatctgaaaaggaaattctttgtcaaggggtatgttgtctctctctaatcgcaaattctgcctcctgtaaacgcagacactgtcatcgcatcagctgtttccggcaggaccggcagcctttccagtgtcttcttacgctcacaatattatagcagatattatttttccatgcaatctgtgatagttcgttctaactcttccagctgatcttcgtgcttcccatggacagcaatgcggaaataatcattaccctgaattccttttatcatatagtaatcgctgtcaatcttaaaaaacggctgtttcagcatatcaagatatgtgaatccacccaatggtctcagcttcagaatgaattcccgctctaccggttcatccagaagataatcccaggcaaaccagccggattctgcacatttttccctggaaggctgttttcctattattttcataatcgtgtattcccctttcctttacaggcagatttcccgtggatctgctgtctgccctatatgactgattcctgtgatcgttcttcgtaatacatccgtataaatttgctctgtaacttgcctgctaaatattccgtgccacagatgctgctatttccttcgcagctcctaaaaattcctttatatccttctcctccgtaaaccacgaaacacttactctcacagttccgccctcttctgttcccattgccttatggatcaatggcgaacagtgaagccctgaacggacaatgatcccatatccgctttccagaatatacgcggcatccgaagctttcagtccctgaaaattcaggctcatcacaggtcctctgcatacgtcatggtttccgtagctccttacaccctctatctgttccagaccacaataaagcatttccatcagacgagcttctttttccataattgccgcaagtcctgtctgctcaataaactccgccccagccagaagtcctgtgattcccggcatgttctgagttcctacctcatactcataatctttgttctcgtaggtaagctgtgcgctgtttcttccggttcccccatatttcagaggcttcagctcaattccgctcctgacataaaatccgccggttccctgaattcccatcagacttttgtggcctgtaaaaataagcgcatctgcttcccatttatctgcatcaacagggatacagccagcactctgcgacacatccacgatcaggatcagtccatgtctctttacaaattcccggatcatctccatatcctgcacacagcctgtcacgttggaacagtggttcacgatcagcacacggctgtccggtcgtactgctgtttccagggcttcttccgtcactgtcccgtttatcgtacacttcactaccagcaccggatgttctctcagctgttccagattatataccggacgtagcacactgttatgctctgtctgcgttaccaggatgctactgccttttttaccgtagtccagccccccaaggactgtattcatgctttctgttgcccctgatgtaaaaaatattctctctgtttccctgattccaaggagctgtcccagtttttcccggcaaagtacttccacatcttttttcatgatcgagctgccgccccggaactgcgaagcaggcgtgccgctaaggcacgcctgcacagcttccaaaacagcagggggcttcggccaggaagttgccccgttgttcagatatatcatccaatcatccttccagaatattgaagttcataatttttgcaatcttcttgatcatctttgtgtaatcaccgaagatcagcacctgatgatgtccgaatcctgcaagattgtgcatgaattctcttgcatcgtccatctggatgtagtagaacggactgcagtatgtatctgcatattcagaacggataaccttgcctttcttgatgcacatggtatcgcctgccggattgaaacgtccaagtgtgatataatcatcatcgttctctgtgaagtcaacctgcagttttccaccgaatccctggcctgtgaatgcccagagtttgtatgccagcggttttgttccataaccgttcatctgaagagccggtactgcatggtggatgcggagaagctcgtctgtctcgtggttcgggttacccatgaatgccggacgttttccggcatactgcatgatcagcatggccatcaatgcgttaaggtcttcctcacatccgcttggaattccctcgtctttcatgatggaatgacacatacatggtgtgaatttacggttctgcgggatttctgttgtacagagctcatgacatgcggttgagaaagcgttgcagtcataaatatccatcatctttttggcagccagataatatttcacgtcattgataaaccagtctgtgtttacctgtgtatcagtagatccagcaatgatcttatctgcaatcggctttgcttcctcatctgtgatctcatccatatatttgaaaatggatgtaaatggaagcttcaccacttcaactccgtaacgctgacgaaggatctccggatcgcggatcagactctgaattccgaatgtaggctgagatcctgctgtcagtacaagcgcccttgtattgcgaactgcttttcttacccagagaatatgcatgatctcattcacatcctgaagatccatacatacatatgcctctactccgatggaacggcagtatgctgcaaaatcaattccttcgtttccgttctgccagataacgaccggctttccgaaacgctcaagcttaggaattctccatcccatgcagaggaagcaatcgatctcatcaacatcctctccgatttttgcaaaaaggtctttatctacaacaaaagactcattatagcggacatccacaggctccgtgaattctacctcatcaataaccccttgtaatcccttaactgaatttttgaatgcctcatcagctgcttttgtctcagcttcaacagtcatatcctctttatgtccggcacgacatggtccctcccagaaatgtgtatgtgtcagacatccaaccaacggttttactacaagtttcatatccattgctttctgtttcataataaaaatacctctcttctctttaacattccgcattttccagtttgtagtttttccacacactcgatatatcctattatactgtatgaatcatggaattcctctttattcttccgaacagactgtactttcttacgattttgtgctattttcatataatttatattattattcccatcatttttatatgaattatacaatatttattcaccacattaacctgaaaaaaatccgcaaaaaaagcaccggaaacgtggccgatccgtttttcggatggaagtacatttccggtgctgtaatcctgcccaatactcaggttatcttatgactgtgcctcttttttctcaaactgactgttatacagatccgcatagaagcccttccgtgccagcagctcttcatgatctccctgctcaatgatatctccgtccttcatcaccaggatcagatctgcatccttaatggtagaaagtctgtgggcgataacaaagctggtccttcccttcatcaggttatccatagccttctggatctgcatttccgttcttgtatcaacggaagatgtggcctcatccaggatcaggatcttattgtctgccagaatcgctcttgcaatggtaagcagctgcttctgcccctgagaaacattactggtctcctcatccaggaccatctgataaccgccgggctgctgcatgataaagttgtggatatgggccgcttttgctgctgcgatcacctcttcatccgttgcatccagtcttccgtagcggatattttccataatggttccggaaaacagccaggtatcctgcagcaccattccgaacatctcacggagattgctgcggttgaagttccggatatcatgtccgtcaaccttgatacttccgccatttacatcataaaaacgcatcagcagctttacgatcgtcgtttttcctgcacctgtaggtcctacaatggcgatcttctgaccgtcatgcacatctgctgaaaaatcatttacaatggtcttatccggattataaccgaatttcacatgctcaaactgtacatttccttccagtccctcaatggaatccgggttctccggctgaagctcttcctccggctcctcaagaaattcaaatacccgctcagaagctgccgccgaggactgcagaaggtttgtaacctgggcgatctgctggatcggctgtgtaaagttgcggatatactggaagaaggactggatatctccaacctctatagttcctttgatggcaaaaatccctccgagaagtgccaccatcacatatcccagatttcccacaaactgcatgatcggcatcatcattccggaaaagaactgtgacttccatgcagactcataaagcttctggttgtcatgctcaaattccttcagcacatcctgctctttgttgaatactcttaccacatcatgaccgccgaaattttcctcaacctgaccatttacttttcccagatactcctgctgtgcctggaaatatttctgggagtgtttcattactttattaatgataagcatggaaaccggcaggatcagcactgctgccagtgtcatccacacgttgatggaaagcatcatgataaatacaccgatcagtgttgttacggatgtgatcagctgtgtcatgctctggttgatgctcatctgcagggtatccacatcatttgtcaccctggaaaggatctcaccgtttgttctgctctcgaaataattcattggcagacggttgatcttctttgaaatatcctttcggagattgtatgtaacatcattggagatccccgtcatgacaaatccctggatcagggaaaagcatgcacttgccacatacagtcccaaagtccacagaaggatcattccgatcttactgaaatcaataccgcctgtaccgtttaccttggcaaccagaccattgaacagctctgtggtagcttttccaaggatcttcgggcctgcaatattaaacgctgtacctgccactgcaaagataaacatcaggataaaacggaatttatatctgcccatatagccaaagagctttttcatggagcctttgaagtccttggccttctctgttggctgcattccgtgtccgcccatcgggcctcttcttctctgctgactcatgccaattcctcctctgataactgactcatggcaatctggcgatatacctcgcaggatttcatcagctccttatggcttccgatccctgccatatgtccatcgtccagtacaaggatcttatctgcatttaagatcgtactgatacgctgtgccacgataatggttgttgcttcttttgtatgttctttcagcgcttttcgtagtgtgctgtctgttttgaaatccagtgcggaaaagctgtcatcaaagataaatatctccggatcttttgcgatagctctggcgatggaaagcctctgcttctgtccaccggaaacattgcttcctccctgtgcgatcggagtcttatatcgctccggcttggtgtcgataaattccgtagcctgtgcaacccctgctgcttttttcactgcatcttccgaaatctctgtctttccgtaacggatattggaatcaatggttcctgagaaaagtacacccttctgcggaacgtaaccgatcctgtcacggacatccttctgtgtcatttcccggacatccacgccatccactttcacagatccttctgttacatcatagaaacgcgggatcagattgatcagtgtactcttaccgcttcctgtacttccgatgatcgctactgtctcacctctttctgccttgaaagaaatgtctgtgataacattctctcccgcctccggatatgcgaagcttacatgatcaaattctacagtacccttcacatcctgggaaggctgtaccggatcctccggatcccggacactgacttctgtctcgagtacctcgttgatacggcgtgcagatacatttgctctcggcagcatgatagacattgctgtgatcatcaaaaatgacataatgatctgcattgcatactggataaacgccataacatcaccaacctgcatgcttccgctgtctaccgcataggaaccgctgtagatagtcagtacagaaactgcgttcataatcagcatcatcaccggcatcataaatgtcatacaacggtttacaaagaggtttgtcttcgtcagagtgatatttgcatcctcaaaacgctcctcctcgtgtttctcccggctgaatgcacggatgaccggaataccggtaaggatttctcttgttaccaggttcagcttatctaccatggtctgcaaagctgtaaatttcggcattgcgatcctgaacagcagtcccataaatgccatgatcagtacaatggccaccccaaggatccatgtcatggaggaatctctctgaagcacgcggatcacaccaccgattccaaggatcggcgcgtaaagcacgatacggaacatcatagccattacctgctggatctgctggatatcgttcgtgcatcgtgtgatcagggacgctgttgaaaacttatggtactctctgctggaaaaacctatgactttgttataaaccagccctcggagatcatgtccgaaagatgccgcaactctggatgaaagaaataccacacatactgcagccatcatagtgacaaatgccataagcaccatgctgatgcctgttgacttcatgtaatccatctgtatggcatccacatcttcacccatagcttcatattctgcacgaacataggaaacacctgcctgtgtgatgatggattcctgcatcttgtcgatcttttctccgacctgcttcttcatagcagccagagcctctgcaggcatctgagaaagagccgccagtggatcagtcccttccgggattcccatttttgcaagagctgcctttgattcttcgctgtcggacgtcagagtagaaacgatcaccatcggtttgccgaagatatcgttaagcgtttctctgtcttttttggagattttatcctttaataccagatcatctccctcttcctcataaaatccatccacagttttcgcatcatcctcttccataaacagcttcagactgtccatggacgtctttctgatcttctcaggaacactgtcttcaataccgttctgctgaattcccacattaatgatattggatgtgtaattcggcagagacagatcacagtatgcctgaagaaaaagaagcgcaatgatgagcatgatgtaacctgcagatcgtttcagatatttcatcagtttaatcacgtttctgttccttcctttctgtcatttcatccggatgaagcttttctatggcttcctccggctggatcttttcgatatttacaaggatctgctccagaaatctccgaagcaggcactgttccgcctcactgaagccttccatcattacagcctcatttttatggatccgttccagtgcttttgccttgatttcctttcccttttctgtcatgtagatcctggtcacacgctggtccttttcatccggtttcttataaagaaagcctgctttctccagtctctgtatcgatacatttaccgtaggcggcttgatatgcaggatctttgcaatttcccgctgactcaggccatcccttccggacacaagccccagaaccgggatctgtcccggataaatcccaagctcctgcatctgactaaagcatttcgtcataaaatgacggtctaccttcataaacagagataaaaaactgctctgcttttctttctcatcttcctccttacaaaacacgctgtcactcctctctcatccgatcagacacctgctccctgttaatgatatacgaagcagtgatctttttttaattagtcggctaactatatataatatacatctgcacaaaaaatgcaattgatttttgtgaattttacacttttttaagatttacagcttctttaatttccacctaaaatctattaattaatttgtttaactaatttattttcttctgtttttcctatttttccacaaaaaaatacccgcttcgtctttttattcgaaacgggtacttctttctgttcctgattttcttatacaaactgattcacagccggatcataagcataatcgatcatgtcaagcttatcctccagttctttccggttaagtcctctgtcctcacagaaggcatccagggatctgtaaaaatcccgcagctgtgtatttacgtaacttaaaagcattaccgggtcctttggtatcataatctgtttccatccttttatctgatatttatccaatatcccagatgctgctggatagctgtctgatctgaaatatcagatttactatcttaccaattttattttttgtcaagagccagtaaaaaatttttcaggattttttatttcttcagtatctgataaaaatattccattccttgtccaaaaaagaactgcctggttccgattttcatcctgaaatggatttctatcagaaccgacagttcttttccttgttaatctatcatgactttatggagttattttttacttcgtgctgacggtaaacgctccgtccttcacatccagcacaatggtatctccggcatgtacatcaccggaaaggatcttcttggctgtcagtgtctccacataattctggagataacgcttcagaggacgtgcgccgtaaaccggatcataaccgttatccactaccatctgtttggcagcatctgtaagctccagagaaagctcctggtcagccagacggtcgctgagctctttgaccataagatctacgatcttacctacattatccttggtcagcggcttgaacatgatgatctcatccagacggttcagaaattccggacggaaatgaccacgaagatcattcataacctgttcctgtgcctccggtttgatatctcccttctcgtcgataccgtcaagaaggtacggagaaccaatgttggaagtcatgatcaggatcgtattcttaaaatcaaccgtacgtccctgtgaatccgtgatacgtccatcgtccagtacctgcagaagtacattgaatacatccgggtgagccttctcgatctcatcaaaaagaacaacactgtacggttttcttcgaacggcctctgtcagctgtccaccttcctcatatccaacatatcctggaggcgctccgatcagacgggacacggaatatttctccatgtactcactcatatcgatacggaccatattctgttcatcgtcaaacaatgtggcagccagagtcttggcaagctctgttttaccaacaccggttggtccgaggaacaggaaggaaccgattggctttgtggggtccttgattccggctttggaacgaaggatcgcatctgttacaagacgaacaccctcatcctgtcctactacacgtttgtgcagctcatcctcaaggcccagcagcttagttctctcaccttctgtcagcttggttaccggaataccagtccatctggaaatgatacgagcaatctcatcatctgtgacagcctcatgtaccaggcttctgtcactctctttaacctgcttctcctcaacctccagctgctgctgaagcttcggcagctcgccgtactgcagctcagctgctttctccagatcgtaattctgttttgctttctggatctgtttattgatatcctcgatctgctcacgtaatttctggagcttttctacggaatgcttctcattatcccactgagctttctgggcattaaaagtatctctcagctctgcaagttctttctgcaaatcagccagacgctctttgcttaagttgtcagtttcttttttcagggcagactcctcaatctccagctgcatgatcttacgtctctgctcatccagctctgtcggcatggaatccagctccgtcttgatcagcgcacaggcctcatcaacaaggtcgatggctttatccggaagaaaacggtctgtaatgtatctgtgtgaaagtgtggcagctgcaaccagagcactgtctgtaatcttaacaccgtggaatacctcatatctttccttcaggccacggagaatggaaatggtatcttccactgtcggctcatttaccataaccggctggaaacgacgagcaagtgcagcatccttctcaatgtactgtcggtactcatccagagttgttgcaccgatacagtgcagctcacctctggcaagcataggcttcagcatgtttcctgcgtccatggcgccgtctgtcttacctgcacccacgatcagatgaagctcatcaataaacagaatgatctgtccttcgctcttcttcacttcctcaagtaccgctttcagacgttcctcaaactcgccacgatacttggcacctgcaaccagcgcacccatatccagggcaaaaatcttcttattcttaaggccttccggtacatctcctgccacaatacgctgtgccagtccctcgatggctgctgttttaccaacgccaggctcaccgatgagaaccgggttgttcttagtcttacgggaaaggatacggataatattccggatctccatatcacggccgatcaccggatcaagcttctgattcttcgccttatccacaagatcctcaccgtatttattcagggtatcataggttgcctccgggttgtcactgacaactctctggtttcctctgactgtagataatgcctgaagaaaacgctctctggtgatcccaaattcattgaatagcttcttcatgctcgggcttggattcttcagcatggaaagaaacagatgctcaaccgatacatactcatctcccatagccttcgcttcatcctctgcactgaccagtgctttgttcagatactgaccaaatcgaagctctccaccggaaaccttaactctggcatccagtgccctcttaactgtatcaataaaatattccttctggatttccatcttctcgatcagcttgaggatcaggctgtcctcctgtgtcagcaaggcatacagaaggtgttcctcttcgatctcctgattaccatattcataagcaatcttttcaagatcctggacagcctgtacggatttctgtgtaaatttactgatattcataggctttcctcctattctatgaaaagcatttccaatattcgcatactggaaatgctgtgctttttcttgttctaggagaactataacactatttgttagcactgtcaagaggtgagtgctaattattttgtgaaaaatttgtgcccttgattttacgggcttcacagggatttttcacttgctttcgcactctagtttcttgatttgaccacatttttacgacaaatctttggaaaaatatattcgtctgattttcttaccacattttacgacaacgacttatggtttataccacagcaggtacagtttctggcaggttcattttagacatctcattctccacgtgagacttctctgcaatatgattgtagacattcattgtgatctgtgcatctgaatgttcttcgctccgctgcggtcggtgctaaacggatgtccaccggacatccagcaccccatcacatactgcataactttgggattgacattgttctcacccagtttggtacatcccgtatgacgaagggtatgcgatgaaataggcagcatcagctccggctctcgcttctcttcttctgccagtttgctttctttcttattatag

SEQ ID NO: 212 - DNA, 24418 bp, Unknown
  gut microbiota DNA sequence
gcaagaagtcccagaatggaaagctccattgcgcagaagttgcatacaaacatccagattgctgctttgttgatctgtttttcgtccgttacatcctccatgtgctggtacataacagaaacagatgccagctgaaagaagaaataaaggactgctgaatagagcgccggtccaaaggctcctctctcggaggaaagtacagtcatttctccggaggacatagtatggatggaagctgtgatatctccccactgtgcaatgatattcggaacaagtaccagtacaagaccgatgatgatcagcacacttaaggtagaagcacattttcttacaacattggttccgaaaagtgcgatcacaaagataaatgctgcaatgatcagtgtacagagccaatacgggatcccgaacagtgtctgcagtgtggaaccgccgattgcaaaagctgctgctgatgcagttccgatcatgatcaggtaacagatctcatagagattggacataaccggtttcgtttttccgtaaagactgtcggaaaagcttctgtaatcgtaggttttatgtttataagcatagcgcattccataccagaaaaacagtgcatacaatccctgtgtcactgccggcaggatcagacaccagataccgtagttgataaagtactgatagatctgcgctcctgatgcgaatccgcctccgaactgtgtggtaaatgcgacgaacgcaagtcccatagccagaggcattttactttgtaatgatttattctgactcatctctctttcccccattttttatttattatattcgatgacttttcccggattcaggatcagtttatcatcgaaagccagcttgatggctttataaagagcgatcattctcggtcccgcaaattcttccaggaattccagacgtccgtttccgatgccatgctcaccggaaagctgtccgcccagttccttggacagtgcatacagctctaccagacttgcgtgagtggcttccttccactcctggtcactcatttccggtccacggagcatctctgtatggatatttccgtctccgcaatgtccgcagggctctacacggataccatgtgcacttgcgatctttttggctgcttttacatactctgcgatccttgcacgcggaacaactacgtcacactcctcctgtgcgacagaatctgctttcattccttccaggatcccgccccggacactccatacggctccggcacgctccggtgtgcctgcgatacagcagtccagggctccgtttgccagggctgcttccgctgctgcctctactgcgctgtcaagttcctgcttactggaagcatcatacataacgatcagcactgcttctcccagttttactgggaacattttgttcagattgcgttctacgatatcgatcagttctctttccagaaactcgatggctgttggcacaaacggcagctccagaaccttcgggaccatgtctgcacattcctcaagactcctgaacggcattacaagggtacaggtgcaggtcggtgcgggaagaagcttcagcgttacctgagtcaggatacataaggttccctctgagccgatcaccagatcttttacatcatatcccgttgtgttctttacaacgttggatgaaaaattcatgatggaaccatccggcataactgcctcgatacaacggacgaaatccctggtcagtccatatcgtaccgctttcatgccaccggcatttgtgataacattgccgccgatggaagctgttttttcgcccgggtccggcggataaaaaagtccgcctgccgctgctgccgcctggatatcgatgagaagtgctcccggctccgctgtgatggtctggttctttctgtcgatcggaaagatcttgttcatgcgcatcacagaaagcatgattccaccatatttacaggttgctccgcctgcaagtccggttcctgcgccacggcataccaccgggatattttctttatatgcgtaagccatgatggctgagatctcttctttatttaaaacctccacataaagctccggaggaaaaactccgtactccggcatctcatcacgataatattcttttgcgatctcatcgccgacccatacacgatctgaagcagtcacagaacggatgtagtcaaaatcttctgaagtcatttttttatagggatatgccatgacttaatcctccttccgattctttatcagctctgtcagctccggtacaacctgatacagatcatccacgatgcagtaatctgcaacattaaagatctgtgcctccggatcattgttgatcgctacgatacagtcagatcctgtcatgcaggaggtaaactggatagcaccggatacgccgcaggtgatgatcagcttcggacggacagttcttccggaaagtccgatctgatgtgcaacatctccgaatccgttttctaccataggacgggtgaaggcaagctgtccgccaagggcatctgccagttcccggcacatttccacatccttttcatttcggacaccacggcctgctactaccagaacatcctcttcctcaaggctctttaccttatcaatgaccctggatgacagaatcttgatcctggaatctgccattttttcgtttaccggacatacgaccacctgaccgtgaggattttttactttttctgccttgtccataaccttataacggaccgtggcaaactgtggccttgatttggtgattccaatctgagccatgatatttccgccgaaagccggtctgatctggatcatatcggtgttggaacggatatccagagttgtgcagtctgcagtcagtcccgtatggaatctggtggaaagcctcggtgcaagggaacgccccagcgcagtagctccgatcagcacagagcttggtttgtttgctgcgatacagtctgcaactgcgtctgtataacagtctgcgcggaagccttcgaagccttcatgctcatatacgtacacattgtctacgccatacggcagaagcttttccgcattttcctttgttccttttcctccgacgatcacacagttaacctgataaccgactttgacagccatctttcttgcttctccgatcagctcaaaggtaaccggatggatctctcctctctcctgctccacatagataagaaagtttttccatttatccttgtcaaaggatttcgccttctgctcaaaccggatagctttctccgggcagttacgaacgcaaagcccacacatacgacaggcatcgcctacaacaattccatttccctctatggtgagggccccaaaaggacatttctccacgcatactccgcagagtacgcatttgtttatatcaaattttaaaaattccatgttccgcttccccctatatgatcttctttccggtcaggagagcaacaagcttgtctgctttttcctttgcagttccttccagataaacctgtttttcactttcctccggcgcaaacattttttccacagaggtgggggaaccgatcagtccgtaacggctcagatcctgatccggcatatcttcaaagcttaagatccgtaccggacggtctgcagttgccttctttaataaataggatggcagacgtggcacgcaggtatccttatcaatagtcagcagacatggatacggaatctcggaaacctgggaaacactgacaagatcctgacggacctgaatgcttttttcattaacgtccatgatctcagctacccatgcagcatgtgggatggtcagatgctctgcaatggccggaccaacctgggctgtgtcaccatctgtggtctgtcttccgcagatgatcagatctgcaccgccgatcacctggattccctgtgctaacgcataagaggttgccagaacatccgctcccgcaaattttcggtctgaaagaatcacgccctcatcagcacccatggtataagcatcccggatcatctcttccgcctgaggcggtcccatagtaagaacggttacagttccgcctgttttttcccggatcgcaagggctgtttccagtgcaaacagatcatatggattagtccttgtctcaccggacattcgtttcatggcaccggtttccggatcgatatcaaccttggaagttgccggtacctgcttcatacatacaacgatcttcattttctatcttctttcctgtattttcacttttatttttcactttaaaacgttaaacagctgtataagtatagcattaacgtgatgtaaagtcgagagggttttggtgattttcacaaaaaaatatataattcgagcaattttgtgggcggatatagctaaatccagcggattttgggccataaaacattggaatatctgaaatgggtgtttatttgcgctcaataatgagatacttatatataaaaaaagtctgaattccatcttacgtttcttttacgtaagctgaagttcagactttttttcggttttatttttctattaacataagcatcccgcttatcaggctgttttctttgtcagaaaagatacaaatctcacatgacgatccagctcatcccctattaatccgatcacttttcccatagtaaaagccgcaaggatcgtaccgatcccaagtccgtccagatgaccaaagataatgcctgtcataagtccggttactgcaagacaggtaacatcaaagctgaccttaatttgggaatatttgaatttcgtgatatccgagagttctctcggaaacagatcggttgggatgatcggcagaccgcaccggttggaaagagcaattccaaaacagatcagaagatagctgatcacaaaataaagcactctgaatcccattgccgtcggcagtatattgatctccgattcatagagatccagcatctcgctgaatgcaaatcccacaacaaaactgaacaaatatggtaccacaaattttttccgcatgatcatcagtgataagatcagaagtccctgaaaaatatacgtccaggttccaagtgtaacatgtggaaatacttccgaaaaagcataaggcacacttgatatcgctgaaatgcccgacccggaataaagcataagcactactcccaggctgttgatcaggatcacgattaccagcgccagttctcctctgatcaccggtaattttctgttactttgtaaatgactgtcctccgctgctccagacattttaaaaagcctccattctttatgtgaaatatttgattatttttctcatataatttaagacttttttcaggaaagtcaatgagccggcaacaaatgcggataaaatatctacattcgccaccggctcatatattattttgcataaaaaatattttttatttcttcagataaaattccatgtatacaggatcgtgatcggaataggaatatccggtatttacattttcatattttgtacattccacattatctgaaataataaatccgtccagcgtcacggtatacgtctcaccgggtacatattccatatctgcgttgcgggcactgttccagagatctttttttcatcttcggacagctgatccagacagaaggaaaaatgctccgggagttctggccgcggaaatgggtaggcccaggattcaggttctgcttcctctgaatcgtcagtatctgcctgcgtatcgctgctttcgttggcttcatctgattctttcgattctgcagattgcgtatccgcagccttcagatcatggttgaaatccccaccgcagatcacataattcccagcctcatactctttctgcatatcttcactgagcatccggatctggccttcccggatagcatcgctgtttccgtaagcagacatatgcagttcaaagatcaccagttcttttccgttatccaccggcgcccttgatcgtttcctttacactgtccttgcttttcgcccaggaggatttttcgccatccatataaagaagctgaaatccggggtataggcaccaaaaccgatattatatgtaagtgcggagtatttttccccggttgtaatggcatcacctaatgatgtgttgtctgaaattgtctcaacctgcagttcctggttgtcctcgatgcggtggtagctggcataaagatagataatgtacaccgccaggatcagcacgatcgcaagaatgataatgccgatcactttcaggattttctttgcttttgtgttcatggttcacctgctttctttatatctgttaataactcttttaacatatttttccaataagcggataaaatcatccgcattcgctgcttgctcataaccgaataacttttccgcagtttatataaaaaatatgtacgcctaagccattgcttatatttcttcacaattgtagcagtaacccttcctagttcggttaatttcccagatttctataattgtaacatggttgcatagccggtgcatcagaaaaaacaaaaagccccgaaatttttataatctcgagactttttgcaatcctgacgcacatcctcacgcccgtacatccttcttcttcaagatccacccggccagtacaaacaacaccatcagccacaaaacacagctcagaacaaacagtccataaccgtcgcttagcacatcctcttttttattcgcattcatcccagcctgcatcagacaatacggccaggccagtgcaaaacctttcgatcctgcaaacatgccggtaacacctcccaccaatcccagaaagatcggcactgcgaagcttcggatcatcatagcaagaaccaactgtgcagcaataacagccagcgctcccacagctcctctcagaagaaaaaatggcagtctcattgatggccagcctgacagatgtgcgaagatttttccacaaaatacatacagcacaaatacaaatatatgtgtaagcagagccagttttgccaccaccgcaaatttcgctatgaacaggtccagcggctttaccggacttgccatgatcagattccaattatgcccaagatgttccagccgccacagatatgctgcataggccgcaaccatggctggaaagaaaaacatggaataaaacaacgtatgctgtgtccacagactgtaccatccgtccttgaggatttccagattctgcaaataattgaaagttccatatccggcagagatcaccggcaggagaaaaaacatcgcccagatcggggacgcgtgaagtttccggttttctgctgcaatgcatcgttttaacatcttctacacctcctgtttctgcacttttcgccatgccacataaaacaacacggctcccagcacaacggtaaagatcagcaggccccagttaaatggccgtgtaccataagtaaccatatgagtaattttatcccagtttgccacttcgtaagcccccagcggaacaaaatatccccacggcacaaagtaactaacaatctgcggcataaatgcagaaaacagtcccaccaatgcgcccacaattccaacgcaaagcgccagcaccggattcccagatattaacataagaagaaattccaagaaaaaaagcatcaggttcactgccaggatacacactgtcatataaagaaactggtctacaggaaatacttccgtatatccatggatttttccaagaaaaactacgcttcccatttccagagttgttatcaacagaatctccaggattccgaacaatgctttccccataaataaacttctgcggctttgcagcgtataaagcagtttcgtggtatttcccttaacctccatatcccacaaccggctggacagcaatgacatcatgacgggcaaaatgatcgtattgataacaggaacgctgtaaaataatgcgctgtatccattagccagttcctccggactggacggtgacaggccgcctacccagattatcataagcaccggcaccaacagacaaagcagaaggtcgtgcctgtggcgggctttcttaagttctacctgaaatgctttggtcatgtcacgccacctccccacgatcctgcgtcagactgaggaaaatttcctccagattttttgtctgggaagttactcccacaactcccgcgccactttgcgccagaacgctgacaagggctgccagaacctggtcagaaagaggtggcagttgtaaaacgtctggctggtgctctgctgtaactgccttgattccctgcttctgcaaaatagtgatgcttctttggacgtcaagaacacgaagcagaataccaccccggctgtgcttctgaagttccttcagagagccttcaaagagcatttttccatgatgatttaagattccgatctgtgtgaccatctgctcgatctcccccaatagatgactggagatcatgacagtcgctcccgttctctccgacatggaagcaatcagacttcgcatttcctgaattcctgccggatcaagaccgttggttggttcatccaggatcagaagttttggctttccaagtagtgccattgcaataccaagacgctgtttcatgccaagagaatactgaccgactttccggtttgcatcagaagtcagatcaaccacttccaatacccggtcaatgtctttgtgggtgattcctttcaggtctgcaataatagagagattttcccgtgctgtgagatgtagatatccagatggagactcgatcaggcttcctgtctgtttcaataatgttatacgattttcctgatccatggtttttccaagcaactgaacgcttccactggtaggatgcgccagaccaagaagcatcttcatagtggtagatttccctgcaccgttcggtcccagaaagccatacacacagccctgtgaaacggagagattcagatggtctacgactattcggccattgtaacttttacagagattgtgagtttcaataacagatttcataatgttcactcctgttttttgattgtttttgttttttgattgtttttgttttttggaatgaatttagtttatatctgttgccttaatctcagttgttgcttagcttaaatttggcttaagtttttgtgggatagatagtattaatcataaagtatgttatagtaaaaccagtacatattaaagcaacatgactggatattctcaatctacattcactacatagttcttatcagacaaccattttgagcttatcaggaagattttgtactcctcctggtatatccgcttgccaatacgcagtttttctttaacttgcattttattccaccaggaaagacgaggaccacaacaatgaacactatatatgaaactcaaattttaatcgtagatgacaaccaagaccttctccatctgctctgtgaacagctatccggcgcaggctaccagcatatccaaactgccacaaattgtgcaaccgcaaaagctgctttcctgaatgaacagcctcagctgatgatcctggatatcaacctgccggacggcgatggcttttccttatttcgaactttgcgggctaaagctgatactccggcattatttctttccgcccgtgatgcagacgcagaccgtttattcggacttggtctgggtgcagacgattaccttaccaaaccatttctgatacaggagctcctccttcgtgtccagcatattcttcagcgttcttaccgcacagaactctcttccgcccaaatgataacgctgaaacttggcgaccgaagtgtaaatctcaatgatgctcttgtttttttaccggacggaagccgcactgcgttgaccgccacggagctttctctgctgcgtaaactgacagaaaaccgcggccatattgtaacttacgacgcgctttgctccgctgtctggggcgccgattattatggctatgaaaacagccttggcgtacatatccgacacctgcgccagaagctggaagaaaaccccagccagcctcattatctcatcacagtacggggcattggctacaaactggcaaaggaggtctgacatgaaaacttttatccgcctgatccggcgctatgtactgactgctatagctgttgttctactgtttttatttcttggaatcgggatgatcgtctggatcagctggcgggaaggtagccgtctgccacaacaggaatataccgccagcaaaatcgctgattccatggcggaaaacaagaacgggcttagctttggttctgctcatactcctcaagagtggatggatggttactcctgggctatggtaattgatgattatggttatgtgaaatggaattatctgctgcctgacaaattaaaccaccactatacttccggtgatattgcaagtttcgcccgctggtacctggatgattatcccgtattctgctggaaggaaagttatggactgtttgtgatcggtcttccaaaaggaagtctctggaaatacagtctttataattctccggaagtcctacgcgatataatccataacgttcctatgatgtttctgagcttgctgcttttgggactgatcttctgtctctggcttggatggcgcgggacaaaacgcttgaaaattgtggcaacgggattagattcccttgcagaaggacagacagtacaactgccaacgaacggcttcaccggagaactggctgaaaaattaaaccagaccagtgcgcagctgcaaaaaagaaatgaaatgcttacaagacgtgacaatacaagaacacagtggatcgcaggtgtcagtcacgatgtccgcacacctctggccctgatccttggatgtggagaacagctggagcatgatgttgcgctccctgatgccgcccgtcagaaagctgccgatatccgcacccagtgcgaaaaattacgcagcctgattgatgatctgaacctgaccagcaagctggaatacggcgcacagcctctcagaaaagaagcttttgctgccggtccattattccgtaatctgatcgcacagttttatgacacccctctggctgaaaactgcgaaatttctctggtacagtccgatgctgctgaacacgcacaactttccgcagaccgcgcccttctcagtcgcctgctggaaaatcttctgaataacagcatccggcataatactgatcttatagaaatttctggtcttgtggaaatttctgttcacacagagatagaaatagcagagaatcttttccgcctgacagtaacagataacggaaaaggctatcctccggaagttctcgcaactcttcattctgacgaaacacccgataatacaccgcacattctggggctccacgtcgtagaacagattgccacagcccacggtggaaagaccctcttctgccagaatgtccctgctggtgcgaaagcggttgtgtggctgccggtggaataacatccgttgccgccaccaataccaacattatttctatatatttttcaatcaaacagctccgtataaaacagctgcttaggacttttaggtttatctggtatactcatttttattattcctttatcaactaaaggcattatatgcgtttgaattgcataagtaacagaacttaaacctaaataattacatatttcttttcttgttcgcggcgttttacaaaaaagaattaattccctattttctactgattcaggaatatttttttcttctccatatttatacagttttacaataaaacaacctctttcatctaaaaattcaggttgtggtaaattgtactcctgcatcgttctgcgaattgttggaattccagaatatcgattttctgtaattttcatcacctctaattccgaggcaattactggatttctggtatctggttgcacttttcccaactgatcaattcgtattcttccatacaatccacctggatttttgatttcaattctatcctcatacattattaattgtatcggcatgccctctgtatgaatactataatcacggtgtactaaagcatttaatattgcttctctaattgctgtaattgggtagtccgttcgatcctcacgttttcctgtcaaaggattaataatggtcttcattcgcatatttctacttacaaacttcattgctccctcaagcatgtccgatatatttccttctattctttgattatctaaaaatctctctccttgctcaccgatttctcccatctcttttcctggaataactgttgcaataatacataattgaggaaaataagcttggggatatgggctgaaattcattacagaacttaatgtaatcccatcattccgttttatactcatcaactcataaatctcattgtctggtataactgccaagcgtgcttttcctttcttcaataatccaatatattctgctaatagcacctgatccaatgaagcaaatgaagccctctcaattacccttatatcatcctgatatttttttctataagcctcataactatatacttcatattctgtcataggctcgtcactgtctcctacacgtataaacgagccctttactcttccccttccacgataaaaaaccggtctatctgaaatatctgtaccaggtatttcagcagaaacaaaatattttccatttttttctgcaactgtaagctgtggtctaacaactggttccatctgcaaacattgctcatttattttcttctggatatcttgcggatcatatactcccacttctttaaaattttgcttttcatccacaccaaaaataataattcctccatcatcctgattggaaaaactagacaatgaatcatacaaatgtttggggcacccttgttctgcactttttatctctaatgtaggagtttcacacttaaatttctgaatcaattctaatttttcaattaattcttcgtttgtcattttagttcctccatttttttcatattctaacattatatttaagtttattcaaggaactcaaatattattcaagaaactaaaataggaactcaaatcatttaagttcctattatatacttatctgcatttattttcgaattgcataatatatccatgccaaattttttttatctactaggatttcataatactacttcccctgccttgcaaaaccagactaatgtattgtatggtatgcacatagttcttttcctgttctcatgctatttactttctgaaaaaagacgcatcgcattatcaaactctccgcattgtaaagtatctttttcaatctcaactttcattatacttttcatcaaccaagaacacatcctattagtttgtgatctttgtttaattttctctgtatcgagtcccatatcccttaagcttatgattctatacaattccttacacagactggcaacattcaataaatcatcaaatttcattgtcaccggtactctattagaagaatgagtataaaaattcctatcattcacaatatcatttataagtttttccttttcccctacaaatttagttttagatatttctataaaacaattgcaacctctatataaataatctttcaccgcttttctaaatgatatacctgaatatcccagccccttttcaaccaattctttttcgtcttcattttcaagtttactcattaattctttcttcttttcttcaaattctttaatttctttttcctcgtctgtatatgcctgagtatacccttcaatcaattgcattgcagctaaaaatttgtttattgttacaattttcacatcttcatcaagtagaattcttccatacgcttgctgtgcattatatatttttctataattagagaaccaatacttcattgcttgctctaaattttgaaaatctgttatcttatataaactactccttttaaaagatatagaatccatcgtatcatttttcaatacatttagcttttctttcggaaaattacaaattcctataacttctaccattttattactttcagtacaatttaaagaattaacagtaacattttctcctgccaataccgaaaaaaagtccactattatatataaatttctttttatctcctccatatctatagctgaattaaacttccatataatataatgtgcaaatccaatggaaaaagattcttttctatattgatatctcggataaacacaaaatgttaattccccgttttctaactgcacaactttattttctatattaattggtatatcaattttatgataaaataaaatatccatataatttttattcatgtcatacgggcataaaccaattaactcatttccctccgttatttcaaagcgaatctcttgaaatttagatgtatttgtataagccctttcacccttaaacaatatatctgcctgcagttcaagtttaaaacaattatccattcctcctgacgctgatttgaaattcaatccaactgccgttatcatttctccttcttctaattcaattaccaaatattggtttatttcttctctcaccaaatttacaatatctcttgaaactctgtaaagcgtaatcataccttgataaaatttattaatacttatttctgccctactatccatttctactttatttatataaagaagctttcctgaaaagccagtttttgattttatactcatattacccctctgttatataaactctctagcaccaaatatatttaacagcattctctgcaaacaatattaaacattataaatattctcttctttacctagatttttaaatatacttttttattttagcatattttatagaacagaaaaaccccggaaatcttacggttccgagggtcttcttaataatcatctttttattcttcattttttacgcccaactcttctactgatcaattttttatactctatcgaactaacacgtatccattcctgatgctctctacaatattgagaaattatcatgcaatatgaatcaaattcttctaacagttcctttcctgttctatgatattcaataatgtaatcctctgtattttctattgctgctctttccaaatatccacagccttttaaattcattaatgtatcaaacaagtcaacttgaattgtatatacaactaaaattttttgaatagaatttattatttcttctcttatctcataatccttagccaaatcattattataattttcccttagtttaaaacatggtgttataacatatcggtaaagttcctggcatagtgcctcattcactgctggagcctttttatactctggtatgataacctgaaaaataaaaaatatttctgcagcaattaaagaaatagctatattaaaaagaaattctcccacatcccacaaccaatttacaacattgaaagcactaattattgagctgcatttgaatattaaatatatcacgcaatataatatggctactactccaacaataaaaacctttcgatacatttttccaaaatatatcagaatattttcctgtggtcttttcaccatataatcatctcttccgccacctctaacctctagctttttcatattttctctccctcaacaatcttcattatatcatctgtcttttcgtaaaagaaagctttatgtaaatgataggaatcaaaataccttgacaaatgcaggacatgaaacttgagataatgtcattaaaacgtataatctgacataatccttaatcacatttctgcttcataggtaaatctactctctctattattggatttgcgaaaaatatttatccttccaacagaaaaacccgtagaaccgaagttctacgggtatcttacgtttggacacaacgttatcttacgataacaaatctatattcagattgtattactcgatgattgtagcaacacgtcctgatcctacagtacgtccaccctcgcggatagcgaatgtaagaccctggctcatagcgatcggatgaatcagctcgattgtcatctcgatgttatctccaggcatgcacatctctgttccctctggaaggttgcaaacacctgttacgtctgttgttctgaaatagaactgcggacgatagttgttgaagaatggtgtatgacggccaccctcgtctttagtcagaacgtaaacctgagctgtgaattttgtatggcatgtaagtgttcctggtttagcaagaacctgtccacgctcgatctcgtttctctgaacaccacgaagaagtgctccgatgttatcaccagcctgagcctcatcaagaagtttacggaacatctcgataccagttacaacaactttacgagtctcctctttgataccaacgatctcaacttcctcagatacgtgaagaacaccagcctcaactctaccagttgcaactgtaccacgtcctgtgatggagaatacgtcctctacaggcattacgaacggtttatctgtgtcacgctgtgggtccggaatgtactcatcaacagcatccataagctccatgatcttgtctccccatgggccagccggatcctcaagagctttaagagcagaaccctggataaccggaatgtcatctcctgggaagtcatactcggaaagaagatcacggatctccatctcaacgagctcaagaagctcctcatcgtctaccatatcacatttgttcatgaatacaacgatgtaaggaacacctacctgacgggaaagaaggatatgctctttagtctgagccataacaccgtctgtagcagcaacaacaaggatagcaccatccatctgagctgcacctgtgatcatgttcttaacgtagtcagcatgtcctgggcagtcaacgtgtgcgtaatgtctacgctctgtctgatactcaacgtgagctgtagaaattgtgataccacgctctctttcctctggagctttatcgatatcctcaaagttctctactacgtttcctggaactctctctgcaagaactttagtgatagctgctgttaatgttgttttaccatggtcaacgtgtccgatggtaccaatgttacaatgcggttttgttctctcaaacttagcctttgccattttaaaatgtcctccttaaaacttggctctatcaaaattagagcattttttcagatttaaacttgctaaccttgattatattgcaaaccaaggttatttgcaagcattttatttatttatagtggatcagtccttcttagaaaggatcttctcctgtacagacttcggaacctgctcatatttctcaaagaacatagagtagttaccacgtccctgtgttctggaacgaaggtctgtagcgtatccgaacatctcggaaagcggaacatatccacggatcatcttaccgccgccgatatcttccataccctcgatacgtccacgacgggagttgatatcaccgataacgtcacccatgtaatcctctggtgtagtaacttcgaccttcatgattggctcaagaagaatcggagctgctttctgcatagcatccttgaatgcaagagaacctgcaatgtggaatgccatctcagaagaatcgacttcatggtaagaaccatcgtatacatttgcatgtacaccaactaccgggaatcctccgaggataccagctttcatagcttcctcgataccttcgccaactgccgggatgtattccttcggaatagcaccaccaacaactgtggactcgaacttgtacagctcttctccgttggcatccataggctcgaatttaactttacagtgaccatactgtccacgaccaccagactgtttagcatacttgctgtctacatcaacaggcttggtgattgtctctttgtaagcaacctgaggtgcaccaacgttagcctcaaccttgaactcacgaagaagacggtcaacgatgatatccaggtgaagctcacccataccagcgataatggtctgtccagtttcctgatctgtatgagcacggaatgtcgggtcctcctcagcaagcttagcaagtgcctcgccaagtttgccctgtccagcttttgtcttaggctcgatcgcaagctcgataactggctccgggaactccatggactcaaggattaccggatgctgctcatcacagattgtatcacctgttgtagtgaatttgaatccgatcgctgcagcgatatcaccggagtaaaccttatccagctccatacgtttgttagcgtgcatctgaaggatacgtccaacacgctcttttttatcttttgtggcattcagtacataagaaccggagttcattgttcctgaataaacacggaaataagcaagttttcctacaaatgggtcagtcatgatcttgaatgcaagagcggagaacggctcatcatcagatgaatgtctctcaacttcgttgccgtcaaggtcaacacccttgatagccgggatatctgtaggagccggcatatactcaaggattgcatccagaagtttctgaacacctttgtttctgtaagcggaaccgcagcaaaccggtactgctgtacactcacatgtagcttttctgaggacagctttcagtctgtctacagaaggctcatctccctcaagatactccatcatgaggtcatcatccagctcgcagatcttctcgatcagctctgtatgataaagttctgcatcttcctgcatatcctccgggatatcagtaatagagatgtcatcacccttctcatcattgtagatgtatgctttcatctcgaaaagatcgatgattcctttgaagtcatcctcttttccgatcggaagctgaaggcagatagcgtttttaccaagacgagtcttgatctgctctactgcaccgtagaagtttgcaccaaggatatccatcttgttgatgaatgccatacgaggtacattgtaggtatcagcctgacgccatacgttctctgactgcggctcaacaccacccttagcacagaaaacgccgacagcaccatcaagcacacgaagggaacgctcaacctcaacagtgaagtctacatgtcctggtgtatcaatgatgttgatacgatgctcaagagcacctggctttggcttgcagttctcctcaagagtccagtgacatgttgtagcagcggatgtgattgtgataccacgctcctgctcctgctccatccagtccattgtcgctgtaccttcatgagtatcaccgatcttgtagttaacacctgtgtaataaagaatacgctctgtaagagttgttttaccagcatcgatatgcgccatgataccgatatttctggttctctctaatggatattctcttccttcttttccagccaatgaattttcctcctcgaattagaagcgatagtgagcaaatgctttatttgcctcagccatcttgtgcatgtcttcttttctcttaacggatgcacctgtgttgttcattgcgtccagaagctcattagccagtctttcttccattgtcttctcgcctctcttacgtgagaacattgtaagccaacgaagagcaagtgcctgacgtctgtctgctcttacctcgatcggaacctgataagtagcaccaccgatacgtcttgcttttacctcgagaactggcatgatgttgttcatagcctcttcaaatacttcaattgctggtttaccagctttttcctctactctggtgaatgcaccgtatacaattttctgagcaacacctttcttaccgtctaacataatgttattgataagcttggtaaccactttgttattgtacatcgggtcagccagaacgtctcttttctgagtatgtcctttacgtggcacgttacttccctccttaatcatattgattatatcatcggtactcacgcagtaaaactattgcatgttcgcactggtaaggtcctatatttaacccgcaaccgacagggtatatggaataccgtacaaatctttatagtcttccgctgtaatacattagatgaataatatctttgtaatcctcctgattatctgcaatcaggaagcggcgtagatttctgatctacaaaaattattttttaactttaggtctcttagctccgtatttggaacgagcctgttttctgttagcgacacctgcggtatcaagagtacctctgatgatgtggtatcttgtaccaggtaagtccttaactcttcctccacggataagaacaacgctatgctcctgaaggttgtgaccctctcctggaatataacttgttacctcgataccgttggaaagacgaactctggcgatctttctaagagctgagttaggctttttaggagtagctgttttaacagcagtacaaacaccacgtttctgtggagcagcctgatcaactgctttctttcttaaagagttgtatgttttctgcagagccggtgctgtagattttttaacagctgtctgacggccctttcttactaactggttgaatgttggcattccatttcacctcccgatttatttctccatgggctttcccatggggccttgcggttgctatttacaaattacggcatgcgaaaatataacgtttcattcgcacgcttgctcattatagaccgtaaatacagggcttgtcaaggtgttttataaagaatttttgctgattttacaggggttttacacggttttctccatagatgtcacaacctgccggaaatacccatttttcttctgctgatataccagagtattcccagtattcctgctattaatatagaaagaactgctcccgcctgcagccccggagtccgatatttcatagtaaccgtatgtgtcccggccgaaagctttacaccggtaagcccctggatgcttttcccatcgacctttttcccatctacataaatctgcatatcaggatcataaaatatactgagaaggagcattccatcctttgctgcagctatggtaccctttccattcttcagatacatctgccgggaagaaagcatttcatagatctcatccaggtccgattcccggtaagttcccagaaccgcttcctgcattccggtttccgcagttacatgcacaaccgtatccgtatcataagtgccaagatccaggaaattattattccagtaatcggatttctgctcctggccgttgatcgttacagtttccggctctgtccccggaatatagagatacccatgctccccttttttcagcgaaatatcaaaatccacagtcccggcccatactgcttctgaagacaccgtctgcattttgtacagtctttttcccgcaataccgctgagcagccggttctgaacctcaagtggatctgttccttccattgcatagtccagtacggaatcactgaccatatatcctgctttcagtgctctcggattctcatagagatcaaaggactggctttctccgatttttttataaacagtatgaagctttcttgtattcctacaaaacagatatcgtattcccagaagcatatccgtcacttccgtggatcccgcatactgaaaacgattttccagattttcaaagcccatgttttttacaaaatcccacatttcctctgtattagtagaggaatacatagatatcccgttcagctgatacagcatctcttcatttctcacaagaggatttacgatggcggcacggtaatccacctgatccacaccggcagactccagtaatccacaaacctcctgctcactttccacataaatatcacggtttgcggttccattatctgtaatactgacgattccgtgaattcctgtctctgcaaggatcagcactgccagcaccagacatcccagctttcggatctccacacagcagaaggcatgaccggacagttttccacagatactccgttccgtccacataaccagaaagaatactgcaagaacccctgctgtaatcagaagtccccagatatttccgcttttgatccccacaacgatacagaagccctctgcagcgatcagtccggcaaaaattcttcctgtgctttcattttccacatttccccatgcatcacaggacattttcaacagcagaaatatcaggatgaacacaaaacgattggggattcccacaggtttatgcaatccgtgaaaaagcagattcagcgctgtgatatggatccccgcaaaatacaaaacgatcaatatacctgttacgattttttctgctgtgcggatttctttattcagaaaataaattccggcaaaaagcagcactgcacagccacagtaaaggttcacatctccctggtcgccggattttacaaaggacagggaatcctcgaataatgctcccagctgtttccagatatctccgtacactcccgaaagtccggtgcctgcctcttccgccgctgcagttctggataccgcagcaattccggggatcagtgtgattcctgcaagtccggctccggcaacagacgcccccgcaaatttcaataatgaaaaacgaattttctccggccgttgaccggattctgccgcagccagctctgccagataataaaaagcagcaaatgtgcatagcataaatcccatataatagctggttaaaatacagtaccccagcgccagacaataccctcgccactttccggtatttaccagccgttcaataagatatgccagaaccggcaggagcatgatacagtccagccacatcacattgctgtaatagcctataagaaaatcagacagtgcgtacatacagccaagagaaactgccatacttcctctgcccggatattttttcccggaataccatgccatggatacgctgcaaagccctgccttgatcaggatcaccgcagtgacagcctcgtttacatacatgaatttcataaacagcagtattaggaagctgaacggactgcagagataatagcaaaacaatccgtaaaaattatatcccatggcatgtgcggaccaggtccagcccactccctttccaagctgctctgaaagttccctgtaaaaggctgtatactgatggactccatctaccaccagcgccgaattttctccaaaaggataaacacccttcaatgcaaagcccagcgtaaagatcagcaccggaaacagaaacgccaggagatagatccaacctctgtttccctgttttttgtttttttccgctttctgtattcttattggtctcatttcatttcctcgtctgtctgcagtaattccaggccgttctgttctggacagctgaattatctatcggctgttattttctgaaatactgttatttcttttccgtctttttttctgatcctctgtattctgtaaatcaaatatctgcgttttactttatcgcatgctcatatacttgaacatttttgcaaaacagatcatagcatgtttcctactgtatcatgtttttgtgaaattactgcgaattttttcagagcaaaagaaaaaagctgtcacatcattggagacacagaaaactccgccgacgtaacagcttctttctgaaggaatctgtgtacgctgatccacagatctcttcatgggtgtaattattaactttatgtgatgagttttttagtttccggcctgtataatacggatattcacatatcctgagatggctgtttacaggttaagaactattatggatatatgatagcatggccatatacatttgtaaaattgatatttcgtgtttataatatagaatattttaatatttatcaaacggataaaagcctctaccacacggtaaaatcctgtttttataaaacggtatagcctctggatttcaggcaggctctcacttccatgatatcctcggtatggaataccatgatcggcttgccggaatcacggttaaaggagaggtacagataatccacgctcacattactgtccttcagtgtaagaagcagatcattcagatttccggtcttatcctcaacctccactccgatcacctcgatcacgtggcaaagatatcctgcagcgatcagagcctccattgccttatccggctccgaaactaccattcgtacgattccgtactctgcgctgtcattggtcacagagcccagaatgttgatatcctcgtccttcaggataccggtaatgttctgcataacaccctttttattttctgcatagatggataactgtttcagcatgataaaatcctctctttcctatgtgctttattttgctgttctatcgtatgataaatcttcgcacatcttatcaggtatgtcaaccagagcaagccggataataacacagaccttcatattttagtttacccgactccataaacactgatattttatgatcaacatttaacccggcccacctgttcaccgcatgtgagcatggagatatttttcccgggtagcgatacctccccggatatgtcgctcctgcttgttt

SEQ ID NO: 213 - DNA, 24023 bp, Unknown
  gut microbiota DNA sequence
ctaacattaagcggcagttttcacattctcttcattttcctttcacacaatgcacacatttttttactatattattaaccgtagatagcaaatgcaaatgctaaataatctttttctttttcatacttttttgccgggagtccgcacaactcccggcctccttttttattcttcaggtagttcgcctgcattttctattattaaagatataaaaatatgtcttgtttttcctctttcatatattatactaattaagaactcattgttcctgtccagtttgttctttgataatttcatagacttcacactcgaaacatgatacaatatccgcacagagaaatatgcggtacaatttttgtgggaggatgcgcatatgctagatcagaaagatttggaattattagccggtatgataaacccgatcaatgtccagctgggcaatataaataaccgattagatggtatcgacgccagactggatgcagtggatactcgtctcgacggtattgacgctcgtctcgatgctatggatgttcgttttgacggtatcgacgctcgtcttgatgctatggatgttcgttttgatgaaatagatgcccgcttcaaccgggtagaaaacagacttgaaatgatcgatctgaaatgtgataccaacagaaaacgcctggacgacctttcactggatgttaagcttgcagaacgggatatccgaaaagatatcaagaatttacaggacacaacagaaactcttgtcgttgtacttcagggaagaggtattttacctgacccaggtaacacaatacagacagcctgatcatatcatgtaaagagtgtgaagcctatgaaagtatcaagggattacactctttattatcatccatacaaccatctttctcctcaaaaaatggttgcatttacaattcgtttatgttatagttatatgcgttgcggggtatggcgtagcttggtagcgcgcacggctgggggccgtgaggtcgcaggttcaaatcctgttgccccgattgaacatcataaatattataacagctaaggtttccgaggtctgatgacttcggattttttattacctttattaccttactatttttcgaaaggaaggttttgcatgcaggataatctgtctctttatcatattttttatacggtagcacgtaccggcagtatctcccacagttcccgggacctttatatcagccagcctgctatcagcaagtcgatccagaagctggagcagaatctggataccgttctttttaaacgcagttctcggggtgtcactctgaccccggacggtgagcttctttttgaaaaagtaaaagaagctctttcacttctggatgaaggagaaaattccattcgccataaccgttcccgggacattccaaagctgcgtctgggcgccagttctactcttaccagatatgtactgctctcccacctggaaaactatattgcacgttttcctcatgtacgtattacaatttcctgccagtctacttatcagacactgcagcttctggatgaggaaaaaatcgatctgggactcatcggacggccgcagaagcttcggggatattattttcaacctcttttgaaaatccaggatacctttgtctgtacacagcagtatctggaaaatcagaaaaagctctatccggatgaacctctgatccaggcagcaactttcatgatgctggatgaggacaatattacacgtcagaccgtgaacactcagctgaaagaacatcatgtggaattaagccatattctggaagtaacaactatggatcttctgatccagtttgcggaaattggtcttgggattgcatgtgtgatccgtgattttataaaaaaagagctggaagaaggaactctggtggaagtaccggtaggattttcttttccgctgcgtgagatcgggtttgtatgcagacagaaagatgctgattcggctttgatcgcgccattttttgatgatgaaacagagcatccggataaataaaggaatgtaaaaaaattcccatctgatcattgcgaccagatgggaattttaaatttcaaaaaagtttcctaccactgtattacgtgtgtgacttttttgactcaaacttcgctgcgcttcgttcgagtagcgcaaaatttattgcacctgcaataaattttgcttaattattaataagcttatcctcgccgttccagctgtagagtttacggatctcttcgccgactttctcagactgatgctcagaagctaattttctcatagccttgaagtgtacctgtgcacctgcatcggacatgtcgagtaagaactcttttgcgaatgtaccatcctggatatcggaaagaactttcttcattgctttctttgtatcctctgtgatgatcttcggtcctgtgatgtaatcgccatactcagctgtattggagatagaatatctcattccggcgaatcctgactggtagatcaggtcaacgatcagtttcatctcatggatacactcgaagtatgcgtttcttgggtcataaccagcttcaacaagtgtctcgaaaccagcctgcataagtgcgcaaacaccaccgcaaagtacagcctgctcaccgaagaggtctgtctctgtctctgtacggaatgttgtctcaagaacaccagctcttgctccgccgattccaagtgcatatgcaagtgcgatatcctgagctttacctgtagcatcctgctctacagcgatcagacaaggaacacctttaccagcctgatactcgcttcttactgtatgtccaggtcctttcggcgcgatcattgtaacatcaacatatgctggtggtttgatgcatccgaaatgaatgttgaagccatgagcgaacataagcatgttgccttcctcaaggttcggctcgatatccttcttgtaaagtgcagcctgtttctcatcgttgatcaggatcatgatgatatctgctttcttagctgcttcagcagatgtatatacctcgaagccctgctcctcagcttttttccaggatttgcttcctttgtaaagaccgatgattacattacatccggactctttaaggttcagtgcatgtgcatgtccctggcttccgtatccaataatcgcaattgtcttaccatctaataatccaagattacagtcttcctggtaaaaaatcttatttgccattttactttcctcctctgatgtttacaacatcttcttcataaaaattatttatcgttaagagagtagctgctctcctagcaaacatatgtaaaaaatttacaggtaacggacatcgtcactgcctcgtgacagacctgtgattcctgttcttgcaagctcaaggatctcatagtcagccatcagctccacaaacgcctgcagcttgttctggcttccggtcatctccataataagagaatccttacttacatccaccaccttggcacggaagatatctgcaacagaaagagctccctgtctctgttccggcttcacagcaaccttgacgagcatcagctcacgggcaacgctgtcgtcctgttcaaggaccttaacatcccgtacatcttcctgcttcgccagctgcttagtgatctgctggagcatctgatcatctccctcacatacaactgtcatacgagaatatctctgatctgcagtcactcctgcggtaatgctgtcaatattatatccacggcggctgaaaagaccagccacacggctaaggactccggaggtattatccacaaggatggatagtattctcttttccataatacacctgctttcaacacttttatgtatagaaaaccgacttcgtcagttaacgctttaatctaataaacccttgctttcttaccattataacaacttcgaaaattttgtcaatcaaaatttcctgcaaaattccttcaggatgataagaaatgtttttatcctcagatcagatattttttcttaagctcctcggatgcctttggtgtcagataaagttttttccgaaggaatctttcaattcctccgttttctttttcgatgacatcaaaaactgtattgatataggactccttcacctgatagaaggctttcagatctgcaagcttccggctgttttccggccggtctgcccggtaaagcctgcgcatatatttcagttcatcttccagacataaattcgaccgcatataatcccttcgtatcgtttccttaggtacacccaaagcaaagagcaaaagtgctgttccgactcctgtccggtcttctcctgtggcactgtgaaaaacaacagctccattctttacatgaagcaggacatccagaaaacgtgcatactgcttcagagaatactcatccgtaacgaaattccggtaccagtcctgcatataccggtctacatcaccatagcaggacatcacatgttcaaaaaagctgtttccactgctgtcctcatcccggattggaatgtgataatactccactcctgccatgatatcatccggttttttctttacttctgcagctgacctgaaatcaatcactgtttttacattatattcttctgaaaggatccggttgtctgcagcagaagcatgatagatttctccgctgcgcaaaagctttctgggaagaatatgcgaaccgtctactgtcatcaatgcacccagatctcttgtattcggaagattctgaagcggaagcctgcttccttttggaaaaccaaccgcaagatccggattcaatactttaagaagctgaaggcaatcctgtacctcctgctctgtcatatcaaatttataacgcttctgacgtctggttatgatcaccagataattaatgatcagctgcttttcaccggttttatcggttccctcacggcgcatgtacgcccagagaatatctttacacggaagactgttgagcatcatatgtctggtaaacacaaaaaagccatcttcgatccgtatttttccgtatctcattttctttcctttctccttctcaacccctgtgctgctttcttcgcaacactttttatcataccagaaatctccagtcccgtatacctcgtttgacaattttcgtagtttggatataataaacagagaaattttatcacagggaggctttcttttatggacaatcttattttctgtctgaatgttaccgtgcctatctttcttacactgctcctgggatattttttccggaggatcggactgtttgatgaaacatttgtcaatcgtatgaacaaatttgtgtttgtcatccccctgcctgtgcttctgtttcaggacatcgctaaaatcgatatctatgaggcctgggatcccaagatggttcttttctgttttgcgatcacatcgctcagtattatgatctccgtgctcctgtcccgttttctccacccttccgatatccggggcgagtttatccaggcatcctaccgcagcagcgcagcgatccttggtatcgccattatccagaacctttacggaaatgcaggtatggcaccactgatgatcattgccagcgtccctctttacaatgtaatggctgttgtagttctctctgtctttaaaccaggtcagggaaaaatagatggtaccgttctgaagcgcactttaaagggaattgtcaccaatcccatcattctcggcattgcagccggtacactctggtcccttcttcgtcttccatttccgaagatcctggactctacggcaggcaatcttgcaaaaaccgccactcctcttggcctcatagctatgggcggatctctgcacttcggaaaagccttttcccggctgaaagcatctgttgcctgtacatttatgaaacttgtcggttatgaagcactttttcttcctcttgccatccgttgcggttttacaaaggacaagctggtttccatcattatcatgctagggtctgccagcaccgttacctgctttgtcatggcaaaaaacatgggacatgagggctctttttcttcgggagtcgtgcttcttaccacattattcagtgcctttaccctgacactctggctgtttatctgcaaaggtctgggactgatctgatattgcagcttctgcatattatctacccgaaaaaatctgtaacataaaatgctgtaagaactatgatttctggttcttacagcatttttttataaaagcatattcacataaagctatcatttctgatgtggatgtttctgttcttacaatctcatagcctacaaaacaaacgaagcattctctcagatcagcttcagatatttcaagccatcccgaatgccgtagtggaacatatcagacgtaacataatctgccaattctttgatcttcggagaagcatttcccatggcaacctttgttgcagcgtattcaaacatggcaagatcattgttgctgtctccaaaaacaacggtattctcccacggaatatcaaacaggcggatcacagctgcgatcccaacagccttgttaaagccctttggcaccagttcaatggtatttcccacaaacgaactgctgccttcatggcggatgatatcatagtattctgataaaatggataacgctgcctccgcatcacattcctccgtcatttttgcactgatcttattgatccgcatacaatcctcatttccacggataggcctccatttatcgcccagggattctgtgatcagactggcataccagttcacttcatcggtatactcctctttgtcataatacataaaatccgcgccttccattaccgggatcagtccgtattttctgagaacctccacagaaagctttgcaacctccggcgtcatctctttattaaaaagtctcttcccgtccttctcaatggtggatccgcaggcactgatcattcccgtaaaagggatctgctccagataccaggatacaaacgcacgacttcttcctgtgcagagccacgcttcatgtccgttatctaccagcgcacggatggcttctatggcactgtccggcactccttttttcatatcacagactgttccgtccgcatcaaaaaatactgcttttctgctcattttcctgtcctccgatatcacctgtaaaatacctttgccgcacggatcaggctttccgtatctttcactccagctgtttcataagcggaatgcatcgccagctgcggcaaaccgatatcgaccgtatttatggctgcctgggtattggaaatatttcccagagtggaaccaccggcaatatcagaacggttcacaaatgtctgatatggcacatctgcttctctgcagagttccttaaagattgctgtggaaatcccatcggtacaatatttctgattggcattatatttgatcacaattccaccattcatcaccggacggtttacaggatctgccttgtctgtataattcggatgtaatgcatgtgcattgtccgcagagatcataaagctctctgcaagggccatcaggtaactttcctgatctccgccaagggccagattgatacgaaacagtacatctttaagaaatgtggatgcagctccctgcctggtagtgcttcccacttcttcattatccagtacacagtggactgcaatgaccttcttcttatctgcctgaagaaagccttccattgaagcgaaagcacactgcagatcatctaatcttggactggaaacaaattcattcctggatccccagatcgttccgggcatccggttatagagaaacagatcatggcccaggatatcctccggacggatctctgcctcttctgccagcatccgcatgaagtttcctttttcgccactgccactgtacaatggaagcatatccttctggacattataatgatagcctccgttaatatctcggttcatatggatcgcaaggctcgggatcatgaccagatctctatcaatatctacaagcttttccagaatttttccgtttttgtggacgatcatgcgacctgccacagaaaggggacggtcaaaccaggtagaaaggatcattcctccgtaccgctccacattcagcttcacataagctccgtttacagacatctccggattttcttttattttaaaagacggggagtcactgtgacttgcaatgatatgatatctcctgcagtcattgacaggaatggaaaatccgatgatcgcggaatgatttctcatgacaaaatattttccgcccttttccagctcccagcgctcctcttccttcaattctgtaaagccttcctccaaaaaacgtcttcttgtttcctctgccgcctgaaaggctgtaggacttttactgataaattccagcagtttttctgttgtttcttcgtacataatcttctcctctgtcggcccggtaatatcaaggctgttatgctattacccattatacggcaaaacttttttcagggcaatatctcagatttctgcactctttcgtacccacatatgctgcacaagcttatccccaagcttatttgcgagcatagtataaattgaactaaatacattggctccaatacggagcagcactgctgccggcattccaaacagtcctgatgcaatggacagtgctccaaatgtattaaatgcagtctgccacgcataacctgcggaatatcccacaccgattcctccgatcattccaatatagggatacatagattccggaagtatcagataaagcactgcaaacagaatacagccaacgatgttgaacatagctctttttccggctcttcccctgcaatccgcggtaaacggcaaacacacggacatacaggcaattccggcccacattgctcttgggagtcccagaagagacatgatcagcatagcgctggaaacgatcagcgtcagtcttaaataccacctgcctcttgcggaatgcagatcaaattcccggaacaggtccagaaatgtcctgcgatacgggcggtttttctgattcttataaaaaactaccatgcagagaaccattccggccaaaagcccctctacacgaagcagatacgcctttccggttacgtcatatcccatcagaagcagatatccgagaacaaatgtggaatggttatacataattacattatggcatcccaggatcatcagtaacaggatgcttatcgcattaacaaaaaatgccggtaccggtgaaaccatattggataatctcggtcctgcgatcagaatacagaaaatcccggcaatggacaacaatccgtgggacgtccggattccgaaatccgcctgtcttaaaaccagcactgccagtagtacggttactcctacaacactgttgtcattgccggttatcttactgtacaatgtcacaaccgccacacaaaatgccatgacaagatacactttaaaattatagatcagaatatgccttcttttctcctttttgtctgtggtatttctgatcagctgttttgatccggttgagcttaactgcagttcctgataaaatgtcattttcatcactccttttgtaaagcagacattctcatttcgcttttttcacatgctcataaacgcaatctctttacaatttacgttcaaagatacaaacagccattatacttggtttattctgaaacgtcaaacatttttttctgaaatcatgttcacgcattacactcccagccccgatcagatcactccgaaaatggccaggaacatttttattatttttatatttactgcagctccgctatcctggtcactgctacataaatgtcctgtatcttataccaggttggataatccaccactccggatgcaggaagcccaaatatattctggaatttttttacagatgcagcagtagccggaccataaataccatccacgattactgacgggatggcaggataggcttttgctatggcattaagctgttcctggatctgctgtaccttttcaccggtaacaccgatagtcaggtcatatccaggccaggatgcgggaatcccggaaactgcttccgccacattgatatacatatcgtttccatagaagctccgcaggatctcaatggcggaatatccctgatctcccagagctttgcttccccactgggtcatccatccccggtccctgcactgcacctggcgtccgtcacagtactgggtcaggatcggctgacgcacattcggtctggaaaggtagttttcaaaaagttcatccacgatccggtcgatactctcaaaaatattcctgccatagatccatttgtggtcgtatgctgtagaggacgtaatggtgaaatcatatcccttattccggtaccactctgtataaactctgttcagagtaaacgacataatcgccagaacattggcacgtatcgtgtcctccggccaagttgcgtagatctcactgctggccacgtttttgatataatccttgtatcttacataataatcctgtgcagaggtatcccctattggcccgtcgtggactacgatatactccgggatcaccactttgtttaatacgatctctccggtttcatttatcggcttgatctctgcttccggatttttgggaggatattccccaaaaagcgtatggggtccgatgacgatccgctgatagtcctctccactaccctgctgtctgctaagggatgctccctgcttggcaatggaatggggaagaacttctgtcccggcaacttcttttggtgtaaaaccctctgcactgatctgaactgtatattctgcatagggctgctgctccaccggtttcatgctgtattccagcggaggagctgccagttccagcatcggcgttcttccggaggaatccgtgtgaacttcttcgatcacattgtccgggactcctgtgtacgagatccgcactgcagcattttccacaggacggttactggcactgtccagcaccgtcacctgcagctgtccctgatccggcatatcctgctgcatggaaatataagaatgatttttcataaacagaggctcctttttgtgcctgaaagcacactggttctctgctagtatatgtacaaaatctcaaaatgccatatctcctactgtgcttcctcccagtaatcttccgcatcctgaatatcatcaaactcatctgcatgatcataataaaaatcttccggatcatcataatcctgcacatcgtacatatcttttctgtcattattcctgctggtatttccacggtaagtttttttcccggatgttgtggatgaaacaaattccactacactgctgacccgtccgtttctgcagactgccatgaatttttttgctccattgctgttataccacatatatctgtactgaatgtcctgtgtcctttttcccggtgtgtcccgccagtaatgttctgttcttttctcttttgcccttcccagaagcgtaatgtttatgtatttttctttcattcccttatatggctcatcctcctttctcattttttcttcctcttctttttccttctgtgccatatattttttgtattgttcttctgtatctttctgggccttcctcatttcttctatatatttgctactgtactcatctccctttggaacataccatataagcttatgcagctcctcaattccttctccattctgaacagcatcgcaaaactttgcatattggataatatattttacatcctcataatatcctggaagtttttccagcagctctatcgcctcatcatatttgcctgcatccatgcattcttccgctttttcataacattccctattctgtttttccttaaattcctcatttttaatctggattgcctcttctgcctttgtagccagaaaaggaactgctataacaactgctatcaataccgccagtattaaaatatcctttttcaaatttatatatctccctttactctgatgcctttattatataataaatatctgcacaaaaaaagtgctgtatcatctcctcacagatcatacagcacttgctagttattattcactccgttctcagcaacacttgatatttaccttcttccgccagatatcagaatatcttcagaatatcattatacataacgataaccatcaacgccatcagaatcatcagccccgcaaaatggatcatgccttctacctgacggtttaccggttttctccggatcgcttctgccaccagaaataccagccttcctccatccagcgcaggaagaggaagaaggttcatcactcccaggtttgcagaaagaagaactgccatattcagcaaattcatccagatcatcagcgttccctcactcttggactgttcgtaagtgtcgccaatggcatccacaacacccacaggaccacttaagtctttcattccaaggtgaccggtcacaagctctttcaggcttaagatcgtagtacggatcatgtatttcacttccacagcaccatatttcagaacattaaagccggaagttttttcactgtatgtgttatatccgaaaccggaaaccggtgtcctgtattctcttggtgttatctctgcctcatattccagtccgtcacgctcataggtgatcgtcaccggttcattggacaatggatgctcctcgatgtatttttcatatgcatttccatccgggacctccacaccgttgatcttcgtgatcacatcgcctgcttccagacctgcctcttccagtggcattcccttgatcaaagattccactgtcatggaatttacatcggaacggttaaagccaagaagataccgcacatttacatctggtttataggaaatctcctgttcctttccatcacgttttactttcagccggatggtatctccctctttcagttcgttgagatacgaatatacataaagatctttccccagatcaatatggtagccctgatattccgtgatcacatcaccctttttcaatccggccttttccgcagcagaattttgggttacttctaatacggttgccggatcatagcccatacagcctacaatgagcacagacaaaacaaatgccagcagaaaattaaatatcggaccggcagcaaccactgcgatcctgccccacacaggagccgaattaaaggttcccggactgtcatcttccgcatcctctccggccatggcgcaggaacctccaagaggaaacagtttcacggaataacgtgtgccgccctttaccgtacttatgatcctgggtcccataccaagagaaaattccaatacctcgatgtgattcttttttgccagaagaaaatgtcccagctcatggatcagtatcacaacgctgaaaataattacagcaatcacaaatctcaatttaccacctgctttcgatccactgataagtatcctgctctacagaaaggatctcatccagatccggatgtgcgatttttttatgtctttccatagactgtgcaataatctcataaatatccagaaagccgatcttttcctccaggaatttctttactgcaagctcattggctgcattaaagacagtcggcatacttccgccctcccgggatgcctggatcgccataggaagtccccggaatgtctccatatccggaacctcaaatgtgatctcatgaagcttcgtgaaatcaagacggtctccgtccagatatcgtctgtgcggatagtacagagcgtactggatcggaagtctcatatccggagttccaagctgtgccatgatcgcaccatccttaaactccaccatggaatggatgatactctgcggctgcaccaccacctgaatatgatccagatccatgtcaaacagccatttggcttccataacttccagccctttgtttaccagggttgcggaatctacggtgatctttcgtcccattacccagtttggatgcttcagagtatctgcaacagtgacccttcgcagctcttctgtggtacgtccgcggaagggaccaccggatgccgtgatcagaagcttgtggatctctttgttttcttctccgtggatagcctggaaaatagcgctgtgttcactgtctaccggaaggatagatacgccatatttctttgccatcggcatgatcagatgaccggccgtgacaagggtttccttatttgccagggcaatatcctttccggcacggattccctccatggtaggacggatcccgatcattcccacgatcgcagtgacaaggatttcggattccggcatggacgcaagctccagaagtccttccattccgctgactacctttgtatccgtgtccgcaatacgcgttttcagatcccgggctgcttcttcatcccagactgctgccagaagcggatgaaactcacggatctgctcttccagcttctccacacttttgcctgcactgactgcaacaacacgaaggtcttcgttttttcttgccacatccagtgtctgggtcccgatggagccggtagaacctaagattgcaatattcttcatttctaatgtctcctaaattccaagaatcgtttttgcaagatagtaaataacaggggctgtgatgatcacactgtcaaaacggtccaggattcctccatggcccggtatcagctttccatagtccttgatgttctggtttcttttgatcgcagatgcagccagatcacccaccatggagatcagagctccaactgcgcagatcaaggcatactcagccatttttccctgtgttgctgctgcatagatcactccaagaagcgccgctcccgcaacgcctcctacagctccctcgatggatttcttcgggcttaaaaccggcgccattttatgccttccgataagcattcccacacagtaagcacaggtgtcacatccccaggagcacaggaatatcagccataccaggaattttccgtccggaaggcttctggtaagatagataaaggaaagcatcacagcaacatatacaactccaaaaaatgctgccatcacctgttctgcatggtatttcggataaccgaatacataaacaaacaggatcaggatcatactgatgatgatcgccattgttccgtaatttccaaaatcagctttcatggcaatataataaagcactgctccaagatatcctacaagttccagcacggtaacatgctcatcgcttaccttcattaccttgtaaagctctctcattccgatcagtgaaacagccagaagtgtaaaaaataagatccagcttccggaaatgatagttgccagggcaataatgacaaggacgataccacttatcagtcttgtcttaaacatgatctactcctccttgacgccaccgtagcgtctgtctctctgattgtatttctcgatggctttgatcagctcttctttattgaaatccggccatgcaaccggtgtaaaataaaactcggaataggcaagctgccaaagcaggaaattggaaagccgctgctcaccgcttgtgcggatcaaaagatccggatccggtacacctgcagtatccagatagctctcaatcgtatcttctgtaatgccatccggctcaacctttccgtcttttacatcctgtgccatcctctgcattccacggcggatctcatcacggcttccgtaatttaatgccagctgaaaataaataccgtcaaaatctttggaatattcctccagttcccggacactctgctggatatccggtgcaaaggcagtaacatctccgatgactttcatcttcatattatttttcttggaaatcttgatacatttcttaagataaccgcggaacagtttcatcagtgcttccacttcttctctggagcgtttccagttttctgtggaaaaagcgtaaaccgtaagatatttcaccccaaggtctttgatatcataacaaatgttttcaagattggcgcatccctttacatgtccgtaggttctcggcattcctcgttcctttgcccaacgtccgtttccgtccagaatgatcgcgatatgatttggtacgttcataaatctcctccatacagaaagagagcttcttcaaagaagccctctctatcctcgtatttcttacaattatacagtcagaatctctttagacttgttctcgatcgccttgtcaacttccttgatgtacttatctgtaagtttctggatctgatcctcaagctctttgatctcatcctcagaaacatcctgttttgcaagtttcttaaatgcatcgttggcatcacgacggatatttcttactgcaaccttggcaccctcgccttttttcttaacgtccttcaccagctctttacgacgctcctcggtaagctccgggaaaacaagacggatcatttttccatcgttgctcgggtttaatcccagatcagagcaaaggatcgctttctcgatcgctttgatcatgctggattcccacggctgaatctggatcatacgtgcctccggtacagaaatgtttgcaacctgctggagcggagtcggtgctccataataatctacggtaagtttgtcaagaatatgcgggtttgcacggccggctctgatggttgtcagctcactctccaaagcattcagtgtttttcccatttttgtttcgtatacctgaattctctcatccatttcacatatctccctgtatggtttttttattattcccttttgatcacacggttacctttgttccggagaacttgccatgtacggtattgacgatgctgtccttttcatcaagaccgaataccagcatcggcatcttctgctccatacacatgatggaagcggtaagatccatagctgccagcttctttgcaactacttcatcaatggaaatctcatcatacttcttggcatccggatttaccttcggatcactgtcatagattccgtcaacagccttggcaagaagaatggcatctgcgccgatctcaacagcacgaagtacagtagctgtatctgtagagaaatacggatggccggtaccacctgcaaagaatacaacctttccttctgcgaagctctcttctacagcatccttggaataaagtgtggtaaatgcaccacatacaaacggggtaaacacctctgtcttaagtcccacatatctgcaaatgtcagacacatagatacagttcatgatagtagcaagcatgccgatctgatccgccttgcttctgtccatggctccgctggtacgtcctctccagaagtttccacctccgatcacgataccaacctgaagtccttcatccacgatcgtcttgatctgtttggcaacctctgtaacagttgcttcatcaaagcctctcttctgctctcctgcaagagcctctccgcttaatttcagtaacactcttttcatatgtttattctcctttaccatacgccggatacaacttcattgccgtcatcgtcaaaagttgtggataccgtaaacgtatcataataataataacctgtcttaccggactccggctcgtcctcataatcactgccatttgggctgccgcatgcattctcaagctcagacatggactgaccgatatatcttgctgctacagatgccggatcatcctcgccggatggtgcttccgtaggatccgcatcggaagaatcagaggaagctggtgcagatgttggatccggtgtggatgtggagtccgaactgccggacgaactgctgtctgtactgtctccattatcatcagaactctccggagtcggagtcacagccgtactgtctgaagaatctgtactgtcactgtcactttcactgtcatcctcaatgccaagtcttgcctttacatccttcagggtagacacctccttggtgcttccgctcgccagatatgtagcatatgggattccgtcttcaccctcaccatccatacaaagactcagctgtgagatcgtcagaagcggcagctggcggaagaaacattcattctgctcttcgtcagaaaatgtaatccttacatcaaagcttgttgctgtatctccgttatcgtccttctggctcttctccatataataaacagccttgtcgttggaagccagtgtgaatttaccatttacaagatcacttccccaggtctcaccactgtcatcgccatcatctctggtcggacggacataaattgcagaaatcgtggagttcatcttattggtaaatacaatactggtagtggtctcactcttggttcccattacgttcttgatatttgctgtttcatccgtagaggtctgcatctccaccacatccgttttcgcagcttccgttaccgtcggggttgccgttgcctccaccttctgctccggtgccacagagttcttctttccgcaaccggctgcaagcatgctcgctgcaagaattccggcaagaatcaaataacgttttttcattatatctcctccatataaaatggtcctattcgctgtcaggttttccttttctattattacagagtatcactttcttgtcaacctgaccgttctgaatttcacagaatctttagatattttaaactatgtcaaaaattggaacagctgaggtcagaacccgttctcccttcgctgtctgcgcatatcacggcgcattttcgcagcttcattccgggctttttccgcttctgtggtaatgatcagttccggcacctggatcggtttctggtcttcatctacagccaccatcacaaaaaatgcccggtttacagtatgacgcatgccatccggctgttccacatacgtatcgatctcgacctccatggaagttcttcccacataagtcacatatcccttaagtactacgatctctccctcatagattgcatgcttgaactgaagattgtccactgccgcagttaccacccgatatgtctccgcatgacgcatagctaccactccggcaacctcatccagccactgcatcagcgctccgccaaaaagtcttccgcctccgttcagatgctgctgcatgatcagatgaacctgctccgtcatcgatgcttctaccgtttttttacgtctatcctgtacctctgtcatttctcattccccgcattttatcatacttttactttttcagttgaaaccagtcgatcaataaagattttttactttaaagtctcgctccgcttctcttctctgatccttctttgcaatatcctggcgcttgtcataaagctttttaccacgtgccatgccaatctctatttttaccaggctgtccttgaaataaaccttcagtggtaccaaagtcaatcctttttcctttaatttagcttcgatcttattgatctcgtagcgatgcagcaaaagcttacgtacacgaagaggatctttgttaaaaatgtttcctttctcataaggagtgatatgcattccatatacataaacttctccgttttccacacggacaaaggcctccttgatgctgcatttaccggaacgtaaggatttcacctcggttcctgcaagtgcgatcccggcctcataagtatcctcgataaaataatcatgaaaagcctttttattatttgcgatcagtttcattcctgttttttttgccattttgcgctccctcagtcttcctcagccaggacaaaatccacggttttcagcattttatccgcatctgccacacggacacggaccttctgcccaagacggaagatctttcctgtcatgtctccccgcagttcatatgcatcctggtcaaatacataatagtcatctcgtaatgtattgatatggatcagtccttctacggtattcggaagctccacataaagtccccatcctgtaacgccggagatgatcccctcatactcctctccgagatgataggacatatactctgctttcttcagcttatcggattctctttccgcttcgtctgcacgccgttcgcacacactggactggcgtgctacttcatccaggatctccttgtaatgctcggtacgtccttcccttaccagtctgcctctcaaacggtcatggatgatcctgtggatctgaagatccggatatcttcggatcggagaagtaaagtggcagtaatacttcgctgcaagtccgaaatgtccgctgcactccgtagtatattttgcctgtttcatggtacgcaaggtcaggcggctgatctgtgcctcattgggcattccctcaatactttccaggatctcctggatctcaccaggcgtgatctcctgtccggatttctgtatgttgactccttcattatgaagaagcatcagaagactttcaatcttttccggatccggattttcatgggttctgtatacaaagggataatctccggtacagtattcctgtgccacggtttcattggcaagaagcataaaatcttcaatgatcctggttgccacattggcttcataaggctgcacatcaatagctcttcctgccgcattcaagatgatcttactttccggaaaatcaaaatcaatggaacctcttgtatgacggcggctgcgcaggatcccggaaagctctttcatcaggaaaaacatggggatcagagcttcatagcgtttcttcgccacctcatcagtatcttccagaatatttttcacatctgtgtaacacatacgctcatctacacggatcacggtttctgcgatcttatgggaaatcacctttcctttttcattaacatccatcagacagcttaaggtcagacggtcctgtccctggttcagagaacagataccgttggaaagccgctccgggagcatgggaatgacacggtctgcaagatagacggaggttccgcgcttcagtgcctctctgtcaagggcactgccgccctgaacatagttgctcacgtctgcgatgtgcacacccagatggtagattccatcctcctttgtcagggaaatggcatcatccagatcctttgcatcctcaccgtcaatggtaactgtaacaagatttctgagatccagtcttccatccagatccgcttcctgtacatgatccggcacacggtcagcctgacgaagtactttgtcaggaaatacacttggtatgttaaagctcttcacaatagcaaggatatctgttccaggtgagcgtaagttgcccagtacttctgtgatctttccttccggcttccggtttctggagccgtaatctgtgatctctgcaactaccttgtctccgtcctttgctcccatggagttttttctggaaataaagatatctttggaaaatttggggttatcactgattacaaagccataatcacggctgctctggtatgttcccacgatcgaaggcattcccctttccagaaccttcagcacaacgccttcctgacgttttccctctttatgtccgttccgtacaaggatctgcaccttatcctgatgcatggcgcttcccgtgtcattttccggaataaaaatatcctgttcctgatcctccacttccacaaagccaaagcccttgtaatgaccaataaaagttccctccatgagggttccgtccttctcgaagaaacgatattcctcatgatccttctctctgcgttctcttcctttacggccacgctccggcttttctgccttcagagcttctttattctttcgcctgtctctgcgcttgccggaaatcttgctgtatcttcctttattatctacttcagccttgccctgggcgcaaagctcgtccagcacgtcaaaaagctcttttttctcactcttatccagctgaagaagagatgcgatctcacgcaggcgcatgggcttatacagcggatctcccagaagctccattataaacttttttcttttttcaaaatttttcgatcttttcacattttctcctgtttcatatttatatttcatttttaccctgttatcattccggaggaaggctcacccgtgcccctgtatcaacgcaaaaacactcctgctgattaacaaaagaagtccccatccgagtttcttctgcatgctaacgcagcaagagtgttaccaacttctgttctgcccctggcagatcagataatgttcagtacgattgacagtacaaagaaaataactcccatgataatggtacctcttacaagaccaccttccatggaacggcccttattcttaccccagtaagtatcagctactccggcgatagagccaagaccctgctgcttgccctcctgcatcagtacgacaacagtcagagcgatacaatctattgcataaattacagtcagaataatcttcaaaatgttcacgcggttacacctcctaatcaactagaggttattttaccatagctaaaccgggatttcaaccattttccgtttattttatgcagggctttttctgagatttttttgcaaaaggatctttatatcttccaagagctccgagctgttcatggatccgcagaagctgattatacttggcgttccggtctgagcggcagggtgcgcctgttttgatctgtcctgccccacaggcaactgccagatctgcgataaaggaatcctctgtttccccggacctgtgagagatcactgcacgatacccggcatgctgagccatctccaccgcatccagagtttccgtaagagttccgatctggtttactttaataaggatagcattggcaacatcaagtccgatgccacagtgcagccgtttgatattggtgacaaacagatcgtcgcctaccagctggatctttttccccaggtgttccgtcaaatatttccagccttcccagtcatcctcccagagaccgtcttcaatggaaacaatgggaaatttttccaccagtttttcataatactctgtcatctcaccggcatcccggtagatcttttctcctttcatgcggctctccccagggaaaaagtacacacccttttcctcatcataaagctcgctggaggctgcatcaatggcaatggtgatctcttctcctggtttatatcctgctttttctatggcatggacgatcagggtaagcacttcctccgaatcagaaagatccggagcaaagccgccttcatctccaaccgctgtggagagtcctttttcccggagaagaagctttaagtgctggtagacttccacacacatgcggatacccttttccagacagcaagctcctgttggcatgatcataaactcctgaagatctaccgtattgtccgcatgctttcccccgtttaaaatattcatcatcggcacagggagctgcagggtatgacagccgcccagatactgataaagaggaagccgaagggccccggctgctgcacgggctgctgccagagatactgccagcgtggcattggctcctgcactgcttttgttctccgttccgtcggtttcgatcaaaagatgatcgatccaggcctggttcagggcattctctccgataatggcatctgccagacgtgtattgatattttccactgcttttttcacactctgtcccagatattcctcccggtttccgtcccgtagctccacagcctcaaatttacctgtggatgctccggacggcaccatggctcttcctgtgtatccattaatccccacaattccttcacctaccgtcacttccgcttccactgtaggattccccctggaatcaaggacctgtcttgcatgaacttttcgaacaggcagataacgtagcataagtttttccctccttgaaaataataatactgtttatgatctcctgcactttgtagttttcttcttatgtttatgagggtagcttgtccgaaaagggttgggtctataccttttatccggccttgatattgtctgatttttcagttcttttatttttattatttttctttttatacttatctttattattttttaaatttagtattgacattttctattttatctgttatagtttaaccatcaaataaaacaaacggaaaacaaaaaattaaatcaaaaaggagcgtgaacccaccgaaaacataacttactt

SEQ ID NO: 214 - DNA, 2961 bp, Unknown
  gut microbiota DNA sequence
acggaccaccgagaacgtaaattttaattccgtataagttttaaatctaagaaatgagaggtatattccattggataatgaaaattaaaagagtcatcggcagaagaaatcaatcgctgatgactcttattttttgcttattttgacctctgtctcacagacatgatctcatgatcttctgctttcatatcttctgcttcgtgttcataaacatattaataactccactttctctgaggttcccatgaaacaaaaacacatctaccgtcttatttttttctttgtcatggcttttgctcttggcagtcttgcaggaaaaatctgttctcattttacttccggctcacagtccgatcaggattctgccgaaaacagccagacctcttctgcctctatgacattccaaaacgaaaactgggggctcggttttcaggaagaaggcaaacggcccacaggaaatgcttctattgaagaattaaaaaaatacaatgcctggtatgcagccgatagcgatgagaaaaaaatctatcttacctttgacgcaggctatgacaatggaaatatgcctgccattctgaatgccttacataagcatcaggtacatgccacattttttgttgtgggaacactgatccgtgaaaaaccggaactgatccgtgagatcgtagattcaggccataccataggcaaccacaccatgacacacccggatatgtccggcatctccacaaaggacgcctttcagaagcagcttgaggatgtggaggttctttataaggaagccactgggaaagaaatgacaaaattttaccggccgccccagggcatctacagcacgaaaaacttagagatggcaaaagagcttggatatcacacttttttctggagtctggcttatgtggactggtatcaggataatcagccttcgaaagaagaagcttttgaaaagcttctgggacggatccatccaggtgccatcgtgctgctgcacagcacctcttccaccaatgcttccattctggatgagctactgacaaaatgggaagagatgggatataccttcggaacattagaagaacttgtggcatcgggatccgcctgaaaaaaatcgcacatgatccatgcatcctcaatgccatcgacatggatattcccacttttggattttccagataagcacaaaaaaaatctgccccgggactatgttctcatatgtcccgggacagatttttctgtgctattgattttagaaggtgttcttcttatttaattgtcttatttactggacagccttgaatgcctcatcaagatcctggatgatatcatcgatattctcagttccgatggaaagacggatcgtgtttggcttgattccctgatcaagaagctcttcctctgtgcactggctgtgtgttgtagtagccggatgaataacaagggatttcacatctgcaacgtttgcaagaagtgagaacagctcaaggttatcaatgaaatcctttgccttctgtgcatctcccttgatctcgaatgtaaagatggaaccgccgccgttagggaaatatttcttataaagctcctgctggcttggatctgtggatacagacggatgatgaaccttctctacctgcggatgatcattcagatactgtacaaccttcagtgcgttctcaacatgacgctctacacggagagacagtgtctcaagtccctgcaggaagatgaaggagcttaccggtgaaattgttgctcctgtgtcacggagaaggatcgcacggatctttgtaacaaatgctgccggtccacatgcttttgtgaagcttacgccatgatagcttggatttggctctgtaagagatgcaaatttgccggatgcctcccagtcgaacttaccactctctacgatcacaccaccaatagtagttccgtggccaccgatgaattttgttgcggaatgaacaacgatatctgcgccgtactcaattggtcttacgaggtatggtgttgcaaatgtattatctacaacaagcggaattttatgtttgtgagcgatttttgcaagagcctcaatatctacaacatcagaatttgggtttccaagagtctcaatataaacagcttttgtgttctcctggatcgcattctccacttcctcgagattgaatacatcaacaaatgttgttgtgattccgtatgccggaagcgtatgctccagaaggtttgttgtaccgccgtaaatatttttggctgctacaatgtgatctccctgctgtgcaagattctcgatcgtgtatgtgatagctgctgcaccggatgctactgcaagtgctgcagaaccaccctcaagtgctgcgatcctcttctcgaatacgtcctctgtcgggtttgtaagacgtccgtaaatgttaccggcatctgcaagtccgaaacgtgctgctgcatgatcgcagttgcggaatacataggaagatgtctggtagattggtactgctcttgcatctgtgaccggatccggctgttcctgtcctacgtgaagctgtaatgtctcaaatttgaattttctctgatctcttgtaattttgctcatgtgtttgtcctcttttcttttattcttatattcgataaaatagtaatttcttatcttatgatcatctgcttatcagcgacaacaacacattcgcttttcttcgataaacacccttgttgacttctgtaaaaccttcatgatttcctcctgatcatcacgttgctcaccttgttttgtgtgctccgttttttgatgatgcaatcatatcacccttttcctagtatgtcaatggggtttatctatttaggttctcacctttatttatgactggctatagattttatttataacgccaccacctacaacctcatctccgtcatacatcactacagcctggccttttgtgatggctctctgcggttcatcaaatttca

SEQ ID NO: 215 - DNA, 40417 bp, Unknown
  gut microbiota DNA sequence
ccgcagagtaagccccatctgtctgagccaggtacgcatcagcgtacatggcgagttatggggcgccctgcacggcagaagactcagacgcttagtatgacccggcgaaacgaccgcaccaggcacgaccatgcagccgcccctccggcagtccgtccgtccctccctccatccccacccacaaaaaaaagagccccaaaaaggcccaaaaacgaggagtgccccggtagtggcttaccggggcgattattatgaaaaaaattgtatgtgtaatgatacagatacacaccattacagcgtctttcgtaacgttctttcgaactatccctatactaccagacaaatatgaacaaacaatgaacatctcgtaaacaattagcgcatttgcacaattttttccaaaacgccctcccccaatttataaaaacaccacattcacaaacaaaaccaagcccctaaacattgtacatattgtacatctcaaccaaacaaaccaacaacaaccccaacaaaagagccacaaccctcaccctctaactcaaactccatctaaaacatcatcaaaaacaccagccatcacaaaccatcaccgccgtgaaagcatccccttaataaactcaatcgccttctcaaaaatattcttcacatcagacttcgtaacacccatatccttcaaagtactataagcatcactcacataccccttgatctgatcatcactcatctcgatcccacggaacttactgataatattaaccagcgaactcttatcatcctcattaagactcaccccaaaatgatccgcagcctcatcgatcccctgagaaatctcatcatccgtgatctggttagaatcaaaaagccccttcacataaacaatgatatccccaaccttatccggatcagaagcaagagacccaacctcattatccttcaggatctcctccgcctgactcataacagaaccagaatcagacgccataaccatcatcggagatgtacatgaaataacacccgcaataaccaaagctgtaaccttgttcaatcttctcataatattcaacctccatacgggcatccgcccttatcaaaaattgccttttactatttttaactatcttttactgcctttttattacctcatcattaccttttcgacgcccctcagtataccacacacccccacccctctgtaaacctcaattttccccattcccacccacaccattcagactttatgtatatcaccaaaaatatattcacaatattttcatattttaaacaaactttcctaacatctcatcagtaaaataaaaaatgtaaatttttcattacttacttatgtctgacacctcagacataacctcctttctataacaaatatataggtccggacaggaaacctctccaacattcccgtccggaaacgcaaaaagaacccggaacagctgcccgggctctttttgcgtttatcatatattaatttttctcatcataaatacagttggcaagcatcgcaaactgctccagtgtcagcgcctcacccctgatattcagcggaagatcacacctgttgaacacatcctcgatctcctccttactcagggaaaaatctccggaatttctgatcccgttcacaagcgtctttctcctctggttaaaagatgcacggatcagacggaacataagcccctcatccttcacatccaccggcggcttctcataacgcgtcagcttgatcaccgcacttccaaccttcggccgtggcataaaacagttcggcggtacattcgcaacgatctccggcttcgcataatactgcacagccagggaaagcgcaccgtaatccttggtaccgggaccaacctgcatacggtctgcaacctccttctgcaccatgacagtgatcgaatccacaggaacattcttctcaaaaagccccatgatgatcggagtcgtaatgtaatacggcagattcgcaaccaccttcacaggcttaccgccgtttttctcatctgcgatctttttgatatccgttttcaggatatcgttattgatcacggaaacattatcccagtccttcaacgtatccttaaggatcgggatcagcgaactgtcgatttccacagcagccacctctctggcagcctccgcaagatactgagtcatagttccgatacccggaccgatctccagtacaaaatcatccttcgtgatacccgaagactcaatgatcttttccagaacatgctcgtcgatcagaaaattctgaccaaaccttttctggaaaacaaaatgatacttttgaaggacttcaatggtatatttcgggttaccaagataaggtctggccatattttttacctctgctttttcttattttcagctgaaatccttttcaaaaagtaccgtgtagccatcacggtccacacgcttcttggaacgcttgaacaatccgctctgagctctctccatagccttatccagcatggtcttcacagtaccgatgcacatcggctgatcctccttctggttgatcccgatcagattatacagagcaagcatgcccatctggtcaatacggaatccattctccatggtatagaccttggcgaaattaacaagttcatcgtttgtaaatacaggaatgttgatcatggatgtaaacttcttcgcaagcttcggatatcttgcgatcagcttacgcataccgatcttttcatcctccaggatcacgatcattccctttgtgtttccggtcatagcttcctcaagctcatctgctgtttcctgggaaagctggtttgcatcctcgataacaaggaaaccgccggcaagcttggatacgatctccggaatatcctttccgttgagatcatccgcaaatatataggcaaccttggaagcctcgatattcagctctttacagattgccgggatcagacttgagatcagtctcgtcttacctgtttctctgccgcccataacgatcacatttccggtctgggaggtcttgtctgctgcgcccatctgcacatcgcagagtacatcaagcagctgttccttcattccgggaactgtaacaaaataggtgaaaagctgtttctcttcatctgtgagctctttctttctggaaacgatctttgtaggatccttttccggatggatcgtagcgataaatttctcaagctgctcttcctcgctgagctcctcttcctcatcgtcctcttccatggcttcatcagaatcatcaccgatgagactgctgataaagtcatcctcatcctcgtcatcctcttcctggaattcaaaggcgtcatcactgtattcttcttcctcatcaagaagattttcctcttccgctgaagccaccggttcctcatgatgaagcttcgctgaaggctctgctgccgccttctgcacctgctcctcagattccagtgaaggaatctccggaagcacatcctcttcttccaccggcttctgtactcctgacggaccattcagaaactctgcttctgcagcctgaagatcctcctcagtaaccggctcctcatcttcatcaaatacgatatccggaagtctggtatcggaagtctccgttacctcttcctcctgctgagcggagatctgcgccatgatatcctcgatatctgccgcatccggctcctccggaacaaattcatcagccgcaatatccagatcctcaatacctgccggctcttccgttacgtcggactgctggacatccggagacttctcttcctccgggatatcgattccctgctgtgtagctgctgccagaatagtatcttccaggttgaagtccttatctttatccttcccggacctgtcacctacagatgccgcaatatcctcgatatttccgaaaattccggacgcatccgggatctccgcggaactgcttgcattctccgggtccacattgatcatggacttcgggatcttcagctccggcatacggatcgttgcggaaaaatcaggcttgccttcctcattgagcggaacccctgcaggcttctcctcactttcctcatttccggcagccttctccttcatgatctctgcaacactctgggacaaagacatctctgtagctttctcagcctcagcttcttccgcttcctgataagtctcttcttcctctttatcctgctgttcctgagcctgcagcttcatacttccggatgacaggttctcaacaccggatgccagcgggatctcatccgcttcctgtccggaaaactcttcctgctcttcagaaggctcatccgaagcttcctcacttccttctgctgcttcgatctcctcagaatctgtaaactcctctgacggttctgctgccgcagcagtctcagcctccggcgcttccgcctgttccgttacatcctcagagcctgtggaaacctcatcctgctcttcatcctgcgcagcttctttttcctccatatcctcttccgcagatttcttatgtccgccaaagatatcacggaatcccttggaaagcttctcctggaatgtctccgcactgttcagatcccgctcatcatctacctggatggtatctgtgaccggttttgcctcctcatactcgccggatgcttccttgctctccctgatctcctgcgccttttccggcgggatcagcttcgggataaaacgctgttcatatttctctttctcttcgccagtgagaacacccatccgctgtttcaggtcaagggccttcatcacataagttccgtcattgaaccaaaggatcatctcattgcagagatccaggcacttctgcttgtctcctgccttgtaatagagcttggccagctcataggaccagcgctccgtaaattccttctccttatattcctcaagaatacggatctgttcattcagagatgcattcttcgctctggcgatcttatatttcagtatatactggctgttatcattacctgccacttctctgtattcatcaaagaattctgtggcttcactgatctgtcccattttcagggaaacctcgatcagacggtaaagtatgttcttgccgatcggcgctctgtggtaggcaagaagaaaaatttccttgctctcttcatagcgcttgttggccgcgtagatctcgcccactacacaaagggtacggacgtttttcacacgacgccagtcaatgctgtcaacaatctgcatggcgcctttgtaatcctgggtctcgaccagcttattgatctgtcccagcttaacgcgaaactcctctttatccaaaatattcaccaactttccataatcagaatcagtttaccatatgcatacgggcttgtcaaaaccctttaggcatataaacatgcccctttaccacctgaaaaaccctgttgatcttgaactgatggctgacaaaatcatccagtcctgtacaggtgatcagagtctgtatatcgtggatgctttccagcagatatgtctgcctgctgctatccagttccgaaagaacatcatccagcagaagaaccggtgtatcccggatctttttcttcaccagatagatctccgaaagcttcagggaaagggccgcagtcctctgctgcccctgggaaccatacctccggatgtcgatcccgttgacctttacgcagaaatcatctctgtgcggtcccacggaggtcagcttcatccgaagatcccgctcccggttcctggaaagcttatcctcaaactccgccgccgtcacacttggctcgtacaggatctccagctcctcgatcccgccggtaaggcctttatgaagcccccttgcgatctcgttaagctcctccacaaaggcttcccgcttcccgatgatcttctttccgtaatcgaccatctgcatatcccagacatccagggtacctttcagcccggggttcatataacagtctttgagaagacggtttctctggttcacgatgtgattgtagccggccagctccgtgatataaacaccatccagctgacaaagctccgaatccagaaaacgtcttctctctcccggtccattcttgataatattaagatcctccggagaaaaaaacaccagattcaccacccccagcagctcccttgccttgcggatcggcagcccgttgatggcaactccctttgctttgtttttccggaggtgcatgtctattttgtatgaaagatcgcccttcttcaccatcattcggatatgggattcctcattctcaaagcggatcatctcccggtccttgcttcccttgtgggatttgctggtacctgccagataaaccgcctccaggatattggtctttccctgggcattgtcgccgtagagaatattggtgccctgatcaaaattcatctccagcgactcataattcctgaaattattcagtctgatggattcaatgtacattccttcacccgatcacataaatatcttttccatcgtaggaaatggtatctccaggatggatcttgcggccacggcggttctccacctcaccgtttaccagtaccagaccatcattgatggcatatttcgcctcaacgccgtcctccacaacaccggccagcttcagcgcctgaccaagcttgataaattcgtctttaattctgatctccaattttttctcctcttatctccggggtattttctccgtcagatcaatcttttctgatctcctggcggtatttaaaatcccccaaaatacaaatttcaccggaaggtggtaatttaaatccccccttccagcagtttacacacgaaacatttctcagaacacgatcgcattcccatataaaatcggtcaaaaacggtcactcattttaggtatacctgtttctgtcgatcctgataccggctgtcaggctgtacgcaccatacggacacttacatatcctggctgtcgatatcaattctgttcacagcttcaagcatgtgcgtctcacacgtacacccgcgctcccgaagctgccgcgccacctcttgtcccttatttcttatatacccaggtcttatctggcctgattctggttgatgtttacaggaaggatcaggtaagtatagttctcctcatcgtcacggataaagcacggggccttcggatttacaagatagatcgtcacggtttcatcatcaataacacgaagagcatcgatcaggaatttcgggttgaagccgatcatgatatccttaccctctttttcaatatcgatctcctcattcatggaacccattgcagaatcaatgcgcagctccatatcatcatctgtgatgttgatgatgattggttttttgtcaacctcacgtaccagaagtgtggcacggtcgatacaatccaggaactcttttttgttgatcttcagttttgtctcataatcactggaaagcatctggtcaattctgaaatattctccctcgatcagtctggaaactaccatagtctgatcaaattcaaataaaatatggttttttgtaaagtaaatgctgacctgatcatccacttctccggaaaggatcttgctgacctcgcttaaagttttgcccggaactaccaccttacggtcagaataatctttcttaagggacattttgcggatagagatacgatgtccgtccagagaaactaccttcagacagttatttttgatctcaaaaagttcaccggtcataagcttattgttttcatttacagcaatcgaaaaaatagtctggcggatcatttctttcagtgtgtactgagagatcgtcagcggttcatccttctcgatcatcggtaaataagcaaaatcttctcctgattttccggggatattgaattttgctttttcacaggtaatggttgctgcatatttatcatcggtcttaatggtaacatcattatccggaagtcgtctgatgatttcatagaagatttttgcatcaagagcaactttacctttttcttcaatagtaccctcaacgatcgtttcaattcccagctccatatcgttggtggtaaatttgatctggtttgtggttgcatccatgagaatacattccaggatcggcattgtggtttttgatggaactgctttgagtgcgatacttacactttttaacagacttgatttggagcagatgattttcatagtgtgtataactccctttctgaacaatttgtggtttttataaatatatttatagaaaaaatccgcagtaaccgccgtagggggccagattttgtgaaaaactcccgcaggcctgatgttttcaggggttttccgttgggataactttgtgtaaaagtggtattttcgcatgtgaataacccggggataaaattaccgccgcgttttggcaaaaaagttgtacacatctctccacatacaatcaacacgttatacaccagtaatgtggaaaacttccctaaccttgtggattaatcttctttttcaatatatcaatggtattttttaagttatcgtcgttctgcaattcgttttcgatcttttcgataccgtgcataacggtggtatggtcacggtttccgagcgcttttccgatatttttcaaaggtgtggatatgatctcacggcagagatacatggaaacctggcggggcatgacgatcttggagtttcgtttgtttccgcttaagtccgcaggtgtgactccgtaatgctctgcaacaacggagatgatgtattccggtgtgatcacttttttctcatccggagaaataatatccttcagtgcctgctctgccagctccagagttacttcctttttctcaagcttggctccggccatgaccttgttgaaggcaccttccagctcacggatattggatttgatattggtagcgatatatttgataacatcttcactgatgttgtagccgttcatttcttcatttttatgaaggatcgccattcgggtttcgtaatcaggcagcgtgatatctgcgatcagaccccactcgaaccgggaacggaagcgctcttccaggatttccatatccttcggtggtttatctgaggatatgatgatctgctttttggcactgtgaagactgttaaatgtatggaaaaattcctcctgtgtggattcttttcctataataaactgaatatcatcgacaagaagaacgtcgatatttctgtatttttcacggaatttgctcattgccgtgttatttccgtttcggatggtttcgatcagctcattggtaaattcttcactggttacatacaaaacacggctgttttcgtcgtgttccagaatgaaatgagcgatggaatgcataagatgcgtcttaccaagaccggctccgccatagataaacagtggattgtaggtatctcccggtgattcggcaactgcaagagctgcggcctgggcgaatttgttattacttcctacaacgaaggtgtcgaaggtgtattttggatttaaatgcgcctcttcgtaacgtgtatcctgaacctgtttatcataagaagtgtttttttctgtttttttggggagatctttttccagaacgaagcgaacctcgcattcttccatgcctgtcagtacacagatagtaacctggagggggattttgtagcgtttactgatgtaattgactccgatcgctgcctgttcagagggaacaaccactgttatcagctttccgtcaacctcataaactttcagcggcttgagccaggtattaaaagggacatcagtcacctcatattcagatttgacagtttgcaggatctcctcccatttttcaataacagcgtccattttttcctcccatgagtattataataaccccagtctgcgactggagatagatatccttttatatattacaatgaaaatggggttttcgcaatggaaaatccttgagattttggggaaaagaatgtggataatgtggggaaattactgtggattagggtggattattgtggataagagtcctggaggtttccataagtcgagaattggtggaaaatgtggaagaattatgtgtataaaaaaatccaccttaaaaataccgcaaataaagggtttttttgaaaacgatgtgaacaaactctccgaaaaagtggatagatttccggtcaatccacaagttatccacaagttatccacaaaatgtggataatgttacgtaaaccataagcgctttccacataagagaaaaaaataaataccgtaaggtgggggtattttacagaacccttgattttatcgggttttttgcaatttttacttgacgaaaaggatgtttatttatataattgaaacgatgttctgaatgataagttatttcataacaattaaaaatagataaaggaggtgctttacctatgaagatgacatttcagccaaaaaagagatccagagctaaggttcacggcttcagagctcgcatgagcacaaagggcggacgtaaagtattagctgcaagaagattaaaaggaagaaaacagttatcagcataagctgcaagaccgcatttatgtggtcttttcttctatccggagaaatatccgcgcaggcggaatctaattaaggaggattcgtttgatcagatcagagtccttaaagaaaaatcaagattttaaagttgtatatcagaacggaacatcgtacgcaaatcggcttctggtgatgtacgtgctgaagaatcagcacatgaagaatcgtctgggaatatcagtaagcaaaaaagtagggaacagtgtggttcgccacagactcaccagattgatcagagaaagctatcgtctcaacgaaacagattttgacagtaaccttgatattgtagtagtagcgagagccgcagccaagggcaagagctttcacgagatcgagagtgcttttctgcatcttgcaagaaagcatcatataacagggaatgaacatgataaagaaatttctgattaagatgataaggctctatcaaaaatatatatcgccgatgaagagaacgaaatgtccttatattcccacatgttctcaatatggtttggaagcaatcgaaaaatatggcgcgtttaagggcagtcttcttgcggcatggaggattctgcgatgcaatcctttttcccacggaggctatgaccctgtgccatgaattattttgtgactgttcagccttttcccgggcagagcagttaccggacttttacaattgaataagaagtctaggaggaaatgaatttggaactgtttttagcaacaaaaaccggaactcctattatcggacagatcgcgtctgtgatgggatggatcatggatggcatatataagatgcttgacggcctgttcggaatccagaacattggtctttgtatcattatcttcagtattcttatctttgcctttatgacaccgctgcagatcaagcagcagaaattctccaagttaagtgcgatcatgcagcccgagatccagaagatccagaagaaatatcagggtaaaaaggatcaggactccatgatgaaaatgaacgaagaaacccaggctgtttatcagaaatatggtgtttctccaaccggtagctgtgtacagttagccattcagatgcctattctgtttgctctgtatcaggttatctaccggattcctgcttacgttggaagtgtaaagaacatttttactggtgtagttgacaacctggtagctgtaaacggatacacagatatcctgcagcagtttatcacagaccattccatgacacgagtacgtctcgttatggacagtgccggaaatgctacaagtaactctattgttgattttctgtatgcactttctccttcccagtggaaagagctggcacagatggatcagttttcaggattttctgatgcgatcgcaaaagcatccggcaatatttccaagatgcagggcttctgtggcttgaatatcgcagaccagccgctgtattatatcatggaattcttcaaaaatcatggttctctgttacttgcgatcgtagcacttctgatcccggttcttgcatgggcaactcagatgctgaacctgaagcttatgccacaggctgcaacacagccggcagacggaaatgatcaggccagcgcaatggcaaactccatgaaaaccatgaacatggtcatgcctctgatgtctgcattcttctgtttcacattcccggttggtcttggtatctactggatcgccagtgctgtcgttcgaagtgcccagcagtttgcaatcaatcgtcatcttgataagatgaacattgatgatctggttaatgagaatatgaagaagatcgaagcgaagcgtgcgaaggaaggacttccgccgcagaagatcaccaatcaggctcatcagtccgccaagaatatcaataaacctgtgatcaataagggtaacagcggaaacaacggtgcttcagacagagcacagaaggttgatactgcttatgagaaggcaagaagtgcaaaaccgggcagcatcacagccaaagcaaatctcgtaagagactttgatgagagaaataagaagaaataatcaggaacggaggggttcgtaatggaggattacattcagttttcagcaaaaacaaagaatgaagctatcacaaaagcgtgtcttgagcttggaacttccagtgaccagcttgatattcaggttatcagtgaaggcagctccggattcttcggaatcggcagcaaacctgccgtgatcaaagttcgcagaatcgagccagtttctgatatgcaggagatcgatgaactggtagagtccgtgaaactggacgctatcaaagaagagaagaaattagaaaagccttttactccggatgtaaagaaagaatctgcaccgaaagcagctcctgcagaggagaaaaagccggtgaagaaagaagctatacaggtggagaaggcatccgaagaagcacctgcaaaggcagcagcaccaaaggaaagacctgcaagggatttccagggcaaagcaaagcctgcacgtgagaaacagccaagagctccaaaggagcgtcagccgaaggaaacacgtgagagagcaccgaagcagggcagaccggtagagatcctcagcgatccggagaagatcagagaggttgaggagagagcagtcgtatttcttcgtgacgtattcggctccatggatcttggagaagtggagatcacatcgaaatataacactgcagacggttctctggatgtggattttgaaggtgaggatatgggtatcctcatcggaaaaagaggccagacactggattctcttcagtatctgacaagccttgtggtaaacaaaggcgagtctacctacattcgtgtaaaactcgataccgaggactacagacgccgtcgtaaggaaactctggagaaccttgcaagaggaatcgccttcaaggtaaagaaaaccaggaaaccggtagttctggaaccgatgaatccgtacgaaagaaggatcatccatgcatctctgcagggcaaccgctatgtagagacagtcagtgagggagaagaaccttacagacatgtagtagtaaaactgaaacgcaataattgatgatccaccggtaaagctataagccgtatcccggagcgtaagctccgtgggtacggcttttttgtatggaactgaaaattaaaaattatcattgcaatctccgcaacaattctttataatcattgaagagcaaataataaaagatatttctgcagcggaaatccggaatgcagagattagagcgtatttgaaaaatcattcccgcaatctgcacgccccactttgcggtatattttgcccgaattcagttgccgtagcccgctacggcaactgaatccggacaaaatctcccacaaattgtgacgcacatcttgcagaaagcctttttcaaacacgctctagcattataaatatggaaactgacagaagatgttattctaggtgaaagcgtgaataacacgtgttttttgcgtgtaaaaagcttttccggagtaacatttttgcgtttaaccgtttaaccggatgcttttatctgctggaccaggataaacggtatggcagctatcagctgcagtgttatatagcggatgcttttatccgtttgataaaggagaatgaaaaatggaagagacaacgattgctgcgatttccacagccatgagcgcatcgggaatcgggatcgtcaggatcagtggcccggaggcttttgagatcgcatccggagtataccgttccaagggtggaaaaaaatctctgaaaaacgtcccaagccacaccattcattatggatatatttatgataacgaagaaatggtagacgaagtgctggtcatggccatgcgcggaccacggacatacacaggagaagataccatagaaatcgactgccacggcggcgttttagccatgaaaaaggtacttgaaactgtgctgaaaaacggagccattattgccgagccgggagaatttaccaagcgtgcatttctcaatggaaggatcgatctttcccaggcggaggccgttatggatgtgatacagtccaaaaacgagtactcattaaagaattctgtaggacaattaaaaggttcagtccgaaaaacagtacagaatatcagggaaaaactactgtaccatatagcgtacatcgaatcggcattagacgatccggagcactatgatctgacaggatattcggaagaattagaacagatcgtggcagaagaaaaagaaaaaatacagaacctgttaaaaacagccggagacggaaagatcatacaggaaggtatccggaccgtgatcctgggaaagccgaacgcagggaaatcttctctgctgaacctgcttctgggagaagacagagccatcgtgaccgatatcgcaggaaccaccagagacgtactggaagagtatatcaacctgcatgggatcacattaaagatcgctgacacagccggaatccgccagacggaagacatcgtagagaaaatcggcgtatccaaagccaaggaaatggcagcagacgcagacctgatcctctatgttgtagattcctccgtaccgttagatgaaaacgacgaagaaatcataaaaattttgcaagagaaaaagacaattgtcctctacagcaagacagaccttgaatctgctatagatatagaggatttaaagagcagaataaaccagccggtgatcccaatctccgcaaaagaagaaaccgggatcacagacctggaagaaaaaatccgggaaatgttcttcagtggggagattgacttcaatgatgaagtctacatcactaatgaacgccacagacaggagcttttaaaagcgcaggaaagtctttctctggtagaaaatagcatagaaagcggaatgccggaggatttttattccatagacctgacagatgcatacgaaagtctgggacggattctgggagaatcacttggggaagaccttgttaatgagatattttctaaattttgtatggggaaataataaccgcatgggctgcggaggccccggccgaatggccgcatagattgcggctccctgctgtatgccacatggactgcggaagcccgcagagggtagatcacattggaatgtgagaaaaccgcaaaggggcacaaggccgcgcccctctgcacacccctgggccttttttatatagtgcagcgactgtggaaagctgaaagaaactaacttgtgtctgtatgcttctgtatcggcaattcgacactgagccgaaatgtatcaaacggaactttgtatatttctataggatatatattgttgcataatatagattgcggagatctggccgcatatgccgcataggctgcggccccctgctgtacgccacatggactgcagaattccgcagacgtgcatcgcacgtcgagaacctcattacagttccactgcaaccccctcggcacaacgttccgcatccaataccgaagcatacagacaaaagtcaacaccgtaccccacaccacaacccaagaactcaaaacaacctcggcacaacgtttcacatccaacaccgaagcatacagacaaaagtcagcaccgtatcacacaccacaacccaagaactcctaaaaaaagcccgaggggtgtgcagaggggccgtggctttacggcccctttgcggttttccacagcttctcaaagcaaaaaaaccaggccttctgccaagaaatcaaaactaaaaccaaaaaccaaccacacaataaacaaagaaaaagaaaatcataaagaaaaataaagaaaaagaataagagaaaaaataaaggagaaaaagcatgaaaaatctggaacagtttttcgacatcatagtagtaggcgccggccacgcaggctgcgaagcatcactggcatgcgcccgcttagggctcaacacagtcatgttcacagtcagcgtagacagcatcgcccttatgccctgcaaccccaacgtaggcggcagctccaaagggcatctcgtccgcgagctggatgctctcggtggagaaatgggtaaaaatatagacaaaaccttcatccagtccaaaatgctcaaccagtccaaaggccctgcagtccattcccttcgtgcacaggccgataaacagacctacagcacagaaatgagaaagacattggaaaatacagagaacttaaccatccgccagggtgaagtgaccgagcttctggtagaagacgggcacatcaccggtgtaaaaaccttctcaggagccacctaccacgcaaaagctgtagtcctctgtacaggaacctacctcaaggcccgctgcatttacggcgacgtcagcaactatacaggaccgaacggccttcaggcagccaattatcttacggattccctgaaaaagctggggatcgaaatgtttcgtttcaaaacaggaactccggccagaatcgccggaaacaccattgattattctaagatggaagagcagttcggagatgaaagagtcgtaccgttctctttttccacagacccggaagctgtacagatcgagcagaaatcctgctggctgacctatacaaacgaaaaaacacacgagatcatccgtgcaaatctggacagatcccccctttattccggaatgatcgaaggaaccggaccacgttactgtccgtccattgaggataaagtagttcgttttgcagacaaaaaacgccatcaggtatttatcgaaccggaaggtctttacacaaatgaaatgtacatcggcggaatgtccagctccctgccggaggatgttcagtacgagatgtaccattctgtaccaggtctggagaatgccaagattgtaaaaaatgcttacgctattgagtatgactgcatcaatccgcgccagctttatcccacactggaattcaaaaagatcaagggccttttcagcggcggacagtttaacgggagctccggatatgaggaagcagccgctcagggcctcatagcgggaattaatgcggctatggaggtaaaaggccgggaacagctgattttggaccgctcagaggcatatatcggcgttctcatcgatgatctggtaacaaaggagaaccatgagccatatcgaatgatgacaagccgtgctgagtaccgtctgcttctccgacaggacaacgcagatctccgccttcgcaaaaaaggctgggaggtcggcctgatcgatgatgagacataccataaattacaggaaaaagagcgccggatccaggaagagatcgagagagtggaacatgcaaccgtaggtggttctgcagaggtacagagccttctggaatctctgaacagtacccttctgaaatccggaaccaccattgcagagctgatccgtcggccggagcttaactataaggtgcttgcacctatcgataaagaaagaccggagcttccggaagatgtatgtgagcaggtagagatcaacatcaaatatgatggctatatccgccgccagatgaagcaggtagagcagtttaagaaactggagcagaaaaagcttccggaagacattgattacgaagatgtaggaagcctccgcattgaggcacgccagaagctggaagcctacagacctgtgtccatcggccaggcgtcccgtatctccggtgtatccccggctgacatttccgtgcttcttgtatatctggaaagcagatccggacacaaatactgataatacaaagaataacagcaactattcagaaggcaggcgttttggcacgtttttttgccaaaatcccgagacatataaggcaaaatgatatcaccgaaggtgatttggaatgcattttgactcgtaactgtgagggtactgaacagttatgaataacaataaaacacagaaaataagagaggaagctgcatgtacaatttagaaatcctggaaaaaggctgcgaggagcttgggatcacactcagtgacacgcagaaaaaccagtttatccgattctacgaatatcttgtagaaaaaaacaaagtcatgaacctcaccggtatcacagaatttgacgaggttctcgtgaaacatttcctggacagcctctgctgcgtcaaggctgtagatatgagcaatgtaaaaaccgttatggacatcggaaccggtgccggattcccgggtgttcccctgaagatcgccttcccggaagtggaagcctgccttctggactccctcaataaaagagtaaaattcctggaagaaacctttgcgctcctgggcctggaggggatttccgccattcatggaagagccgaagaatatgcaaaaaacaaagcctacagagaaaaatatgatctttgcgtatccagagcagtatccggacttgcaaccctgtctgaatattgtctcccgtatgtaaaagtcggagggctttttgtctcctataaatccggttctgtaaaggaagaagcagaagcagcagagaaagcagtaaagatccttggtggaaagatcagggatattcagtactttgaccttccgggctccgagatcggccgctccctggtcattatcgagaaggtaaagaacaccccaggcaaatatccgagaaaagccggaacaccgctcagagagccactggcataagatacctcctgtcgaacaaagtcaaaatctgtccgacaggagatttttttgtccgggagtttcacaaaattatcacaaatttatcctacttttatcacaaattacttttacactataatccgatagagatgcccctggattcccccattctctgtttcatccgggggcattttctattggtattgaaaagacgccagagtcaagggcttcagtttcaggaccttttgcctctggcatcttataaaatgggaaatcgataattaaaaaaagtatttccctgagaataaaaggaggagagtaaagtgatcgaagtaagtaatctggtcaaaaagtatggtgatcatactgcagttgaccatctttcctttcagatcgaaaaggggaaaatttacggattcctgggccccaacggtgcaggaaaatcaacaactatgaacatgatcacaggatacattgcttccacagaaggaaaagtgatgatcgatggtcatgatattctggaggaaccggaggcagccaagaaatgtatcggctatctgccggaaatgccgccgctctattttgacatgactgttcttgagtacatgaaatttgcggctgatctgaaaaaaatcccaagaaaccaaaaagacaagcagataaaagaagtcatggatatggtaaagatcacagacatgaaagaccgtctgatcaaaaacctttccaaaggttatcgccagagagtgggtcttgcacaggcgatcctgggatatcctgaagtgatcatcctggatgagccgacagtaggacttgacccgaagcagatcatcgagatccgtgacctgatcaaaggcctgaagcagaagcacacggttatcctaagctcccatatcctttccgaggtaagagcagtgtgtgattatgttctgatcatttcccatggaaagctggtagccagcgatacaccggataatctggaacgtctggcagcaggctccaacagcctccttatgaaggtaaaaggcgagaaagacacgattcgaaaagctctggaaacgatcgaaggcgtaaccggggtggaaatgtcctatgacagcgatgagaaattgtggaaaacaaaactttccattcaggaaaatgtggatatccgtgaaaaagtcttctacgctatggcaaaagcgaactgtccgatctacgagatgcaggttaagagagtttcccttgaggatgtattccttgaacttaccgaaggagagaaaaaatccgccggaaaaccggaaagctcacagtggaaaccggtagaagacagatcatcggaagaagaaaaaactcaggaagaaaaaaacggggaaccagagaaggcttctgatgagaaagagggggatcagtcatgacagcgatttttaaaagagaactgaaaagctatctgacctccatggttggatatctcttcatattttttgtcctggtgctgacgggaatttatttttccgcatatcagctttcaggcggctattcaaaatttgaaactaccttaagcgcactgacctttgtgttcctgatcggtgtgccgatcctttccatgcgtgtacttgcagaagagcgcaagcagaaaacggatcagcttcttctgaccgcaccggtatctgtatgggatatcgtatttggaaaatatcttgcactggtagctgtgtttgccattccggtcgtgatcatgtgcgtttatcctttgattatgagtaagttcggaacgatttcctatgcttccgcatacaccggaatcctgggatttttccttctgggatgcgcgaatctggcgatcggtgtatttatgtcagcacttacagaaagccaggtaattgcagcagtacttacgtttgtattcctgttcgccttctatatgatgaacggaatttcctcattcttttcacagacctccatgtcaaccgcagtggcattcggacttctgatcgtggcgatcgcgatcatcatttatactatgatcaaaaatgtcctgatctctgtagtgatcggagctgtgggagagattgcccttgtgatcgtatacgttgtaaaatccagtattttccagggtggtatccagaaggtactgaacgtatttaacctgagcggacattatgataattttacaaacggcgtgtttgacgtgacaggaatcgtttattttatttctgttattgcgatctgcctgttccttaccatgcagtccattcagaagagacgctggaactagggggtgaatggaaatgaaattcagtgataaatttaagaaaaataaaggcgaggcagccgtaccggagaccgcacaggactccggcaaaaagaaacataaaccggatccgaaaaagctggtaggcaccatcagcaaaaaacatatcaaaaatggttcctacagcatggctatggcagctgtctttatcgtgatcgtggttgtgatcaatatgatcgtcggggcgatcccatccaaatattcacagctggatgtaagctcatccaagctttacaccatcggtgatgaaacaaagaaggtactgaaggcactggataaggatgttaccatttatcagatcgcggcaagcggttctgaggacgacacgatctccaatctgctttcacgttataaagatgagtccaagcatattaaagttgaggtgaaagaccctgttgtaaatccgaaatttgcatcagaatatacaaccgatgatcttgcgtcaaacagcctgatcgtagtctgcggcgacagaaacaaggttatcaattacaacgatatgtattcctcttcagtagactataatacctggcagcagactactaccggatttgatggagaaggacagatcacaagtgcgatcggttatgtaacatccgaggatcttccgatcatgtataccttatccggacacggagaaaaagatctggattccagctttaaagaagatatccagaaagcaaacattgatatcaaggagctgaaccttctcacagagggaaaggttccggatgatgcagactgtctgatgatcgtatctccgaccagcgatatttccgaggaagaaaaaacagaactcctggattatctggaggcaggcggaaaagctatgatcttctcggattatacacaggatgatctgccgaactttgatgcggttcttgaaaactatggtgtaaagtgtgcagagggaatcgtatttgagggtgataatcagcattatggaatgcaaatgccatattatcttgtaccaacagtcaacagcacagatgcaagctctgagacagcttctgcaggctcctatgtactggcgccgtatgcgcagggcattcagaaaacagatgatgtaagagataccgtaaccatcgacagtatcctgacaacctctgacaaggcttactccaaagcaaatatgcagagcagcaatatcgaaaaggaagacggagatgtagatggaccgtttgatcttggtgttgccatcactgagaaactggatgatgacaaagaaacacagattgtttactattccacggcaaatctgatggagagccaggtaaaccagatggtatccggcggaaatgaaaagctccttctggagtccttaaactggatgaccagcacagacgacagtaattccgtttctattccatccaagagccttgagtccacaagcctgacagtaaccgattatgatgcagccttctggaagatctgtaccattggtctgatcccgggagtgttccttgttgcaggattcctgatctggcttaagaggagaaaagcataatgaaaaaatcgaccaaacttgtttcagcagttgttgttctggcagttctcggcggcgtttatgtgggactgaacacctacgtatccaaagaagaaaagacagagagcagcgaagaggaaagcaaaacagaagtgttttccgtgaaaacggatgacattaaatccttggaatttatcgtagacaagaaggaagtgacctttgagaaaaaagatgattcctgggtgaaaaaggatgagactgcttttcctgtaaatcagacaactctggattccgcagcttccgccatcaaaaaggtggaagcggacagagtcctggaggatgtggaggatcttacggaatacggactggattctccatctaacacagtaaccgttgataccgctgatgggacaacgaagctcaacatcggagatgagaatacgtctacgaatcagtattacatttccagggatgatgatgacagcacggtatatgtagtggcagcggacacagtgtctccgtttatgaattccctttacgattatgcacagggagaagatttcccaacaattgattcttccacagtgaaaaaggtccaggtcagcgaggataaagattcctatgtcctggaagaaaattccgacggagctacatgggatgtttccggtgacggaagcagcgataaagagtctgccgatacaacggcagcaggaaacgtaacctccggacttggaagctttgcatttgaccagtttgtaaactacaatgcagaggatctttcccagtatggccttgataagccctatgcgacgattacagtggattatcaggaagaggtggagaatgacagcacagacagtacagaatccggagaaaacgattctacggcctctgagagcgatcctgagagcagtgacactactgacacggacagcagctcagaagatgcagacagcaagacaaccacagtggataaacagcttgtcatttacgtcggtgatgaggcaggagatggcagcagatatgtaacggtagataacaaacggatctatacaatgtcaacggatacactgagtgcagttattgacaagacgccgtcagatctctggtcactgatcgtcaattatctgtctgtaaaaaatctggatcagctccaggttacttacggtgaaacaacaagtactgtaaatgtttcacgtgaaacatccacagatgatgacggaaatgaaaaagaaacaacaacctatcagctggatggtaaggaaatagaaagtacaacctttaccaccttctacaacaagctgataaacatggcaggacagaagagactgacagacgcttatacaccggctgcagacccggagatgaccgctgtattcacagactctgacaagaaccagacaaccgttaccttctacacatatgacacaaactattatgcagctgtcgttggagacaaggtatttcttgtaaacaaaatgacagtaaaagaaatgttcaatgcatatgaaaccatggtaaacggtgaaacagagacagaagccacagcaacaccaacagctgaggcggaaaaataaaatattaagaaaataaataaaaacacctcggagatccgcaaacaataaggtgatctccgaatatccgtttgatgatcagatattcggagaccacacagatcaggattttccggggtgtttttatgttgctgttattttacggtccttacagatgaataaggtccgtatatttttttaccgtttgtgatgcggtatgcacggatacagtatttggttgcggtgcctggctttttatcggtgtaggttgtattttttgtattgccgatagctttccaggttttaccatgaagacggtaaatggtgtagcataggtgatgattccgtctgtttttgcggtcagtggattagatgcataccaggttgcctttccattgaaaaccgcaggcttgcagtcagaaagagctccggtttgtgagtagatctgagaagtcatattgccgcttcttctgaatctgacaggagtgtttctgaactgaaatctgctgcataggtcaggcacggtgtactggcgatcatggcagcggagatcataagggatagcagttgggttgttctctttttcatagatttccttcttatgtatgcgtgaatttttggctgcaggtaagtctcttatgtatgcgtgaatttttatgttgcaggtaagtctcttatgtatgcgtagattttatgttgcagataagtctctgtaattgtcgcagcttgctttgcgtaactgtgcagggatttacctgatcagatctaagcaaatgaggatgcttttatccgcttgattttctgtagctgctataattgtagcgtagagaattggtggagacaacataaaaaaactgtacagaagctcagatgagattctgtacagttttaatttttctatatctaacagaaggttcgggggagcttctgtcagtaactaagtattatgcaagacctctttcttccagccagtcgaagagaacaactttttctgctttctttctcttggtcatgtgattgaactgaaggatcgtcaggatcgtgaagatcactaacagtgcaaccattacaataatggaagtggtaatgctccggccaccgctgatcgttgcacggaatgcatcgaccgtataagtaaacggaacgtatgcatggatctttgcaacgaatgaaggtgaaacctcaaccggataagttccggcagatcctgcaagctgaacgaccatgaataccagcatcaggaagcttcctactttaccaagagtaatgttgaagaagtacatgatagaggtaaaggtcattgatgtcaggcaggcgaagagtacggttttgcccatctctgcaggtgtgaatccgttaaatgcacgtaacagcaggatcaggcagattccctgaaggatcgctaccggataaaggacggaagccttgcttgcccaccatgcgaaaccggatttcagtttgcccttatactgagccagaggatacatcaggcagaatgccagtgcgccgacccagaggccaacagacatcatgtaaggtgccattgcgtgtccgttattcgggacatcggtaagttttgtttcatcgcttacaacaggagttgcgaacattttgatcgtttcatcacttgctgaattgtcttttacagtggtagctccatcgctgaggcttgtggtcagtgtcttggaaccgtccttcagttctttcataccgcttccaagcttcttggagccatcatacagctgagaggaaccgctctgaatctgggcagcgccatctgcaagctgttttgcaccattgttaagtgtgctgttgttgcttacaagcttctcggtaccgctgagaagtgttgaggtaccgtttgctaatgtcttagttccgtttgcaagagtagtagcaccgctggaaagggttttggctcctgttgagagctttttggtaccgcctgtaagagcggagctgttttcggaaagcttagcaacaccatcggtgtaggttgtgattccggttgtcagtgttccggaaccatcggctaatgcttttgttccatctgcaagagtagcagcaccgctggaaagagcattggctcctgttgccagtttcttggtgccgtttgtaagagcagcactgttttcggaaagcttagcaataccatcggtgtaagttgtgattccatttgtcagtgccttagaaccatctgccagctgacctgcaccggatttgatatccggaagtgcgttagtgatctgcttgccggctgttttaagattctttgcaccgtcattgagctgcttatcataagatgtcagttggtcaaatccatcgttcagagctttgattcctgttgctgcagccgggaaggcttcgactgtgccgtcttccagagactgaagtcctgcggaaacgttcttggttcctgtgtttacagcctgtgcaccctgatacagctgggtaacacctgcagaaagctgagcgatcagatctgtaggaagctgacttgtagctgcagataactgctctgcacctgcgctcatggttgttgcacctgcactcatctggtttgcaccatctgtcatggttgttgcaccctcagaaagtgtgccggcaccctgagtcagtcctccggagatctgagtcagtccggaagctgcttcgttaagcttggaagcaacagtattcaggttttcctgagtagaagagagctgaccggatacaccagctgcaagctgtgaaacctgatcagaatagctgctcatgtaagaaccgtccacgccagtcattccaccggctacgctgtttaaagcgttgatcacatcattcagagctgctgcggaaatggttccgtcctcagaagcggttgcctgaatcgcctgaagctgtgctgctaaatcggtcattgtctgtccggcagtaccaatcttggtatttgcatcagtaagtgcttccgttgtctgctgtccgtatcctgtaaggatgctgctgacctgatcacctacctgtgagaactgtgtgcctgcattctggagagcagggatcagactgtctgtgatactgctgctggtctgacttgtgatgcctgcggcctgagtgatatatccggctgcgttgttgattccgtctgcggcattgttcataccagctgcagcactgttcataccagctgcggctgtgtccataccattctttgcggacgtaaggccgtctgcaagcttgttgatggattcctgtgttgttccctctttcagagcagaaaccttatcgttcagggctttcagtccgttttccagctgctgtgttccggatatcagtgactgtgagtcatcggttcctttggtaacaccggtattcagctgagagataccattggaaactgttgtgagtccgtcttcaagttttgcaagctctttggcaccggctgcgagtttgccagcaccagccacataggtggtagttccatctgcaagagtgtcagcaccagctacatactgtgttgctccgtcggaaagagtatcaatacctgcacttaatgcatttgcaccggattccaagctgcttgcgccggatttcagtgtatcagaatttttattaagttcatccacaccagcggtgtactgctgaacacctttatccagagtatccacgccggttgtcagctcaggaaccttttctgtcagagctgcaacgccgctgttcagctggtttgcaccggattccaggctgcttgcgccggatttcagtgcatcagaatttttattaagctcatccacaccagcggtgtattgctgaacacctttatccagagtatccacaccggttgtcagctcaggaaccttttctgtgagagttgcaacgccgctgttcagctgatctgcaccatcgtccaggctctttgcaccatcgttaacctttgcaacaccatcggtgtaggtcttaagaccttcggtgagactgtcagcaccgcttacgaaagtaagagtactggtggaaagcttcttaaggtttttggtaattgttttgttaccatcagctgctgtattcagtccgtcttcgatctttccggatccgtctgcagcttcctgcattccgtcacctgcttctgagatagaatcaaaaacggtttctgtataggtttccgtaaccttggaagcaatgttatcacgaagcttcagcattgctgtttcactgagcttggaggcgatatagttggttccagggtttgtctcataggatagctccatttgctttggatcgttgtccattacagtggctgcgtttgcggagaaattttccgggattttgataaccatgtaataggttccattggccagaccgtcctctgctgtcttgctgtctacaatgttaaatgccattgagtcgttgtctttcagctcatccgtcatgtccttacctatgcttaaggtcttgccattatactcgacaggtttgtcttcgtttaccacggccactggcaggctgtctacgtttccgtaaggatcccacatggatttcagaaacagacctgcatagatgatcgggattacgataatggcgattacgacgataagcatgagcttgttacgaagtaagcttttccattcgtttttgatcatattacctatccctttcttattaaattgtattatcaaacatagttgattaatcaaactttattccagtaatggcgacgagatctattaatcatattaaaatctattaatagctttatattccattatcaaacaaagtgttgattttctttacgtgatgtattatactaaacacataccacagatacaaccattaaatctttactgaatgtatattaatagacggaaataatggaagtgtctattacaaataaaaaactgcataatagacaaaaagtacgttatttcctttgaatttatgtgcagttggtaatattaaatgcagacaggattcctatgtttcaacacaaatatgcagcagatatctggtatcgtgtaggtcggcgtcgttaacaattttgaacttgtcaattcttaacaacagcagatatctggtatcatgcagatcggcgtagagaaagcgaatgcttttgttcgtttgaaggatgcattatgcattgtatgacagttgcagagtatcgtaagtaacaggtgattgaggcggaggaaacgtgcttgcttttttgaattgcagggggaattaagatggcggaaaaagttgacagaagagtacgtaagaccaaggcacagttgcgagcggggcttgcccgtcttatgcagaagaagagtattaaggaaattacggtaaaggaactggtggaagaagttgatatcaaccgctccacattttatcttcactatacagatatctatcagatgctggaatccatagaggctgaattgatggaggaaatcacgcatctggtggcagactatcctctggatcctcttaataataaggagagctcgtatccttttattgagcagatatttacgatcctggatcataataaggatatttgtatcgcacttcttggaaagaatggagatatggcttttgtgaatcgtatagaaaaactgatcgcagatacagtgctgcatcgcttgtcaattcgtctgccgaaagacaaccgtgatattgagtatgcgtatgcgttttgtctgaatggatgcgtaggaatgatcaagacatggctgtcttctgagaatcaggagagtacacagcatatggcagagttgacacataagctgatcgataatacaacacacatgtatctggagcaggcacttagataagagaaatgtccggatgcatgctgtgagtctggtaaaaaataaagagtattgtttcacgtttgtttgagggaaaactcatgtttcacgtgaaacagtactctttttttattggctttttgttggtttatagcatttccacaaattactgtatggagctcaatggctccgaatatgaacaatgtacttttgatgcgttgatttccaaaattactatagataaattttggtgccggatcataagttgtttttacaggaaaatagctacctgttccaggaaatgttccggatcttccagatgaggaagatgtctggtttccgggatcacagcggtttcaatggaagaattcagcttctggtattcctctgcgataagagaagcggaagcttctttttctccggaaataatatagatgcatgcatcggaagattctacggcattattaatgctgatattcaggtatttgccaatgtagctggaatacagatatttggcgttggaaccacccttgtgagcggattcataataggtgtctaccagtgtatctgttacatggaagggattgtagaacagcttttccataaacagactgctgatggattcgcgggaagctaccatatgatagatcagagttccgaaaatcggaagctcgataaaatacttaaagagcttgttgtctttacaaggtgcctgcttcagggaactgaagcttggtggattgaccagcatgatcttgcggaaatggtcggaattgttacggtaagccatgatcgcaaaagaacctgagaaaccactggcaataacatcggtttcctcacgaatcacattcttggcaaaatcacaaagtaactgagcaaatacaaaattggtataagtaatatccggtttttcggaacgtccacatccaagaagatcaatggtgtaaactgtatgttcggttgcgagctgcttctctatggcattccattcataaccggaagcgcctggcatgatatcatgaataagaagaataggggtgccatgtccctgttttgtataaaaaatctttccaaaacgccagtcataggttttgctgtgtggctgttccagcatatctttaagctgagatgtggcatctatgaaacggttagcaatatgaataacacctgcggcagttccgactaaagctgcaagagtaagtagtctgtgtccatttttcttcattaaaaagcctcctggaattcgtaaaaataatcaggacagatgtaacgtaattcaggtatctgatctgattttttctgaatatttctttgctttattatacgacaggaacgaaaaatttacaatgcttttgtgggaaccctaaccttgttattgtatgctgacgctactgtccattctgttcttggcgatgatcgctaagttgctgttcattctgctttcagtaacgcgcttcgcaatgcaaagaatttatgttgatcgcataaattggtgcggtatggtctcgggctttctgcgaccttcgtttataaaaaaacttacggaatattatcagtgaacagtagcatcgccaatatgcttcatgatacatagaaatcagatttggaaccgaatcaagtaagtcccctgctttaattgcgaagagcaataagcagagggcgtggatttgcttgtatcatgaggaggaaaagctccttctgataaactgcaaagcagttattttgttatgagcaagtagcgaagcggatgctgttatccgctggaatgcttttatacttcagtaaaataccaagtgtttcacgtgaaacattggacttgttatccgacagagctgatgctatacaggattgccgaggatgatgttgataagggttttgttcagcatcagtgtgcggttccatggattgagaattactccctcaacagacggctcttgcaatgcagaagcaaaaatcttatcaatatctgcggtaaatgtggacatgatcttatcactgccttttaactcttcgtcaaaactggtaaatgcagcccaccattgctttccatcgttggttttgatcgcatgaagagaaatttttccatcaccttttggaggttctacagcaatgatcagctgtgcctgctcctgcattctgtgacggatcacggtgagagtatgagcaagcatttcttcggttgcttctttttggagtgctgcaatggcagtttcgatcttttcattgccatttaaagtcttgtctaattgttttttatagaaatcgttgcgattatttgtggtgttcatgtataaaatattcctttcaatcagatgataaatgactagtacattgttttcgaaataactataccaattacttgttggtgaatccgactgcacagatctaaaagcctcagcatagccagctacgcctgcatttttatacctgcacactcgaatccacatcccacgcgattggtatagttatttaagaaacaatgtattagccgcaaactgcaaggagtttgcgaatgctttctttatggattatagcatttcaggggaaaatgaggcaagagaagaagtgtttttaactgaatcaaataagtcccctgcttcaattacgaaaaagtaataagtaataagcagtgggtggcgtgtattaggaagaatgcaacggcgtttagaagcagggaaaggaatagtgggcatgtctaaaaacaaggtactgcactaattcatgtggccactgttatgggtacattgtaagctggtcctgataaattgcaaagtagctattgggtgtagaactgcgtagcgaatacgggtatttttattcgtttgatcccaaattggatagatatgtttgcacacttgaaggtgagttgccagatactgtcatcagtattctcaaggatttcgatcagatgcttttgtgaactggatggggaattaacaagttaagtgaatgtagtaaaaatgtgtatttatatgaaaaaatagagggtaaggcggaaaatatgggggattttatagaaaaacgatataagagtaaggatgaaataaagagaaataagagattatttctgcgaagagagcactatgataatgataataacacaaacgttgagtacgataaaaaggactttataaaagaaaatgctggcaaataaagagaaataataggatatttacgaataaaaaagtattaaagtacaaattatagtactttaaataaaaaaagtacgataaaacgtactttacacgcatgcacatataaaaaaaccttaaaatataaaatgtgcacctgcacacatgcgacaaaaagataaaatatagatccgttcctactttaaacatgtaaaattttgattgattgaataaaagaaagcagcagcttcgataaaaaaaataagctgtaggtgggaaaatacttgtactcttcctgataaactgtaaaacagctattttgtgtaaaactatgatcgaatgcaaaaaaaattgtccgcatgactgggataaagggaaggcagggaagtcttttacggcttgatttagaagaaaaaagcctattaagtgaaatttattttatgccagttctatgccggaaccttattcagatacattttatattggatattacaaaatgaaactatgcttgaaaaagcctttagttaacatgtatataacgaatatataacaggattggaagaaaaatgaaataaatacgcaaatctttcgtaaacataataaaataaacaaaaatcgaaaattccagtttcataatattatatttttttcacgagagatacatgtatttcacactataaaaacactccgggaaaagaagtttccatttactatatatagatgcttttggggaatataaagataacagccacattattttgtggatggagtttcttgtattttttacatgctttcgtgatacagataatgccagagagaatatatcggagtatttttttgatatttctcattgattttataatgtgttcgtaactgttcagtacccttgcagttacaagtcaaaccgtgtcctggatcgatttcgttgatggcatttttaaccggatcgaggaagtcacttgattcaattatgaatattggtttgataatccatcttcggatgtttcacgtgaaacatccgaagacagattaagaataaagagttataaccccatctttgacaattgcagaaataaaaaacagctgtagttcgtgcttatgtgttttatggtaggtttaatatagattttaatcgaatcaagtaatttacctgcttcaattgtgaactacaataagcagtggttggggacttgcttgtatcaggagaagtacagtctccttctgataaactgcgaagcatttattaagctatgagcagtagtgaagaggatgtttttttccgcttgacttaaaaaatgtttcgcaacaatgacaactcatatgcgctttacggtagcgtgatatagtttttaatcgagtcaggaggtcccctgcttcaagtgtaagaagcaataagcaacggttggtgacttgcttgtatcaggaagagtacaagcaagttttgataaactgcggagcagttattcggtgtaaagctgcgtagcaactgcggatgcttttgtttgtatgactcgaatcaggaggtcccactgtttttggcttcaactgcaagaaacgataagcagtggttgaagaactgcttcttatcaggggagagtagcttgtagtccttttggtaaatcgcgaagcagttattcagtgtagaactgcgaatgcgtttacagatacttttgttcgcttgataataatagtaatgtttttagtgttcagataaaatttgaaaatgctataaatgctgtaaaagaaagggatttcgatgcctatgtagcagtgtgcaaggttccataaaagataatatatctataccgagaaaatcgaattattttcgagattacgataaatcagaacaatttcagtaaaatatctataaatgggaacttcatttctggtacgtttttatggcgtaaaatatatagtctgattggtaacaaataaaactggaagtttatgcggagttgatggactttataatcgatgtactgttactgtcaaacttctgtttagtccggaatgagtttgggtatactacacaataaataaaataattcaaaacctattttctattgtttcacgtgaaacattatgtggcagtttaaaaataaaagtgttataatgatatccaatgagtaaaaatcccttaaaaaaataaaaaggaggggtacaatgggacgaatcattgcagttgccaatcagaaaggcggggttggaaaatcaacgacagccatcaatctatcggcctgccttgctgaaaaagggaaaaaggttcttgccatcgacattgatccgcagggaaatacgaccagtggacttggcgcagacaagaatgcagtagaaaacaccctttatgagctgctgcttggagaagcagagaccaaggataccattataaagaacgttgtagataatgttgacctgataccatcgaatatgaatctttccggtgcagaaattgaactggttgatcttgaggataaagaatttattctgaaaaagatcacggataaacttcgccggaaatatgattacataatcatggattgtccgccgtcactgagtatgcttacaattaatgctttgacagccgcaacctccgttctggtgccgattcagtgtgagtattatgcattggaaggtttgtcacagttgatacataccatcgaactggtaagagaccgattgaataagagattgaagatcgaaggcgtggtctttactatgtatgatgccagaacaaatctgtcacttcaggttgtagaaaatgtaaaagaaaacctggaccagaatatatacaaaacgatcataccgagaaatgtacgacttgcagaggcaccaagctatggaaaaccgatcaatctgtacgattcacgatctacaggagcagagagttatcgcctcctggcagaagaagttataggcagggagggcgagtgatggctggaagaagaacaggaggtcttggaaaaggtcttgacgcactgatcccgaacaaagcaggcggtccgtcaaaggaacctgcaaaaaagacaagatctgcagttgtaaaaaaagacaaaccaactgaaaaagataatccggccgcagaacgacttgtgaaaatttccagcgtagaaccaaatctgaatcagcccagaagacattttgatgaggatgcgctgttggaactttcggaatccattaaacagtacggtgttcttcagccgttgttggtatccgataagaaggattattttgagatcattgcaggcgaacgccgctggagagctgccaagatggcagggctcaaggaagttcctgttgttgtaaaagagtttacagaccaggaaatcgtagaaatttccctgatcgagaacattcagcgggaagacctgaatcctatagaggaagcgatggcatacaaacgtctgatggaagagtttcacctgaaacaggatgaaatcgcagacagagttgccaaaagcagaactgcagtaactaattccatgcgtcttctgaagctttcttcaaaagttcaggaaatggtaattgcagatatgatctcagctggtcatgcgagagcacttctgggaatttctgatgaagctcttcaggaaacaacagccatgaaggtttttgatgaaaaactcagtgttcgtgagacggaaaaacttgtaaagaatctggtttttcctgcgaaaaaagtaaaaacagagagaaacacagcagaagatgccatttatgagagcctggaagaaaaaatgaaaggtatcatgggaacaaaggtatccattcagcgaaagaaaaacaacaaaggtaaaattgaaattgaatattattccagagatgaactggagaggatcattgatctgttcgaatctatcagataggaggcagaatgagcgggatttttgaaagcatgggaattgattccgggattgtgatcattgttttgctgatccttaccatcattcttctgatcaatgtggtgagtagcaatatgcgtctcagccgtttggaacggaagtacaagatgtttatgagaggcggagatgcacagtcactggaaaaagtttttgtaagaaaatttgcacagatcgaccggctgtatgaagcaaaggaagatcatgatcatgacatcagctttatcaaaaaaaatatgaatgtaatgttcagcaaatatggcgttgaaaagtatgatgcatttgatgatgtaggtggaaaactcagctttgcactggcgcttcttgataaaaacaatacgggtctgatcttgaatgcggttcacagccgcgataactgtttcctttatttaaaggagatcgtaaaaggtgagtcctatgttgtacttagtcaggaagaagtggaagctttgagaaaagcagtaaactttggacttggtgagattgagaaggaataaaaaactgcaaagagtaagaatatttttaatacaggaggaatatcatgttagacattaagtttgtgagagagaatccggaggttgtaaagcagaatatccgcaataagttccaggacagcaaactggagctggttgacaaggttctcgaacttgataaagaaaacagagagatcaagcaggaggttgaggctctccgtgctgagagaaacaagatctccaaacagatcggtgctcttatgggccagggaaaaagagaagaggcagaagaggttaaaaaacaggttgctgcatccggaactcgtattgaggaactttctcagagagagaaagaggttgaggaagagcttctgaaagatatgatggtgatcccgaacatcatcgatccttctgtaccgattggtaaagacgacagccagaacgtagagattgagaaatttggtgaaccggttgttccggattttgaagttccgtatcatacagatatcatggagaattttgatggaatcgatcttgacagcgcaagacgtgttgccggtaacggattctattatctgatgggtgatatcgcacgccttcattccgcagtaatttcctatgcaagagatttcatgatcaaccggggatttacttactgcgtaccgcctttcatgatcagaagcaacgttgttacaggcgttatgagctttgcggagatggatgctatgatgtacaagatcgaaggtgaggatctttacctgatcggaacaagtgagcattccatgatcggtaaattcattgaccagatcatcccggaggaagagcttccgaagacacttacaagctattctccgtgcttccgtaaagagaaaggtgctcatggacttgaggagagaggtgtttaccgtatccatcagttcgagaaacaggagatgatcgttgtctgcaagccagaggagagtaagatgtggttcgacaaactgtggcagaatacagtagatctgttccgttctcttgatattccggttcgtacgcttgagtgctgctccggtgaccttgctgatcttaaggtaaaatccctcgatgttgaggcatggtctccacgtcagaagaaatactttgaggtaggaagctgctccaaccttggagatgcacaggcacgtcgtctgaaaatccgtgtaaacggcaaagatggcaagaaataccttgctcatacattaaacaatacagtagtagcacctccgagaatgctcattgctttcctggagaataacctgaatgcagatggatctgtaaatattccaaaagctctgcagccatatatgggcggtatgacaaagattgagaaaaagacacgcgcgtaagagaaacgcaggctttttcagggaggtgttcttgtgcacagttatttaaagaccgttggtttttcacagattaccagaagaagtgaaataaaagagatcatccgtgatgtgatcgcaagctacgatgaaaaggtttgcgtggaaaatcatccggaaggcgtatttgtacagttttccaagaattatggctgtgactgtggaatcagcgtttgtggtcagtacgatgagaacggtgagtttcacgtggaatattatttcccatttttcaggggaacaggaatcacatccagggaaaaagtgactgttgaacgtcatacagataaggaatcttatgcaggagcatgtgatgatttgcgtattggcgtgactatgatcttttatctgcagaatctggcagaatatatgcaggagaaatacaaaggcctaaaagacccgggggaccgtccggtgacggtttccggtctggcttctgagggaaagatcctgtttccgctgcagaaggataaggaagcggtaaaggtggagagagaactttccaaaaacaggactaatctgatcgcagcagcgcgtaatggtgatgaggaagctatggagagccttacaatggaggatatggatacttactccatgatttctcagagaattgttacagatgatgttctcacgattgtggactcttatttcatgccttatggaatcgaatgtgatcagtataatgttcttggtgagattctggatatcatgaaatttaagaatatcctgacaggtgaagaaatctgccagatgactatagagagcaatgatatacagtttgatatctgcattaacagcaaagatcttctcggtgaaccggcagttggacgccgcttcaaaggaacaatctggctgcagggtcagctgcactattaagttttcgaatttagaattaattcttgtaatttcaaaataaatatagtaaaataatggttgtgaaacttttggaagtgttcgaagtgtttcacaaccatatatgtccatatagctcagctggatagagcactcgcctcctaagcgaggggtcggaggttcaaatcctcttatggacgggcttcaaagcgttcgaaaatgttagctggattagctgacagcgaacgcttttcttattttctaatcacgttcgtgacatgaaattccattcaaaatgatccatttccagctaacacaatccgatttttgttagctgacagctaatcaaaatcaccggtttgcaaacatggtttttcaagagtccagctaacatttgggttccgctctgttgtcaccccttatttggggatgtaaatcagagaaaaggcgggaaaagaaacaatctctccgaaacctgcaaacat

SEQ ID NO: 216 - DNA, 137220 bp, Unknown
  gut microbiota DNA sequence
ttattactaagaagttactaaatttggataagaaaatatacgaatttatgctgtgatatacaggaaaatgacaggattgaagattatcggaaaatgcctgtaaacagcgtaaatacagcatttcaaggagttttaagtaatgataagtgtgctattcgtctgccacggcaatatctgcagatcaaccatggccgagagtgtttttacgcacaaggtaaaaatgctcggcctttcagatcagtttttgatcgacagttttgcaacaagtacagaggagattgggaatccacctcacagaggaacagtgaacaagctgagagaagtgggaataccactggttccgcacagagcgaagcagattacgtgggcggattatgaaaaatccgattatattattggtatggattctgctaatatgcgtaatcttaacaggatgctgaagaatgacccggaagagaagctttataagtttctgacttttgccggatcaggacgggatattgcggatccttggtatacaggaaattttgacgaaacttatgaagatatacaggaaggttgtgagggatttctggattatctggagaaacatggagaaatccattactgatatttcggaatgagacacaaatctgaaacaatacaaaaggtatgacagcaaaaggcagcggaagttgctttttctgtcgatgaaaacttctttacaaatctgaaaacttctattatacttgtccatacagcaggcaactcaaattcagcagagaaatctgctctctgcaattctacagtggaagttctttccacagaaatatctaatcatgttatcagatcagaatcattttgtgcgtcgttgtgagagcgcacaggattttgtcaggacattcgtccgctttgtttcacagaaaggaaattaaatatggaaaaaagttatgaaacttttgtcacggacctgagaaagcttcttcttgcggctatggatctgaaggaagaagaaatttatttttcaaacgatggagaaaaatatggctgtttgggagataggctatttgtagagagtggtcatatggaaaaggcaaaaacagtctgcgggttgcatacagaagaactttataaaagatactgtcaggaacattcttttgaaaatatcgttcatgattgtgttagggagataaaaaaagtcagtgaaaattgtgtgctatgtgatttggacgatctgaaagattatgagaaggtaaaaagcagactttttattcgacttctgaatgcagataaaaacaggactatactgaaggagttggttcatcacaaaatcggagatattgctttagtggtttattatcttgcaggagaaaaagagggatatgttctgagtgcaaagatcaagaaaagctttgtggagaaatggggaaaagatgtggatactgttttcgaagctgctctaataaatacatattttatcagtccaccaagaatctatcattgggaaaaaatgctgtttgataagacatatgaaggagataatttcatggatatccttggaacataccatccaaataaagggattgccgggaattgcctgagtacagaaaagcgtactaatggagcggcagcaatctttttgcctggggtagccagacgtctttctgaacttctgggttcagacctgtatctggtttttaccagtgttcatgaagtaatggtccataatgcggatgtggtttatccggaagatttgaaagaagttctaagtgatacgctcgagaaagcaactccggaagaggattatctgacatcttccatttatcgatacagcagaaggagtggtgaattctctgtggaattgaaatgagataaagagaggtgacatatggaagtgctttgagtttatcgttatttggcattagaacagaaattaaggccggaatccatcataaagaatgaaattccggccaggttctttccatgtgttatgctgtttgtctaactattataaaagttcttttttgtggtttagctgagaagtgcggaatcgttggaaaattcttcaccgctggcttcttcgaatttgtccaggagatctttgactgtaagctttttcttttcttcgccctggatatccagaatgatctttccctcccacatcatgatcagacgattgccgtgagtgattgcatcacgcatgttatgggtgatcatcatggttgtcagatgatcgcggtttacgatcatgtctgtgatctcgagaaccttggctgcagtcttcggatcaagagcagcagtgtgctcatccagaagaagaagctgaggcttctttaaagttgccatcagaagtgtcaatgcctgacgctggccaccggagaggagtccgactttggaagtgagccggtcctcaagaccaagaccgagaatcttcaggagttcgtggtattcttcccgttcctggcgggtaatgcccggacggagaaggcgggattttccgcggcgtttggcaagagcgagattttcttcaattcccatagttgcagcagttccggtcataggatcctggaatacacggccaagatacgcggctcttttatattcggaaagttttgtgacatcggttccaccgataatgatctttccggaatctacaggccaggcacctgcaactgcattcagcatagtagattttccggcgccgtttcctccgatgactgtaacaaaatcaccttcgttcagatgaagatccacgccgtttaaagcaaccttttcattgatggtgcccggattaaatgttttatgtatatcgatcagtttcagcatgatcatttacctccctgtttggcttttgtaaagtatttgcccttccagtatgggaaagcaaggaaaaatgcaacgacgagtgcggaaagcattttcagaaggtctgtatcaattcccatccagataacaatctgaagtaccagataataaagaatagaaccaaatacaacgcttaacagcttcagtgcaaagttgcggaaaatacggctgaagatcgcttcaccgataattactgcagcaagaccgataacgatagaaccacgtcccatgttgatatctgcaaatccctggtactgtgtgagaagagcgccggaaagagcaacaagtccgttggaaagcatcagtcccagaaccttattgcggtctgtgttgataccctgtgcacgggacatgcttggattacatccggtcgcacgcagggaacatccgagttcagttccgaagaaccagtaaaggactgcaatcagaatgatgatcataattgctacgataaaaagcgtattctgtgtcagagcaacacccttgacacgtcgaagggataccagaagattaaatttatcaacattgatcgcctggtttgcttttcccatgatcttcaggttgacagagtaaagggaaagctgtgtcaggattccggcaaggatagccgggatgcccataaaggtatgaaaaataccggtggcaagaccggccagaagtccggctcctgttgcaaccagcatggacacccatacattgtgtccgctgagcatcatcatgatacaaacagcgccgcctgtacataaagttccgtcaacggtaagatccgcaatatcaagaatgcggaatgtaatgtacacaccgatcgccatgattccccagataagcccctgtgcggcagctcctggaagtgcggttattaaactcataatctgcatgttaaattatcctcctcttttttatgcacgaacagcgagaaggggaactcccttctcgctgtatcagtgtataataggttttttaccgattattcagctgttttatctgtttcgattgcttcatatccatccggaattttaataccaagctcgtcacagatgtctttgttgtattcttttgtgaattttggtgcatattcaatcggcattttggagatatctttaccatcctgaaggatgctgactgccatttcgccggttttgtatccaagatcatagtagctgatggaaagtgttgcaacaccacatgcctggcagataccttcttcaccagcgattaccgggacctttgccggaagacagatgttgttgatgatctcagtattggatgctacagtattatctgtaggtgcatagatcacatcactgtcattggcagctgtggtaacaacggatgaaagatcgttggaatcagagaatgcataatcttcacaggtataaccaagcttctcgagagcatcttttactgtatctacctgatactgggagtttggctctgctgagcagtagagaagtccgacattttttgcatccgggaaaagctcatggagcatatcggcctgctcatcaagaggagcaagatcagaagtaccggaaatgttcccgcctactgttccgtcaaagtcatcgattccaagagcgacaccatattcggtaacggctgttccaaggatcgggatatcggaagttccggcagctgcagcctgaagagatgcggttgcgtttgcaaggatcaggtctgccccttctgaaacaaagctgttgataatggtagaacaggtattagaatcaccctgtgcattttgctcgtcaaattttacggaatcacccatcttttcagtgatggcatcctcaaaacccttggttgcggcatccagtgcgtcatgctggaccagctggcagatacctattgtgtaagtcttttcttctttggcgcttactgtggcagcacaggttcctgttacaagagctgctgcgagtacagctgttaaaatacgctttttcatattgttttcctcctcacgatgttgctgcatttttggattatttaaaaatacaacgctgattgtgttaatataacactttaacgcttaaaagtcaagaagaattaacgtgaaaatatgttgagtaaacagatccggaaaacaaaataaagcatgaaatgaaatgcaggcacaggaaaaaacatacagtcatatcatattgtgaatgaaattctcaaggagaaagaacatggcatataaaatcgttctggatgccggacatggtggagaagatccgggtgctgtttataaagatcgcaaggaaaaggatgacaatctgaaactgacccttgcagtaggaaagatcctggaagagaacggcgtggatgtggtttataccaggactacagatatttatcagactccttttgaaaaagcgaaagctgcaaatgaagctggagcagatttttttatttcttttcatcgcaacagcagttccaagccggaacaatacaatggagttgaagtactggtctatgataagaaaggcattaaatatcagatggcacagaatatcctgggagcattgggagaactggggtttcgggaactgggcgtaaaagaacgtccggggctggtagtgctccggcgcacaaaaatgccggcacttttgatcgagaccggatttataaactcggaaaaggataatcagctttttgaaaaaaaattcgaagagattgccagaagcatcgcagatgccattctgggaacattgaatgaggaaacggtggaagagccattgtattatcgggtacagacaggagcatttcgaaatcgggaaaatgcagacaggatgttgtatcagctgacagatcagggatttccggcgtttatcctgagagagaatgatctttacaaagttcaggtaggagcatatatgcagctaggaaatgcggtcaatatggaacaaaggctgagggacagtggatatagcacagtgatcgttacaaaatagaaaacagatgatctgttagtgcatctgccacgaaagagtgatatgattaggcaatacagaaagctggataagggatacctgtcagataaatatcttttgatccgggatttagctgcagatggtaaagaaaggacatagaaaataatgtacgaagagtttctgaaacagatagaagatttcatgtttatagaagataagccggaaaaagcggatgtgatctttgttccgggaaacggatatcctcaaatggcggaaaaagcagcggagctttacaggaatgggtttgcaccaaagatcctgcccagtggaagatacagtatcacagcagggagatttacaggagttcttgacaagaaagaatgttattgtgggacatacaaaacggaatgggattttttgaaagatgttctgatgcagaatggtgtaccggaagaagcaattctgaaagaagatcaggcaacctacacttatgagaacgcaatttattcccggcaggtaacagacagagaatacctggatatcaaaaaggcgattctctgctgtaaaacctgtcatgcaagacgtgcgttgatgtattacaagttgctttatccggatacagaattctttgtgagttcgtgttgtgtggattctatagataaaaatacgtggattatgacaaatgatggaattgatgaggtaatgggggaaataactagaataattaaacaattttcattgatgctcaaaaaaaattaatttaggggtgtcgtaaaaaaaagaattgtgttataatgcatttgacgaaaaaaagaaatatctgttacgaaagattaacaagatattaatttttggagaaatattggttcgagcgcatgttacatgcgttcgatattttatataactgaattttttgacaaaaggcaaatatgaatcttagattttgaatatagaggtgcagattattatgaaaaagaacacaaaggttacatttagcagaagcttttcaatactggcagcagcggcattgtccatgacactgatcggaggacagacctttccggcatatgcggagaactcttcaggtatagaatccggtgctgtgatcccggataatataactattgacagccctacagctcttgctaacattgcgctcccatctaatgcgtatggaactctttcctgggcagatagttcttatgttccggacaaacgtgtgcaatcctgtggggtagtgttcaaacctgctgcaggtgctgacctttcaggccttccggggtgggacagtaattcaggaacacttacaggttccgtgacagttgtggtcagcagcattgacagtacagaggaaaattccggaagtgaggaaagttccgattcttctgattcagattcaggagaatcctatggaaccgatgataaagaggaaaatggaaccgacgtcaatgagagtgatgcagatacttctgtaaaagaaacagaggacagcactgcagagaatgaggagaagaacgaaggtctgcaggatgacagtgcccaggaaaataaagaagatccggagacaacaggaaaaacggagcagtcttcttcagattcttcagatacaacagatgcagcagatgccagcggagaggaaaaaagggatccggagataacagaagctccggaggtaacagctgcaccatctgaggataataaaactcaggatggggaagaagcagaagctgtggaaactcctgctgtaacgatgactccggcggcagaagatggtatggatcccgatgcagcatctgagaatagagacgatgagaatcatgaaaaaaataacgatgctgaaattaccgcgatcccggaaattacggagactcctgatactgaagaaaacaaggataatatttttgacaggaaagatgatacagaggataaacgccctcagaatgcagctaccgatctgacagaaacagaaaaagaggaaattgcgtctcaaaatcatacctgtgatggaataactgtatcaggaatcgagcttccgtggtatgtacagtttcgtgtttctggtggtgaggactatcagtttaccaatgaagaagatgcaacaatctttaaatcctatgagtttgaactctgggatacacagaataatacagagtataaaattccggatggggagtatatcagtgtgactgtacctgtaaaggccggctatacatattctattgaacaccttcttgataatggcgcaatggagaccatcattccaagcatggatggtgacacaatgactttcagtacacattcattcagcccatttggcatcgctggaagtaaatctctggtagggccagatgctgaaagcaataccggtgcaacggttacacctgcagctgatgcttcatcttcggatactgcatcttcaggtactgcagatcctgcagaaacagacagtacagacaccaatacggcagagacatctcagaatctgacttcagatagcacagatcaggaacagtcttcttttcagaacagtgatacggcggagaatgaggctgaagaacagtcttctgcaacaacatccaagaaacaggtaaataccggagataacactcagatccttccgtttgtgatcttgtttgtggcagcggcagttgtagctggtgtagcagtgttttttaagaaaagaaagaagtaatgaataagaataagagaaaaagctctcccatataatgactgtgggagggcttttttatgaagggaaaagcaatattacgatcattgctgctagcctatggagtgacaggactttttcttctgatactggcgtttctgctctttcagtttgaatttggaggagggacggcggcagtggggatcattattatttatgtagtatcctgcttggtcggaggttttatggcgggaaagatcatacggaaagaccgatatatatgggggatcgttaccgggctttcctattatgttctgctgcttctggtatcttttctggcacaggggaaatgggatatgacctttgcccatgtgttgactacttttttcatgtgtcttggtggcggagccattggtgggatgctgtcgtaaaagcttacaaaaaaatgctttgaaaatcgatgattttatgctatactaggcgaagaatagaatacataaaggaggatatatcatggaacatatcaagacattaaatacaaagaaccttcagaacacggttaagaagggtggatgtggcgaatgtcagacatcctgtcagtctgcttgcaagacttcctgtacagtaggaaaccagagctgcgagcataaataagaagcagccgttgaatgagtggaaagcagcgggagatccgctgcttcacttgttttatctgaaagtaacaggtatccagcaaaacgcgccggagggcgcgttttgtcgggttataaaagaattttagaaaggattgcgggaagatgagtctgattcaccgttatcaaagtaatggatataatattgtgctggatatcaacagcggctgtatccacctagtagatgaagtaacctatgaggtgctgccgtatcttgaagaaggcatggaagcggctgccattgctgagaagcttggcgaccgttttaagaaagaggatgtggaaacctctgtaactgaatgtaagaagcttcaggaacagggaatgctttttacaaaagatatttatgagaatatcattgatgaatttaccaaaaaccgccagaccgttgtaaaggctctttgccttcatattgctcatgactgtaatctggcatgcagatattgttttgcagaagaaggagagtatcacggaagacgtgcgctgatgtcttttgaggtaggaaaaaaagcgttggatttcctgatcgctaattccggctccagaaagaatctggaagtggatttctttggcggcgagcctcttatgaactggcaggttgtaaaggatcttgtgaaatacggaagagaacaggagaaacttcataacaaaaaattccgcttcacactgacaaccaacggcgttcttttaaatgatgaggtgatggaattctgcaataaggaaatgggaaatgttgtcttaagcgtggacggtagaaaagaagttcatgactacatgcgcccgttccgtaagggtgcaggaagctatgatctgatcatgccgaaatttgagaaatttgcggaatccagaaatcaggacaagtattatgtaagaggaacctttactcatcataatcttgatttctctcaggatgttctgcatctggcagatcttggcttcaagcagatttctgttgagccggtcgtggcagcagatacagaagagtatgcgatccgtgaggaggatatcccacagatcctggaacagtatgatattcttgcaaaagaaatgatcaaaagagaaaaagagggaaaaggattcaacttcttccactttatgatagaccttaccggtggtccgtgtgtatacaaacgactttccggatgcggctcaggaaccgagtacctggctgttactccgtggggagatttttatccatgtcaccagtttgtgggtgaggaacagtaccttatgggtaatgtagacgagggaatcacaaagcctgaaatcgtaaaagactttggaagatgtaacgtctatacgaaaccggactgtaaagactgttttgccagattctactgcagcggcggctgtgcggcaaatggttaccatttcggcggagatatccgggggaattataagatcggatgcgaactccagaggaagcgtgtggagtgcgctatcatgataaaagccgctttggcggaataagagaggaaaaagaaaatgaagaaaagtagaggaattgcagtgctgcttctgacagcaattgtcacagtattcttctgctatgtggctgcggtaggcattggtcctacaggaacaggttcggctaagaatatcaacaccggacttgatcttgccggcggtgtcagcatcacataccaggctaaggacagcaatccgagcaaggaagatatgtccgatactgtttacaagatgcagcagcgtgtttctcagtacagtactgaggcacaggcatatcaggaaggttccaaccgtatcaccattgagattccaggagtatcagatgcaaatgcgatcctggaagaacttggaaagccaggttctctgtattttatcgatcagacagatgcagatggaaaccagaattttacaacaggaaacagtgagagtggatatgttcttgcaagaagtattgaggatatccagaaagccggatctgttgtactggaaggtacagacgttgcagacgctgagggaggtgcttatcaggattcatccacaagctcccagaaatatgcagtcagtctgactcttacaaagaatggaaaaaccaaatttgcggaagctaccaaggcaaatgttggaaagcagatcgcaatcgtatatgacgatcaggttttaagcgctccgaatgtaaatgaggagatttccggcggaaaagctcagatcaccggaatggcaagtacagaagaggcacagaatcttgcttcttacataagaatcggttccttaagtcttgagcttaccgagcttcgttccagcgtagttgctgcacagcttggtgaagaagccatcgcaacaagtgtaaaagccggagcaatcggtcttgtgatcgttatgctgatcatgatcatcgcataccgtatcccaggtctggttgcatctgttgcactggttctttatacaaccttaatgctgatcacactgaatgcctttgatatcacccttacgcttccgggtattgcaggtatcatcctgggcattggtatggcagtggatgccaatgttatcatctacgccagaatccgtgaggagatcgcggcaggcctttctgtccatgcagcgatcaaaagtggattcagcaaagcattttccgctatttttgatggaaacatcacaacactgatcgcggcttgtgtgctgatgtggcttggttccggttctgttaagggatttgcctacacgctggcaatgggtatcgtgatctccatgtttacagcactggttatatccaggcttgttattaatgcggtatacgcaattggtgttcgtgacccgaaattctatggcattgccaaggaacgtaaggttgtggatttcgttggaaagagaaaaatcttctttgctgtttccattatcctgatcctttgcggacctgtaggaatgctggtccacagtaatgtgatcggtgacaaagccatgaattacagtctggagttttccggcggtacttctaccaatgtaaccttcaataaagagatggatatcaaggagatcgattccaaggtaacaccggttgttgaggcagtgacaggtgataagaatgtacagccgaccaaggtgcagggaaccaatcaggtagtgatcaaaacacgttctctggatctcaaggaacgagaagcactgaataaggcattggaggaaaattttgatgtagatacaagtctgatcacatcggagaatatttccgctactgtcagcaatgagatgagaagagacgctatcgtagcagttatcgtagctgcgatcttcatgcttctttacatctggttccgtttcaaagatatccgctttgcaagcagtgcagtacttgcacttcttcatgatgtcctggtcgtacttgcgttttatgttatttccagaacatctgtgggaaatacatttattgcgtgtatgctgacgatcgtaggttattccatcaatgctactattgtcatcttcgaccgtatccgtgagaatatgagaggcagaaagaaagttgaggatgagaaactgaaagagatcgtaaataccagtgttacagaaactctgacacgaagcatttacacatccctgacaacatttgtaatggttgcaattctttatgtaatgggtgtttcctcaattaaagaatttgcagcaccgctgatggtaggtatcgtcggtggagcatattcttctgtatgcatcactggtgctctgtggtacaccatgaaaacattcagaaaaaatcgtgttgcagcaccggcagctgtagcagcttccgcaaagatttcttccgagaaatctgagaaaaaggtaaaacagccatccggacagcagacagctcagcagccgaagaagaaaaaccgtaaaagagttgccgagcgccttgcagcgcaggaggcagcaaagcagcagaatgatgaggagaaatctgaataaaattgctgaataacagaaacgttccgtaccgggaaagaatatttcctggcggaacgttttttttgtgtggcataaaaaacttgcagctatgcaggagtatgagttacaatacggttattgtgttgctttgaagaaagaaagcggcaaagcatcgaggaggaaacaacatggaacgatgggttgttgctgcaaaacgggcggattttgcggcaattggaaaagagttcggaattgatccggtgatcgccagactgatccgaaaccgggatgtacaggacagggatgaaattcgcagatatctttatggaaaggtggacgagctggcttctccacatttgatgaaagatgtggataaggcagtggaaatcctgcggaataaaataaaggaaaaaaaacgcatccgtattataggcgattatgacattgatggggtaatatcgaccttcattctgatcaaaggactgaagcgtgcaggagctctggcagatacatatattccggaccgtgtggcggacggatatggaatccatgagcacctgatcgaaagagcagtgaatgatgggattgacgtaattgttacctgtgataatggaattgcggcgtacaatgaaatcactatggctaaagagaagggaatgacggtgataataaccgatcatcatgaaattccctataaagaaacggaagatggaagagaactgatccttccgccggctgatgccattgtaaatccaaaacagccggactgtaattatccggagaaaagattgtgcggagcagttgttgcgttgaagctggtgacagctctctatgaggcatgcgggattccggaaaaagagctggaagattttctggaattaggagccattgccacggtgggagacgtgatggatcttcagggtgaaaaccgcatccttgtaaaggaaggcctgaaacgactttcccacacttctaacaaaggtctccgtgaactgatccgtgccaatggcctggaggatgggccgatcactgcctatcatgtagggtttgtgctgggaccatgtatcaatgccagtggaagactggataccgctgcacgttccctgaaactgctctgtgcggagacggaagatgaagcagcaaaacttgccggtgatctgactgcgttgaatcaaagcagaaaagctctcacggaagagggaaaggaagcagcgatccgtattgtggaagagacagaaatcggacaggacagggttcttgtgatctatttaccggactgtcacgaaagtctggccggaattattgcgggacgtatccgagaaaagtacaataaaccggtctttgttctgacaaaaggtgaaacaatggtgaaaggcagcggacgttccatagaaagctattccatgtttgaggaactggtaaaatgcggagatctgatggaacagtatggcggtcatcctatggcggcaggattatctattaaagaagaaaatgtggaagagttccgcagacggttaaacgaaaactgtactctgacagaaaaggatctggctccaaagatcctgatcgatgtgccaatgccggtttcctatataaataaggaacttgtggaagagatatccctgctggagccttttggaaagggaaataccaaaccgatttttgcacagaagggacttcgggttttaagcagccgtattcttggcaaaaataggaatgtggcaaagcttcagctgtcagacagtaccggctgtgtagtggaagcagtatattttggagaagcagatgaatttgttgatagaataaaaaactgtggaagtattgcggtcacatattatcctgagatcaaccgttatcagggaagagagaccttacagatcgtaatccgaaattatattacagaataacaggagaaggtatcactaaaatgcagatcctgacagcgagtaattgactgtaaaacaggaaagaaggctttgtactgggcaatatgcagtccagggcctgtcgtaattccgcgagttctgtcgggttgcacattgattccctacagaaaaagtgctatactatctaacatctgattgacaaattaaaccattggaggttattatgaaaaaaatagaagaatatgtaagaagtatcccggactttccagagccagggattattttccgtgacgttaccagcgtccttcaggatgcggatggattacagcttgccattgattctatgcaggattgtctggagggtgaggagttcgatgtgattacaggtcttgaatccagaggctttatctttggtatgccgatcgcatataatcttcacaaaccctttgttctggtccgcaaagcaggaaaacttccatgtgagaccgtttccagaacctatgagctggagtatggaagtgcaactatcgagatgcataaggattccatcaagccgggacagaaggttgttattgtggatgacctgatcgctacgggcggaagcgtggaagcagccatcaagcttgtggaggagcttggcggcgaggttgtcaaggtggttttccttatggagcttgcaggtctgaagggacgtgagcgtctcaaaggttataatgtggcatctgtgatctgttacgacggaaaatgattttttgtcggtggaaggggatgtgaactgttgtagtcatacggcagtatgaaattgtgcacaggcaggtgggatttaatggcagagacaaaaaatacggaaaaacaaaacattgagatacagaaggaagaagaaaaaagagagtctgtccggaaggcagatgcggcggtgaaatccatgcatgattttacaagccctgaggttctttatcaggagcttataaaaagcgtgaagaaatatcatccgtctacagatatttccatgatcgaaaaggcctataaagtggccagtgaggcacataaggatcagaaacgtaaatccggtgaaccttatatcattcatcctctctgtgttgcaatcatccttgcggatcttgagctggataaggaaaccatagtggcaggccttcttcatgatgcggtagaggatacctggatgacgtatgaagaggtggaaaaggaatttggttctgaggtagcacttctggtagatggtgttaccaagctgggacagctgtcctattccaaggacaaggtagaggttcaggctgagaatttaagaaagatgttccttgcaatggctaaggatatccgcgtcatcctgatcaagcttgcggaccgtcttcataatatgcgtaccctgcagtatatgagaccagagaaacagcaggagaaagcaagagaaaccatggatatctatgctcccatcgcgatgcggcttggtatttccaagatcaaggtggaactggatgatctttctcttaagtatctgaagccggatgtttactatgatctggtagaaaaggttgctcttcgcaaaagcgcccgtgaggaatttgttaattctatcgtgaaacaggtaaagcagcatatggaggatgccaatatcagggcacaggtggatggccgtgtgaagcatttcttcagcatctataagaagatggtcaatcaggataaaaccattgatcagatttatgacctgtttgccgtacgtatcattgtagatactgtgaaggactgttatgcagctcttggtgttatccatgagatgtataagccgatccccggcagatttaaagattatatcgcaatgccgaaggccaatatgtatcagtctctgcatacaacactgatcggccctaacggacagcctttcgaaatccagatccgtacatttgaaatgcataaaaccgcagaatacggtattgcagctcattggaaatataaggaaacttccgatggtaggaaacctggaaagagtgaggaagagaagctgaactggctgcgccagatcctggagtggcagcgcgacatgtccgataaccgggagttcatgagccttctgaaaaatgatctggatctttttgcggacagtgtttactgtttcactccccagggagatgtaaaaacactcccaaatggttctacacctattgattttgcatacagcgtgcacagtgcagtaggaaacaagatggtaggtgccagggtcaatggcaaacttgttcctattgaatataagatcaaaaacggtgatcgtattgagatcataacatcccagaattctcagggccccagccgtgactggctgaagatcgtaaagagcacacaggctaagaataagatcaaccagtggtttaagaaagaactgaaggaagataatatcctgaagggtaaggacatgctgaatcagtatgccaagaccaagggctttaaaccaggcatatataccaagccacagtatatggaatcggtaatgcataaatatggtttccgagactgggattctgtattggcagcgatcggacatggcggcctgaaagaaggtcaggtgtttaacaagctggtagaagcctatgagagggagcataagaagaatcttacagatgaacaggtcctggaggcagcttccgaatcacaggagaagcttcacattgccaagagtaagagtggcattgtagtaaaaggcattcatgatgtggcagttcgtttttccaaatgctgtagtccgatcccgggagatgagatcgtaggctttgtaacaagaggaagaggaatcaccattcatcgtacagactgtgtgaatgtgctcaacatgcctgagattgaccggaaacgtctcattgaagcagagtggcagatgccggacagagcggattccgagaaatacgaagcggagatccaggtttatgcaaataaccgtaccggacttctggtggatatctccaagatctttacagagaggaagatcgatcttcgttccattaacagccgtaccaacaagcaggaacgcgccacgatttccatgtcctttaatgtatgcagcaaacaggaactgaattctctgatcgaaaagatccgtcaggttgaaagtgttcttgatgtagagcgaacaacgggctgacccgataaacggaggaatttttatgagtaaacttgaaatgcagcagtgtgtgcttggccaggtgtttaccaactgctattttctgaaaaataaagaaaccggagaactgctgatcgtagacccgggagactatgcagaaaaagtttttcagaaagtatctcttatgcagggaaaaccgatgggaatccttctgacacatggtcattttgatcacatcatggctgtaaaggaagtgaaggaaaaatatcagatcccggtttatgcatgcaggcaggaagaagcaatgctggcagagcccacgataaatatgactgctgtttatggaagtgcctgttcaattaagccggatgttcttctggatgacgggcagattttcgaagcggctggattttccattcagatgttccacacaccgggacataccaaaggaagctgctgctattatatcaaagacgaaggtgtgcttttcagcggagatacattgttttgcggctctgtgggaagaaccgattttcctggcggaagttctgctgagatcgtaagaagccttcataagcttgtggatactttgccggaggatacagaagtatttccggggcatgacgcatccacaaccattggttatgaaaagaggtataatccatttgtataagattggcattttgtttcagaacagagattttgagcatgatgtgtatgagctgatcaaagcgttttatcccggaaatgagatcgtttctctttatgaagaggatgatgcggattatgatatccgcttccgggtctcacgtgatgaagaaggttataccatcagttacaacaacggaatagagaaaaaaacagctcatggggctgtgatagaagggcaatccagtggagaagcttcggatgcccttatttcttgcaatgatgcccatgatatccgcagaaaaaataaagacgcgatcaaatacgctctgtatcagatgctttccaaagctacaggaaagacacttccctggggaaatcttacaggcatccgtcctgtgaaaatggctatgggaatgctggagtccggaatgaaaaatacggagatcgccagatatatgagagatcagtatctggtaagtccggagaaaacagctcttgcagttaccatcgcaaatcgtgagcgggatatcctgaaaaacattgattatgaaaacggttacagcctttatgttggcattcctttctgtccgagtatctgtctgtactgttcattcagttcctatccgctggagagatggcgtaaatatgtggaggcgtatctggatgcgctggtaaaggaaattcgggctgtttccgggatgatgaaaaaccggaagctggatacggtctatatcggtgggggaacacctaccacactggagccggatcagcttcggagacttcttggcgcgatcacggaatattttccctgtgaggagctggaagaatttacggttgaggcaggaagaccggacagtataaccttggaaaagcttcaggcgatccgggagtttccggttaccaggatttctgtaaatccacagaccatgaatcaggaaaccctggatatcattggcagacgtcatacagtagaacagacaaagaatgcgtttcatctggcaagaaaagccggattcgacaatatcaatatggatctgatcgtgggccttcccggcgaagatatcacaaaagtgcagcatacactggacgaggtaaaagctctcgggccggacagcctgaccgtacattctcttgctgtaaagcgtgcggcaagactgaatattttccgtgataaataccaggagatgacctttgaaaacaatcaggagatcatggatctgactatgaaaacggcctacgagatgggaatgggtccttattatctgtacagacagaagaatatgaaggggaattttgagaacgttgggtattctgaggttgacaaagcagggatttacaatatactgattatggaggaaaagcagccgatcatcgcactgggtgcaggtggttcctccaagcttgtgtttgatcacggacagcgcattgagcgtgtggagaatgtgaaggatgttgtcaattatatcacacgtatcgatgaaatgatcgagagaaaacgtgagggcattgcaaaatggctgtagacggaaaggagagacggatccttgaaaagcgtacagaagataagtgaaactacgcaggaccggatcctggaaatggatctttccgcagagctgaaacatggggttgttgtcagtaaccttgcctatgatgtggcaaaggagcttggtcttggtgagaaagaatgttatcagctggctattgccggaatgctccatgatataggcaagctgaaactggaaggatacattaatggccaagagcagaatccgatggtcattgaagaattgaagtatgtccgcatgcactccacattaggttatgagatcctgaaagaccagggatattccgattatgttctggaaagtattctttatcatcatgagaattttgacggcagcggttatcccagcaacagaagcggaaaggatatccctatgggtgcaaggatcctgagagtatgtgatgtatatgcggctttgagtatggacagaccatatcggaaagctctggaaaatgatgaagttttaagactgatgatcgatgagattaaaaactttgacatgcaggtgtttcttgcatttcagagggtgattcataaaggaggaaactatggcattaaaaaagaaaccggttacaggaatgaaggacattttaccgaaggaaatggcaatccgtaactatgtgatgaatatgatcagagagacgtacggaacctttggtttttccgcaattgaaactccctgtgtagaacatattgagaatctctgcagcaagcagggcggtgaaaatgaaaaactgatcttcaagatcatgaagagaggcgagaaactgaaactggatactgcaaaaacagagaatgatctgacagattccggacttcgctatgacctgaccgtaccgctttccagatattattccaataatgcaaacgagcttccggctccgtttaaggcacttcagatgggaaatgtatggagagctgaccgtccgcagagaggtcgtttccgtcagtttatgcagtgtgatatcgatatcctgggtgagccgacctatcttgctgagatcgagcttgtacttgcaactacaacacttcttggaaaactggatttccagaactttacgatccgtatcaatgacagaaggatcctgaaggcaatggctcagtacagcggattcccggcagagagctttgatactgtctttattattcttgacaagatggataagatcggcatcgagggagttgcagaggagcttgagaaagagggctttgcgaaagagagcattgacacttatcttggacttttccgtgagatcaccaacgatgttgagggtgtccgttatattaaagaaaaactttctgatgttctggaagcaggtattgcagaggatcttgaaacgatcatcaatactgtagaatctgtaaaaacagcagacttcaaaatgtcctttgaccctacactggtacgtggaatgtcctattacacaggtccgatctttgagatttccatggatgagttcggcggaagcgtcggtggaggcggacgttacgatgagatgatcggtaaatttacaggaaataatacctgtgcttgtggtttctccattggatttgagagaatcgttatgctgcttcttgagagaggctatgagattccaaccaagaatggcaagaaagcatatctgatcgagaagaacatgccggcagacaagcttctgaatatcctgaaacaggcaactgaggaaagaagtgcaggtacacagatcaatatctctatcatgaaaaagaacaaaaaattccagaaagaccagctggcagcagatggttatacagagtatgtagaatttttcaacagagactgaaactgcccgtctgaaaacggagatagcagagtaaattaaaatgactatgaaaaaaatagtcagaggaggataaagagatggctgaaagcatgcagggactgcacagaacttgccgatgtgcagaagtgaccacagagatggtcggaaaagaagtaacattaatgggatgggtggcaaaagccagaaataaaggaggtcttgtatttgtggatcttcgtgaccgttccgggatcatgcagctgatttttgagaatggcagcattgacgaggaaggctttacaaaagcaggtaaactgcgtagtgagtttgttattgctgtaaccggtaccgtagagaaacgtggaggagcagtaaacgagaatcttgcaactggcgagatcgagcttcgtgtaaaatccctccgtgttcttgctgaggcagatgttcctccattcccgatcgaggagaatagcaagacaaaagatgagatccgacttaaatatcgttatcttgatttaagaagaccagatcttcagagaaatatcatgatgaagagcaaggttgcccagcttacaagacagttctttacagaagagggatttcttgagattgagacaccgatgcttggaaagagtactcctgagggagccagagactatctggtaccatcacgtgttcatccgggaagcttctatggccttccacagtctccgcagctgtacaagcagcttctgatgtgctccggatttgatcgttatatccagatcgcaagatgcttccgtgatgaggatcttcgtgctgaccgtcagccggagttcacgcagatcgatatggagctttcctttgttgatgtagacgatgttatcgatgttaacgagagatatcttgcattcctgttcaaagaagttctggatatcgatgtaaaactcccgatccagagaattacctggcaggaagctatggatcgttttggttccgacaagccggatatgcgtttcggtatggaacttcatgatgtcagtgatatcgtaaaagactgcggatttggtgtgttcacaggtgcgcttgagaacggcggaagtgttcgtggtatcaatgcagaaggtcagggcgcaatgccgagaaagaagatcgataagcttgttgagttcgtaaaaggttatggtgcaaaaggtcttgcatacattgccattgcagaggacggaaccagaaagtcttctttcgccaagtttatgacagatgaagagatggatgctcttgtaaaagctatggacggcaagccgggagatcttcttctttttgcagcagataagacaaaattggtatacgatgtactgggagcactccgtcttgagcttgcaaaacagatggatcttttagataaaaatgagtatcgtttcgtatgggtaacagagttcccgcttcttgagtggagcgaggaggagaaccgttttacagcaatgcaccatccgttcaccatgcttatggaggaggatcttccgcttcttgacacagatccgggaaaggttcgtgcaaaagcatacgacatcgttcttaacggaaatgagattggcggcggcagcgtgcgtatccatcaggatgatattcaggaaagaatgtttgaggcacttggcttcacaaaagaagctgcacatgagcagttcggattccttctggatgccttcaaatatggagttccgccacacgcaggacttgcatatggccttgacagacttgttatgcttatggcaaaggcagatacgatccgtgatgttattgcattcccgaaggttaaggatgcctcctgtctgatgactcagtctcctagccaggtaagtgaggcacagcttcatgagctgggacttgaccttgagccgcagaaagaagaggaagaataaaagatcatgcagccgacaatctatacatttctgatcgtttgtccacttgtatttcttgccggatttgtagatgctgtagcaggcgggggaggactgatctccctgcctgcttatcttttggccggagttcctgtacataatgctgttgccaccaacaagctgtcatcagcaacaggaacattgatctcaactgtccgtctgtgtaaaaataaatttgtggactggatcctggtgcttccctgtattccaatggcgcttctgggatcttccataggagctcaccttgctcttatagccagtgataagctcctgcgttatatgctgatcccggttcttccggtggttgctttttatgtgctgcgcaagaaaaatatggatgagaagggtggcgagatcgccagaaaaaaacagatcctgctctgtgccgtatgctctcttgttgtaggatgctacgatggattttatggaccaggaacaggaacttttctcttgcttttgtttacaggattgggaaaaatgagtgtggcaaaagcttccggtaccatgaaggttaccaacctctcttctaatgtagcggctcttgttgtatttctgctcagcggaaagattgtgatcatgcttggaattgcagcgtcagtgttctcgatcgcaggacattataccggtgcaggtatggttatgaaaaacggaagccggatcatacggcctattattcttatagtccttgcattgctttttataaagatcatatccggaatataaaaaagaagaatataaaaaacccgtgaagatcacgctttcctgtcagagaaagcagatattcacgggttttctagcttttattctttattcgttatcttcggtagaatcttcaggaaccggtgaagcggtaagagttccgaagatggcattgcccagttcggtacctgcattctcaagcttccaggatgcaccatcgtttgtgagatggaaggtagcagtggcagttatggttgcctgattattcctgatactgtccagaagcagttcatgtgatttgttgtaacgcttctgggaaccgtcgatcactgcatcagcagaagccagataagtattcaattctttttcgtactgtgtaagaatggaattactgtcaaatgtggtaagctctgcgtccacctcagcaagatatccggaaacagaggtgcttgatattttgtagttaaaacaggagtgaaactgttccataagggcagaggcaatggcgttttttgccgaatctgaagtgttcagaatggaatccagccctaaataattagccatctgctttacatccatttcctgaagcgttttcagatagacggtaagcgtttcggcaggcggcacaagatcaggatcggacagataggtgataaggccaccgaccagatcattttcgagagaggaactgtgcgtaatctcccagtcaggttctgaagaagatccaagattgtttagttggatggaagtattgcgttctgcagaactgtacgtgttattcttgagaagcttgtacaggagcagataacgctgctccagggaatttccgttatcattttctttaccggaggcggtttccagtatttcttcctgaaggcttgcagaaacaaaatcactggcaagagccttagcatccagagtagtaagcttaagctgcgcagaagcatttttttcgtcgctatcaacggatatacccaggattttgtaatcgaaattctgaaagaagagagaaaatacttcttttatgtcagcagaaagctttgtgctgtcatcagaatccggaaacagttcctgataggatatgtactgcatggttgtttcagagtccagatttttaagaagatccagatcttttttgatcgccttctccgcatgagctttggccgactgggagcagctacataaaaaaactgagagaagaatgatcatcaagaaagccagcagatgtttcactgtcttcatattgttctttcctttcaaaaaagttatattacaacattttagcagataaagtaccgaaagtcaaaatatcgcaaaaatggagaaaaaggagacttttttatgaaaaatctgtgaaatctgcatcgttttcttcagggacttttctttttagagtgaatctgctatgatgtttgaagcaacagatagtttcagtacgatgctgagaaaaggggacagatatgaaaaaacgtattttgatcgcacttggggtccttgtacttgcagccggtatcggagccggtggatggtattattatacacatcatgcaggggccgcaggaggcagcgatattgtatatgtaacaaagataagcaagctttcggaaatggattccggagtggaaaaccgatatgcaggtgttgtggaaccgcaggaaacggttcaggtaaagatcgaaagcggccgaaaggtaaaagaagttcaggtaaagaccggtcaggaagtcaagaaagggcagcttctttttcagtatgatcttggaagtatccagcaaagtcttcaggaagcacagctggccttggatcgcctgaaaaacgaacagttaagtatatctgatcagatcaccacactggaagctgagaaaaagaaagctacagcagataatcagctttcctatacaatagagatcgaaacacagaaaatgaatctcaagaagaatgaatatgatcagaaaagcaaacaggcagagatcaataagctttcccaggcaacgcagaataccgaggtgcgcagtgagatcgatggagtgatccagaagatcgatacctccaagatgggcggcgatgattctgagggcgtggaggatacgctgacagaaggcacgacggattccacagattccagttccggaaacagctccggcaatgcatttatcacgatcctgagtacaggtgcttatcgtgtaaagggaacggtaaatgaaataaaccgtgattcgatcatagagggaactcctgtgatcattcgttccagggtggattcttcaaaaacctggaagggcaccatgggctctgttgacctggataattctaccagcaacagcagttcggatatggcaatgttcggaatgtccagtgccagtgatgatcagacatcatccagtacctatccgttttatgtgaatctggattcatctgagggtctgatgctggggcagcatgtgtatattgaaccggacgaaggacaggatgagaagaagtccggtatctggctgaacgattattttatcgtggatgcggatacagacagcccatatgtctggatcgcaaacggtcagaacaagctggagaagagagatgtcatattaggacagtatgatgaagatcttggggaatatgagatcgcagacggactttctgaaaaagataagatcgcatttccgacagatgagctgaaagaaggtatgtctgtcacagaaggtactgcagatcagactacagcggcgatgtgggatgattccgagggtgatgaaagtattgatgattctgcgtacacggaaagtgatggctcagagcctgaaatgatcgaagatggagcaatcgacagtgacatgatggatgcgacagacgatatttcttcgggagatgaccttgttccgatggaaggagcgccgacagaatgattttggatttaaaaggaatatataaggattatcaacaggggaaaatgacggtacctgtattgaaagatgtagatttttccatggaggagggagaatatgtggcgatcatgggaccttccggttccggaaagactacactgatgaatattatcggatgtctggataaacctaccaagggaacttttctcctgaatggagaagatattgccaaatgtacagaaaatgagatgtcagatatccgtctgaaaacgatcggatttgtatttcagagctttcatctccttccaaggcagagtgcgctgacaaatgtggaactgccgctgaattatgcaagggttcccaaaaaggagcgccgggaacgtgcacgaaaagctctggagcgtgtaggccttgccgacagggtggattttaagcccaaccagctttccggaggacagatgcagagagtggctattgcaagagcgatcgtaaacaatcccaagcttttgctggcagatgagcctaccggggcactggatacgaaatcgggagcacaggttatggaactgtttcagaagctgaacgatgagggagtttctgtgctgatgatcacacatgacccggagattgcggcacatgccaaacgggttgttatgatccgtgacggtgagctgcaggaaaagaggtgatagaatgaaagtggtgaagagagtgatcgttggtgtactggttgcggcattggcagccggaggaatctacacagggcttatgcatgtgaaagaatccaaggtaacagaggtgccggtaaccagcgtcagcaatcttcagacggactggtattcggagacaacactggatggaaccatcaccacgaatgtttctcagaatataaatatggataaagatatgatcatcgagaaaatatatgtatcccagggtgatgatgtaaaaaaaggcgataatctgatctcctttgatatgacacttgtagagatggagctgaatattgcaaagctgaaacagcagaagcaggagcaggatctgaccaaagcacagaaccgtctgacaagtcttcagaatggaggtcccatcgaagacagtacagacagtactgatgatacggacctgaatcttacaggtggtgatacaggaggtgacggcgaaatgacaaataccgatacaccttccggaagtgacggagacgaggatatgcagtcaactaccggttccgcggctactgcagatggcagctatcttgcagcggcttcctctaggccattacttctcagtgcctttacagatacagaaggagatcttgaagattctgcaaaggaagttaccgaagaaatgccgtccggagaaacgacggacagtgaaacagagcagatgaccggagatgacacagcggatatggaagaggatacaactgcatccgatgaggatctaatcatggatccgacctaccaggatcctactgccaatgatattacagacggagagactacggactggggttccggagaagatgacaccccaacggtatctccgacaccgactcccacattgggacccaatgagcttcctgatcccaatagaacagaaccggaaattccggggatcacagatggtgaaccggaattttatcagaagctggattatacttctcagccgtttacaggaaccggtacggaagaagatccctatgtttttcttgtaagcagtgccaaaggcaaagttacggtgatgggatccttctttaacagaatggcgggatacagtgaggatggaaccaaagtggtccagaaaggcggtagctggttccagctggagtttcatgagaatgataccattgctgattttcaggacagaacactttcctgtacaggatattatctgatcgatggaagtcttcttgaaaatccggtatatatgtatgcggaaacagaatttacactggacgaggcttccaaatatgacaaaaatgatgatgagataccggatgacagcggtgatggagatgacggtactgatggcacaaccatgtcaagagaggatgcgatcaagatccagaaaaacaagatcgcaagtttgaaactggatattgaggaaaataatctgaaaatcactaagctggagaacaaaataaaaaacaagctgataacaagcaaactggatggaacggttgcttacatcggagatgaagtcacaggttcttataatggagatgcttttctgaaagtaaaaagcaaagatggtttttatgttaccggaacggtcagcgaactgatgctggatcagatgaaggagggaacacttcttcagtgtaccagttataattccggcagctttgaggcgaaggtactgaatgtatccgattacccggtggattcttcaaatgcttattatggtggagattctaatcccaatgtatcgtattacacctttaatgcagagatcacagatcgttcattgcagtttaccgaccaggattatgtgacggtatctctgaagtcaaataaacttgccgaaggcagtatggttgtgatgaaggcatttatccgtacggaaaatggaaccagctatgtatacaaagacgtgaagggaacactgaaaaagcagcagatcacagtgggaagcattgtgaacagcggatattatgcagttgtaacttcaggtctgaaatccgatgatcttcttgctttcccatatggtgatgccgtgaaggagggagccaagacaaaagaagtaactttggatgatatgtacaatgaataaataacaggaaggagaaatttcatgtttgaaaatatacgcctggcttttcagggaatatggtcacataagatgagatcctttctgaccatgctgggtattattattggtattgcatctattattgcaattgtatctacgatcaaaggtaccagtgagcagatcaaggaagatctgatcgggtccggaaacaataccgtacaggttatgctctatgacggagacagtacatacgatatggattatggttcttacggaagctcggccacaccgccggttatttctgattcccagaaaacggcgatcggagacttggatcatgtgatcagttctacattttattacagcagccagtctgccagtgtttattataaaaacacaagctttcagggcggaaccgtgtacgggatcgacagcaattatctgaaaacgatgggatacctggtccagtccgggcggggatttgtacaaaaagattatgacagctaccgaaaggttgctcttgtggattccaatgctgcacagaatattttcggaagtgagagccctgtagggaaaaccattgaggtgggatcagaaccgtatattattgtaggtgtgatcactcagagtgaggacagcatgccgaagatcaatacgatttctgagtacgaggaatattcgcagacgatcatgggaagcgtgatgatcccagatactacctggcctgttgcatttaaatttgatcagccgcaaaatgtgacagtccgtgcagacagcacagataatatgagttctgtaggaaaagcagcagaggatattctgaatacaggaatccagaatgaaaaaaacaaatcgaattttaaatataaagcggaagacattatggagaaggtcaagaatctccagaagctcagcgaaagtaccaatcagcagctgatctggatcgcaagtatctccctgcttgttggtggtatcggtgttatgaatatcatgcttgtatctgtcacagaacgtaccagcgagatcggactgaaaaaagctatcggagcaagaaaaaaagtgatcctgggacagtttctgacggaagcttcggtgctgaccagtatcggaggaatcattggtgtggtccttgggatcatcctgtcaaaaatggtgtctcaggtgtcaggagcaccaacagccatcagcgttccggcaattatcggttcggtggtattttccatgctgatcggtctgatcttcggacttctcccatctgtaaaggcagctaatcttaatccgattgatgcccttcgaagtgaataaaaagatatacatacatatagcatctgcaattgccggaaggattccggcggcagatgcttatttttatatctgaaagtattgttcaggttttatgaagctctgcggtctttattttgtcacttttgctgtatatatgacaaaaaaagaaagtataaatagagtttttacaggttttttagagatcataaaaaaatcgtggcagaatctttggatagtatgatataatacatcataagtgggcaaatataaaaacagaaggagataatttcatgaaggttttggaaggtaaatctgtattttccggtattgcgatcggtaagatctcaatcctccagaaagttgacgccagtgttaaacgtgttcacgtggaggatccggaagaagaggtaaagcgtgtggaggcagccagagagcaggctgtggcacagcttcagaagctttatgacaaggctcttcaggaagttggagagtccggagcggcaatctttgaggttcatcagatgatgctggatgatgatgactatctggattccatccacaacattatccgtacagagtctgtaaatgcagaatatgcggttgcaacaactggtgataacttctcatcaatgttcgcacagatggacgacgattatatgaaagcaagagcagctgatgtgaaggatatctcagaccgtctggtacgtgtgctttccggccatggagatggagagcttgaagcatccgagccggtgatcgtggttgcagaggatcttgcaccaagtgagactgtacagatggataagagcaaggttcttgcttttgtcacaagaaaaggttcttctaactcacatactgcgattcttgcgagaaccatgaatattccggcgttgatcaatattgaatacgatgagtccatggacggtaagatggcagtcgtagacggaaagagcggaaatctgatcgttgagccggatgcagagacccttaaaaaatatgaggatatgcgtgccgatgaacttgcacagcgtgcaatgctcaaagagctgaaaggtaaagaaactgttaccaagagcggtcgtaagctccacctttatgccaacatcggaagtacaggtgatgttgcgaatgtacttgccaatgatgcggaaggcatcggacttttccgaagtgagtttgtatacctggaaaaagaagactatcctacagaggaagagcagttccaggtttacaagaccgtagctcagaatatggccggcaaaaaagttatcattcgtactctggatattggagcggacaagcagatcgattatttcaatatggcgcatgaggagaaccctgcaatgggatatcgtgcgatccgtatctgtctggaccgtccggaagtatttaagacacagctgcgagcacttttccgtgcaagcatgttcggaaatatttccatcatgtatccgatgatcatctctgtaacagaggtgaagcagatcaaggctattgtagcagaagtaaaagcagagcttaaggaacaggggatcccgttccgtgatgacgtggagcagggtatcatgatcgagactccggcagctgttatgatcagtgatcttcttgcaaaagaggttgatttcttcagtatcggaaccaatgatctgacccagtatacactggctattgaccgtcagaatgcaaagcttgacaacatttatgattcccatcatgaggcagttctccgtatgatccagatggttgtggataatgcacacaaagaaggtatctgggccggaatctgtggtgagcttggtgcggacactacacttactgagagatttgtagagatgggactggatgagttgtccgtatctccgacatttgttcttccggttcgaaagatcgtaagagaaatgaaataaaacacagatcataaatagataaggatatttttgataaatagtgtgacagctgctgtgcataaatatttgtatggcagctgtttttttagttactgtttgcggttactgttcactggtaatattccgcgaggtgttttttgtgagcgaaggtcacagaaaatttccaattgtgatatagaaaaaaatatgatacactaacatcatggctttctacagcagttcaaagaattagttcatcaggggctgatgcattaattctttgaactgtgagataacagaccaggaggagagaaaagaatgggcaaaattgccattgtaacagacagcaacagcggtatcacacaggcccaggcagaagagcttggcgtttatgtgataccgatgccgttttatattaatgaaaaaatgtatcttgaaggtgtaactctcacacaggaagagttttatgagaagcttaagaaggatgaaccgatctccacatctcagccaagtccggctgatctctgtgatctgtgggacaagcttctgagagattatgaggaaatcgttcatattccgatgtcaagcggactgagtgcatcctgttctactgcaatgggacttgctattgattataatggtcgtgttcaggtagtggacaatcagcggatttccgtaacacagagacagtctgtaatggatgctaagatgcttgccgaggcaggaaaaagtgctgcagagatcaagaagatccttacagatcagaaactcgattccagtatttatatcacacttgacaccctgaaatatctgaaaaaaggtggcaggatcacaccggcagcagcagccatcggaacggttctgaacctgaagcctgtacttcagatccagggagagaagctggatgcctacgccaaggtccgtggcaagaagcaggccaaacgtgccatgctgaaggcaatgaagaatgattgggaaacacgttttaaggaatacgtatctgacggtgagatgtgtcttcaggctgcttatacaggaaatctggaagaagcagaagaatttaaaagagagatccaggaggtatttccgggaatggagatacatatggatcccctttctttaagtgttgcctgccatatcggttatggtgcccttgcagtcgcatgttcaagaaaagtgacgttataagcataaaatacagaaacaaagatatgaggagtttgaaacatgaagaagattatggaacagatggcggaagaactttccgcagcatttgaaaaagcaggttatgatccgtcttacggaaaagttactgtttccaacagaccggacttatgtgagtatcagtgtaatggtgctatggcaggagccaaagcatatcacaaggcaccgtttatgatcgctgatgatgtggtagcacagctgtcagacagtcggatcttttccagagcagaagttgtaaagcctggatttatcaacctggatgtgaaaccggaatttgttgcagaatacatgaataagatggcagaggacgagaagctttctgttgagactgccaagaatccgaagacgatcattatcgactatggcggaccaaacgttgccaagccgcttcacgtaggacatctccgttctgcgatcatcggtgagagcatcaagcgtatcggacgttttgtaggacataaggtgatcggtgatgtacatcttggagactggggccttcagatgggactgatcatcaccgagctgaaacaccggaaaccggagctggtatattttgatgacagctttaccggtgaatatccggcagaagcaccgtttactatcagcgagctggaagagatctatccatgtgccagtgggaagtccaaagaggatgaggcttaccgtaatgaggcacttgaggcaacccatcttcttcagcagggaaaacccggatacatggctctctggaatcacattatgaatgtatctgtaacagaccttaagagaaactatgcgaatctgaacgtagattttgacctctggaaaaaagaatccgatgcacagccgtacatcccggatatggtagaggatatgaagaagcgaggatttgcctatgaggatcagggcgctcttgttgtagatgtaaaagaagagagtgataccaaggagatccctccatgtatgcttctgaaatcagacggagcttctctctatacgaccacagaccttgctactatcgtagagcgtatgaaactctttcagccggatgagatcctttatgttgttgacaagcgtcaggagctgcattttatccaggtattccgctgcgcaagaaaaaccggtcttgtaaatccggagaccaagctttccttccttggtttcggtaccatgaatggaaaagacggtaaaccgtttaagacaagagaaggcggtgttatgcgtctggagaacctgatcgcagatattgatgaggaaatgtatcgtaagatcgtggagaatcgcagtgtaaaagataaagatgcaaaggatactgccaagatcgtaggactttccgcaatcaaatacggagatctttccaaccaggcgaccaaggattacatctttgatgttgaccgctttacatcctttgagggaaatacaggtccgtatatcctttatactatcgttcgtattaagtcgatcctgaaccgttatgtacaggagggaggagatttaagtacaggtaagatccttccggcagtcaatgccagtgagaagaacctgatgcttcagctttccggctttgcggcaatggttgagaacgcttttgaagaaaaagcaccacataagatctgtgcatatatctatgaggtatccaatgcatttaacagcttttaccatgagaccaagatcttaagcgaagaggatcaggcacagaaggaatccttccttcagctgctccagcttacaagaagagtgcttgagacaagcatcgatcttcttggattctctgcaccggatcgtatgtagggtatagttttacagatacaaacactatgaataatgacagaccgccggataaagagacattttttgtctgctatatccggcggactttttatatagaaagttctttgcaaaaagaacaggacgtgctataataggacttatcctaaacgagggcagatcacgaatttctgcctgactataagttatctgatttttttcaaaccggaattcaccggattatcccaaatcaataagaaacgtaattataaatattgtctgacagaaatgagaggaaggtgatctgtctgatcggaaatgttctgaaagaacgttattgcattgtagaacaaattggacatggcggaggtggaagcctttatctggcaaaagatatggagcttggtatctgccgtgcagtgaaagagataccgatcgcaaagaaaaaagaagccagactcatgcagcatctggaatatcctgcaataccgaagattatcgattatgtggaaacaggggagtattgttatctgatcatggaatatatcaagggtcagtcgctgggagaacttctccgttcaggaaaacggttttctttacgggaaatccttgctctgggaaaggagattgccagagtattggaatatcttcacagtcggaagccatcggtctgttacggggacctgaaaccggataatcttatgttttcagaaaccgggcatctgtatctgatagatcttggaagtgccatgttcgatcatggaaaaagaaaacagatctgtgaaggaacgaaaggctatgcggcgccggagcagtatcagggctacttaagaccgggaagtgatatttatgctctggggaagaccctggaaaagctttgcggaaaaaagaaatggcagtggattttatatccggattttttcttgcttctgttccgatgtaccagaaaacaggaaaaatacagatattcggatatgtcagtggttcagaagaaaatccaaaagctggaaaacagatatcggatgatcacttggagaaaacgatttctggaagcggcagctgcagggattctgataggaacactgatcttgatagcaggattgctgaaaacggaagaattttctgtggcgatctcagaagtaacagatttgtattacgaagccagacagtatccggaagactcaaaagatcgggaaaagtgctgtatggcagcggaaaagagactccagaggttaagtagaaattatggggaaaaagaacagcagcgtcgtattgagctattgctggcatggaatgcggagcttttgtgtgaaccggaaaaagcggctttatattatgaaaatcttcttctgtatgatgcagaatatcctgtggcttacggagaatatgggatgtttcttattcggaccgggcagaaagaggccagcagaaagctgtgggaagattataaagagaaagaaaaagcggaattactggatgacagtgaaagcagaaatctgcagctttgggaggagatcaatgagaaaaagaagagaaagtgatcagaaaaaaccaaaagaaatgaaaattcctagtaggaaaacctgttttattgttttgtttctgctggtcttacgcagctggatgatcccttccattgctgtctatggatttgatgtgtcaggaatggatagttttgataccggcggatttgatatgaatgtgggagaaggaaccggacagctgccggaagactgggaagaaagctatgcaggagaaggaagtgatgatagtaattggaacagagaagaaggaaatactgaggagtattccgctgcctgggcagaatcggagaatgatcaggaggagtctgcacaatggaatttagattttcagacagatgaggtacgttctcaggaagaaagctttatggaaaatggagaagatccgggggtcgggggagaaggctatgaagttcaggaaccggatatcagacaagatgaaaatccggggataactattccggaagaagcagagatagctgatacacctgcggaaaaactgacggaaacgccgataccaacaaaactgccaatactgactgaacaaccaatccccatacagacagtgacagcaagtccatctgtaacgttgattcaaaaaacagttcgaaagtcagtgacagatgcatcaaagagggagaagaagcaaaatccggcattatcttactatcggacagaaccaacaggaacgccggataagaaaagagaaaaagagcaaaaaccggtgattcgaatgaaaacagacggtaacaggatccggatagagatccgtccggatattccgttccagatcctttcatttcggatcaatggaaaagaatgtgatttttactggcaaggaaaaaagcttctggcggaattaccgaaaaaaagcagaaattcctggaaagcagaactcatgggttttgtgaaatccgggaagctgtactatgaaaccatggacttaccagaaaaacagtgatacaataggcatacttactgattattttatacaacaggaggaatttatgtataaggcaatcttttttgatctggatggaacactgacagaatccggagaggggattacgaaatctgtacagtatgcactggagaagcttggagtttcggcaccggagctggagccattgaaggtttttgtgggtccgccgcttctggaacagtttatgaaatatgcgggatttgataaagagacagcgcagaagggaatcgaatattacagagaacggtattcagaaaaaggaatgtatgagaacaccgtttatcccggcgtggaaaacactctggcagaactgaaacgtcgtggctacagactggctgtggcgtctgcgaaaccgaccttttacgtaacacagatcatggaccattttaatctgagccggtattttgaggtgatcgccgggacggacctcaatggaccgaaagtaaccaaatctcaggtgatcgaggaagctctggaaagaatgagcctttctgaccatcgtgaccaggtgatcatggtgggtgacagagaacatgacattctcggagccagacgatgcgggatccagtgtgtggctgtatcttacggatatggaagcagagaagaactggaaaaggcacagcctcttcagatcgtagcttccgcagatgaacttctgaattttttcgtctgacccctctgcacagacagaatatttttcaaatagtgtggagggagctttatccggcaggaatccattatcttatcggacagatcctcggaagcgccgtgcttctctggctggcagggcatgtcggcaacgcacaggaaaggtactatagttatacgctggtgatcaccggacttaccggagtgttggttatgtttccggcagtatatttttaccggaaggatcgtataggaaggctgatcggcggtttgacttccgttgaggaacaaaggctatctattcctgaaatgctgcttcttcttgctgctggagccggatttgcccagtatgccaatgtgctggtggcgatcctgcagaactggatctcatccagctatggagagacgatgacgaagattacctcaggaaagagtttgtttatgatgatcttttggatgggtatcatagcgcctgttgcggaagaaatgatctttcgctggctgatctatctgcgacttcgggatcacttttcagtgctggtttccgctgtgatctctgcggcgtttttcggaatttatcacggaaatgtcctgcaggctgtgtatgcgtttgttctgggagggatttttgcgtggtttctggagatgggcggtaataagtggaccagcgtgctgatgcacatcggagccaatacctggatacttattttcagtgaatatgcccagactctggtggaaaaagccggagcaggaagccttctgatgatctatggtgtttttgcggcagcgatgatcggaggatatcagtattttgcgcgccggggagaaaaacgtggctaccgggctgtctgatccaatgtggatcatgaatatctgcctgctaatggatcaggcagagtgaaagataaatatttgctttacagagaatctgtagtgggatcatagtataaggatgccattacagattttttttgtaaaaatatgccggaatcttttgctgccggtaaatttatatagattttatatttatttaagagaccatttcttgcgtatctttgtatcacgtgctattataagtgtattaaaagaattaatacacttaatacgcagattacagagaaaggagcgtcgtatgttattcttggactatcaggacagacgtcccatttacgagcagatcgtagagaaattccggatgctgatcctgtcaggagctttggagccatcttccaagatgccgtctgtgcggcagctggccgtggaattatcaatcaatccaaataccatccagcgggcatatatggaactggagcagcaggggctgatctgtccggtgaagggaaaaggcagttttgtcacagacagcagcaggatcaggcggatcggtatggaagaaactttaagtgagctgaaagagatcgcagaaaagggaaaggctctgggagtaggggagaaagaaatgatcggtgtgatctgctcatgctataaggagggaaacaatgattgagataaaaaactgcagcaaagcttttggcaaaatacaggcagtaaataaggtaaccatggatatcggggaacgggaggtttttggactgatcggttccaacggtgcgggaaaaagtactctgctccgtatcatggccgggatcatccgtcaggacagaggagaggtgctgatggatgaagaaccggtttttgaaaatgaaaggatcaaagagcattttttctacatcccggacgatgcatatattccggcaaattacaatgctctggacatggcagaattttaccgttgtatttatccgagatttcagcaggcacgttttgagacaatgatgaagcagtttcatctggatggaaaacgaaaaatcagcactttttccaagggaatgaagaaacagcttctggtgatcctgggaatcagtacaggaacgaaatatctgttttgtgatgaaacctttgatggcctggacccggtaatgcgccaggcagtaaaaagtatttttgcatcggagatcatgagtcgtgaatttacgccggtgattgcttcccataatctccgtgagctggaagatatctgtgatcacatcgggcttcttcatcagggaggaattctcctttccagagatctggaggatatgaaattccacatccataagatccagtgtgtacttactgacaaaaagaaagaagaagaattaaagaaagagctggaggttttgaaaacagagcatcagggctccctgctgcttattactgcaaggggaacaagaagagagatcatggagaagatacaggcaaaaaatcctcttttctgcgaagtgctcccactgactctggaagaaatatttatcagcgaaacggaggtggcaggctatgaagtcaaaaatttattccagtgagtatatgaaatcctcttctaaaggacaaagatggatcccggcatttgccatgatcgcatttctccttgcatttccggtagcggaacttattctgatgggaaaatggaatgagcgcagttatactcagagtcagctttcatatctgtattccagcctgtggagcagagactttctcacaatgggagcagctgtggctgcggtaaccgcattttttgcagcagtaagcggcttctggtatctgtattccccgagaaaagtggatttctatcacagccttccggtaaagcgaagtgcactgtttctgcacagagtattgttggctgttctttattatctggtgccatatgtgatcatggaatttgctgcggtatgcatcggggcagccagaggatattacagcctttccattatgaaaaaggcactgatcctgctggtgctccatctcctgatgtatcttctggtgtatttttccacagtgctggtgatcgcctgcaccggtaccatgttgatgggagcacttgcatgggcagggctgtttacctacagtatcgttctggcagtgatgctgcagttaagcggacatttattttttgatacctggtacgagggcagttacggaattctggcagcagtgcggaatctgggatctcctcttatggtgatcgtaagctttatagatagatacaacagcggaaactttggaaagcagttgctgatactgatccttacgctgtttatcatggcagcactttcctggatggcattctgcagacgaaggtcagagaataccggaaaagctctggtatatacctggatggagccggccttaagtgctctgatcacaataccatccggactgggaatcggtctgatcttttatatgatcccggaagattcatctaaaacagcatggtggatcttcggaatgatactgggaacgatcctggtccatggaattctggaagtgatctacgaaatggattttcgcagatttttctgcagaaaagtgcagcttatgatctttggaggtgttgtggcaatctgtgcgctgaccatgaaaatggatcttctgggatatgacagttattttccggcttatgacaatcttcaaggagttgtgataaatgtaagcaatttttcatatacagagcagctttgcaatgtggaaaaaaaagaagacggaatctataagatccgatatactgccacctcagacaatagttctggtctgctggatcagccggtgatgaaaagtaaagcattatataacagtctggaggatatcaggcttcagaatgaaaaaggaaaaaaatcaggaaggcgcgtgtatgtgcgctacataaataaacagggattcagtgtatgcagaggttatattgtatcctctgcacaggcacagaatcttatggaagccctgtatgatgagcagacatggaaagaagacagatattcatttttccagctggacaaacagtatctgaaagaggtcaccggtactttctgtgacggagatattcaaacattatttgagaaaaatgcagagaagcgtcaggcgctggcagaggcgctgagaaaggacattttggaaaacggcggtcagacagtaaaagaccagccatgcgcaatgctgatgttcgattatgcgggaattccgtcagaaggatacatggatgaatggggaatgaatgtaccggctgttcaggaaggagagagggtgtctacctccgttctggtgtatccggcatataagagaacacttgcaattttggaagaaacaggatatcctctttccatggatgagctgtctgttgagtatattgatgtttattacttcagctccgaagctgccggcgaagatgatgaagctttttccgacactgagcccatttcggatcttgaagaaacagataacggttataaagtccgttacgataaaaaggaacagctggaagctctgaaaaaatgtatccgtccatcacagctggtaaacggatggactatctggaatgcagatgccacaatggaagtggttctggaaggacaggagagcaccggcggggattccggactttatatgacatttaccggagagatcccggatttcatcaaagcagatgcaaaggcagcccatgtaacagaatgggaggtaaatgattaatggaaaaaccagtccggctggataaatttctggcagatgccggcgcaggtacaagaagcgaggtaaaaaaatacatacagaagggtcaggtgcaggttaacgggaaatctgtgaagaaaccggagctgaaagtaacagaagaagatcaggtggttatgaacgggcaggaaatccatgctgcaccggaatatgtatactatctttttaacaagccggcgggctgtgtcagcgcaacggaggactccagagataaaacggttctcgactatattgaagagaaagacagaagaaagggactttttccggtgggacgcctggataaagatacagaaggcttccttctgatcacagatgacggtcctctggcacacgagcttctttctccgaaaaagcatgtggataagacctactatgcaaaagtatccgggaaagtgacagaagaagatgtcgtgaagctggcagaaggcgtggatatcggggaaaaagatctcacacgaccggcaaggctggagatcctttccacctgggagtccgatacagaatctgcagaagccggtaagaactggaaatcggagatccgacttaccattcacgagggaaaattccatcaggtaaaacggatgatggaagcactgggaaaaaaagtaacctatctgaaaagactatccatgggaccgctggcgcttccttcagatcttccggcagggaagtatcgtccgctcaccgaaaaagagctggagcttttgaaatccgccggaaaccgctgaaaaacagaaaaaaattggaaaaatcccctttacataaggggattttctatgctataattcagaagttgcaaaaataagcacgcacggcgattctataaggatggtgccctacggtgtgaggatgggtccagagagaaggcgacctgtgcggaagaatttaaccaaaaaggagaaaagacatgagcgttatttcaatgaagcagcttttagaggcaggtgttcatttcggacatcagacaagaagatggaaccctaaaatggctccgtacatctacacagagagaaatggtatctatatcatcgatcttcagcagtctgtaggaatggttgacgatgcttacaatgcagtagcagatatcgttgccaacggtggacacatccttttcgtaggaactaagaaacaggctcaggatgctatccgtacagaggcagagcgttgtggagagttcttcgtaaatgagagatggcttggtggtatgcttacaaacttcaagacaatccagagccgtatcgcaagactgaaagaaatcgagacaatggaagctgacggaacattcgacgtacttcctaagaaagaagttattgagcttcgcaaagagcttgttaagcttcagaagaaccttggcggaatcaaagagatgaagagaatcccggatgctatctttatcgtagatcctaagaaagagagaatctgcgtacaggaggctcatacacttggaatcccgcttatcggtatctgcgatactaactgtgatccggaagagcttgactatgtgatcccgggaaatgacgatgctatccgtgcagtaaaactcatcgtttccaagatggctgacgctgttatcgaggctaagcagggaactgctgaggcagatggcgagatcgaggctgagtctgaggagtttgcagctacagaggaataattcgtataaacagaatatttcaggaggaaacgaacaatggctattacagcagcacaggtaaaagagttaagagagatgaccggcgccggaatgatggattgtaagaaagctcttacatctacagatggtgatatggataaagcagttgagtttctgcgtgagaaaggtcttgctacagcacagaagaaagcaagccgtatcgcagcagagggtctttgcaaaactctggtaacagaggatggaaagaaagcagtcgttgttgaggttaatgctgagacagacttcgttgcaaagaatgagaagttccagggctatgttgcagatgttgcagcacaggcacttaacacaacagcagctgatatcgatgctttccttgctgaggcatgggcacttgatacaactaagactgtaaaagaggctcttgcagctcagatcgcagtaatcggcgagaacatgaacatccgtagatttgctcaggttgaggagcagaacggtttcatcgcttcctacactcatatgggtggaaagatcggtgttcttgtagacgttgagacagatgttgttaacgatgctgttaaagagatggctaagaatgtagctatgcagatcgcagctctgaaaccacagtacacaagcgacaaggaagtaagcgctgactacattgagcatgagaaagagatccttatggctcagatccagaacgatccgaaggagtcccagaaaccggctaaggttatcgagggaatgatcacaggacgtatcaagaaagagctcaaagaaatctgccttcttgatcagacatacgtaaaagcagaggacggaaaacagtccgttgctaaatacgtagagcaggtagcaaaagagaacggcgctaagatccagatcaaaggcttcgttcgctacgagacaggcgatggccttgagaagaaagaagagaacttcgctgaggaagttgcaaaacagatgggtaaataatccattaacttaagttttcattatattattttaataagtctgaatttaagtatttaaaaaccttgaaagccgatggtgtagattgataacagtcaaagccatcggttttctttatccaaatatcttggacactctgtcaaatatattctctggttcttcctgccacatcaaaataagtatgctcatgcattgacagagataatcgatactttcaaaacgcctaaatgtcacggcctgcgcctgtttccgcttataattcctcactatttgtgccgccagccaaaggcggcggaatggagatttttatgaaatatacccaggataatggaaaaattaaattatgtgaaactgataatatggatcatctcgtgcggttaacacaagcgttgaatgaaaataatattctttacgaaacgagattgaaaaaaggaacatttatcaataatctttttttcctgattttttatcatacttttgcatcgggaattgatcataagaatgaaacaacatgtatttatgtactagaaaaagattttgctgctgcccaaaaagcaatagtaaactgcagataaaaaaattcatcttccaaggcacaggctctgtgtgctggccatcggtcattgcttgcgtgtctgtttgtcaaccaaagcctgagaatagcaatacgacgattgcctgccagtaactaatattccgcatggaatgagtgaaataaaaatttcgctttacaaataacagataaagtattaaaataaacaaaaagatatcttcagggcagggtgtgattccctaccggcggtagagcccgcgagccgaaaggcatgatccggtgagattccggagccgacagtacagtctggatggaagaagatgatagtacagttgatttttgtatgaatgaatgtagtatcagagctctgagatggtgatccatttcagagctttttatgtaggaaatcagacattcatttatcgatcagatgtaacagatcaattccaccctgcagatatttctgcaggatttttttgtatctggtacatcgttttcgaaataaatataccactcacttgtctgtgaatccgattgcacagggctaaaagcctcggcgtaccagagcgtgtttgaaaaatcattcctgcaatctgcacgccctactttgcggtatattttgcccgaattcagttgccgtagcccgctacggcaccctcatccggacaaaatctcccacaaattgtgacgcacatcttgcagaaagcctttttcaaacacgctctagacaaagaacaggaataagaaagaaggaataaaaatgacggatcaggaatatatgcttcgggcgatccagctggctaaaaaaggagaaggttggacgaatcccaatccgatggtaggggcagtgatcgtaaaagatggaaggatcatcggggaaggctatcataaaaagtatggagaacttcatgcagaacgtaatgctattgcttctcttacagaatcagcagaaggtgcggtgatttatgttacgcttgagccttgctgtcatcatggaaaaacacctccatgtacggaagcgatcattgaacagaagataagaaaagtggtgatcggttcccgggatccgaatccgaaagtggcgggaaaaggtgtacagatgttaagggaagccggtgtaacagtagttgaagattttatgagagaagaatgtgatcagttgaatccggtgttttttcattatattactacgaagactccttatgtggtgatgaagtatgccatgacactggatgggaagatcgcaacgaagacaggagcatcaaaatggattaccggagaagcggcaagaaaagaagtacagcacatgcggcatcagtacatggggatcatggcaggtattggaactgtgcttgcagatgatccgatgttaaacgtccgggtagaaggatggaaaagtcctgtcaggattgtgtgcgacagtaagctcagaatcccgccggacagtcagatcgtaaaaagtgcggaaaagtaccggacgatcgtggcttatgcagatcagaaaaatacagaagaaaaaataaaaatattacataccatgggagttgagaccatttactgtccggatgaaaagaatcagatagaccttaagaagctgatgacagatcttggaagcaaaggcattgacagtattctcctggaaggaggcggtacgttaaatgacagtgccctgcgagccggaattgtaaaggaagtacaggcttttgtggcaccaaagctgtttggcggtgtggccgggaagacaccggtagaaggtatcggagttgaattcccgtctgaagcagtggaactgaaatatacagatatctgccagattggtgaggacatccggataagatgtcaggtgtgtgagaaaaaacaggaggaatcatgtttacaggaatcgtagaagagaaaggaaaagtccgttatatacagctgacaggagaatcagggatcctggcagtgaaagcccggaaggtcctggaaggaacaaggatcggtgacagtattgcggtgaatggtgtgtgtctgacagttacgtcgatccagccggacggatttaccgccgatgtgatggcagagactatcagaagaagcagtcttggaagctgcaaggccggaagccaggtaaacctggaacgtgcaatggctgcagacggcaggttcggaggacacatagtaagcggccatattgatgggactggcgtgatacgttccatgctccgggaagaaaatgccatctgggtatcgattgggacatcaccgcagatcttgcatctgatcgtggaaaaaggatccatctgtattgatgggatcagcctgacggttgcaaggattgatgaagctggttttcaggtgtcggtcattccacatacaggagaagaaaccacccttttggaaaaggtgccgggggatctggttaatctggaaaatgatgtgatcggaaaatatgtagaaaaactgcttggcatcagaaaaaatgaagaagagaaaaaagaatccggaattacgatggagtttcttgaagaattcgggttttagaacaggaggatatacagtatgtcacaaaattatcagtacaacacaattgaagaggcactcagggatcttaagaaaggaaaaatagttctggtcacagatgatccggacagagaaaatgagggagacctgatatgtgcggcagagtttgcaacccgggaaaatattaatttcatggcgacctatgcaaagggtcttatctgtacaccgatgagtgcggaaattgcggcgagattgaactttccgccgatggttgctgagaacacggacaatcacagtacagcatttaccgtggcagtggatcacgtagatacaaccaccggtatctctgcggcagaacgctcctataccattatgaagtgtgtggatgatcagtcaaaaccggaggatttcagaagaccgggacatgtatttccgcttatttccagaaaaggcggggttctggtacggaatggccatacggaggcaacaacagatcttatgagacttgccggactgaaggaatgcggcgtgtgctgtgaagttatgaaagaagatggcactatgatgcgtacatcacagctatgggaaatggcaaaagagcataaccttacatttattacgatccgtgatctgcaggattatataagaatacatgaaaagcatgtaaaggaggaagcagctgcaaacctcccaacgcagtacggtgattttaaaatgtatggctatatcaatgacattacaggagaacatcatctggcactggtaaaaggtgatataggagatggtgaggatgtgctttgccgtgtacattcggagtgtctgacaggagatgcattcggatcgctcagatgtgactgcggcctgcagctgcagacagcgatgcgccaggtagaggcggaaggcagaggaatcattctgtatatgagacaggaaggcagaggaatcggactgatcaacaagatcaaagcttatgcgcttcaggagcagggatacgatactgtggaggctaatgtgaagttaggatttgcaccggatctcagagagtactgggttggggcacagatactgtcagaccttggtgtgaaatcattaagattactgacaaataacccggataaagtttatggacttggtgaatttgggctgaagatcaatgagagagtacctctagagattccggtacaaaagtatgaccgaaagtatatgaaaacaaagcaggaaaagatgggtcatatttttaaggaaataaatttataaaaaacagcaaatagcaggaggaagaaaaaatgagacagatcaatttagtagaaggaaaagtagtagcaccggagggaatgaaggttggtatcgtggcagcgagattcaatgagatcattgtgaataaattattgggaggggcagtcgacggactggtaagacatggagtagaagaagagaatattactgcagcatgggtgcctggagcatttgagatcccgcttacagcacagaaaatggcacagtcaggaaaatatgatgcagttatctgcgtgggagctgtcatccgtggagatacttcacattatgatctggtgtgcaatgaatctgccaaggggatcgcacaggttgaacttgcaacagggatcccggtcttattcggagtgatcacgactgagaatatcgagcaggctattgcgcgtgcaggaagcaaagcaggtaataaaggctatgactgtgcgttatctgcgatcgagatggtcaatctgatgaagcagctctaatagatagggaaataaatgatgacaaaaacgatcatattcgattatgatggaacgatccatcatacccttggaatctatgaaccggcatttcgtgaaacctatcagtggctgacagaacagaaggctgcagaagaacgggagataggctcggcggaaattgccggctggctgggatttaacagtaaggagatgtggaatacatttttgccggagctggatcagagctataaagagcaggcgagcaggatggtaggagaactgatggtcagacagatcaggaagcataaggcagtgtggtatccgggagcagaggagatgcttacagccctgaagaaccggggatatcatcttgtgatcttaagtaactgtaaagcttcttatcgtgaggcgcactggaaggaatttgggatggaacgatggttcgatcatttttatgactgtgaatcatatggattccgtccaaagacagaaattgtgcaggaaatcatccgggaatatacaggcccttatctggtggtcggagacaggaggcaggatctggaatgtgccagagcctgcaaaagcccatttataggatgcctgtatggatatggtgagagcggggagctgaacggagcagatcgtcttgcagaacatatagaggatataccacagttggtgatatgaggatgagttcagctttatccgaaagtagaagctgtacactgacagaaggcataggactgacgggaacggcataaatattataaaaatccgaaggatcctgaaatatgatttccctcagtctatgtatgatcgtaaaaaatgaagaagcagttcttgagaggatcttgaagccggtttctcaggtgatggatgcgatcctgatcgcagataccggttcttcagacagaacaaaagagatcgcggagcagtatacgtcgcaggtgtttgattttccctggtgtgatgatttttctgctccgcgtaattttcttctggaaaaagtccgcaccgattactggatgtggctggatgcggatgatgtcctggatgaagaaaatctggaaaaactgaagagtcttaaagaaactctgaatcccggaacagatgttgtaatgatggaatatgcggcagggtttgaccagagcgggagaacaacattttcttattttcgggagcggataatgaaaacatccagaaatttaagatggaatggggcagttcatgaaactgtgattccggagggaaatatcatttattcagatgtggtgatccggcaccggaaatgtggaaaaggtgatccggaccgtaatcttcgcatttatgaaaaaatgctggcaggaggagaaacgctggaacccagacatcagctttattatgggagagaactgtattatcatcagcgttatccggagacagaggctgtgttggtggagttcctgaaaaatccgtccggatggctggaaaataagatcgatgcctgttttgtacttggacagtgctaccggaaaatgggagaaaaaaagtacgcactggaagcttttctgtacagtctgactatggatgtgccgagggcggaaatctgttgtgaggtcggaaagatttttctggaaagagagcttcccagacaggctggctactggtacgggcaggcgcttactgtgccgtcagataagaaaaaatgtggattttttatggctgagtgtcatggatttgtgccatatatgcagctttgcgtttgttatgataagatgggatgtccggagcaggcattcttttttcataagaaagcgaagggactgaagccggaagatccgggagtattgtatgatcagaaatatttctgggaaaaatatggtctggcataaaagaaaagatatctttattatatttttctggcagggtacaagcttgcggggatcctatgcacaggtaaaagctgttgtcatatactgtagggaaagttattttcctatgaggtgatcgaagaatgctgttcaggcatcgaaaacgtaaggaaatggaaatgcagcaggacagtcatgaggatttgtcctgtatgtcctgttatggaaatcatagttcctgtggatgtgacagatgtggaacaagaggctgcccaggccctgtgggacctacaggaccaaccggtcccagaggctgtccgggagttccgggtcctatgggtcctcagggaccgcagggggaaccgggaatacagggatatacgggagccactggtccggctggagcaacgggtccagccggagtcatcggtccgacgggagcaacaggagccaccggtccggcaggagtaacaggtccgacgggagcaacgggagccacgggtccagcgggagcaatgggagcgacaggagcaacaggagccacgggtccagcgggaacgacgggggtaacaggtccggctggtgcgatcggagccacgggtccagcaggtccaacaggagcaacaggagccactggtcctgcaggagcagccggagccaccggccctgccggaacagtaaccccggcagctgctgttggaaatgcaacaacggtagatgatattgtggaggattttaatgcacttcttgcaaaccttcgtgatgcaggactcctggaaagatagtgaaatgataaacacacgttactgtgcggctgcgtattttatgcagccgctgcatattctccataaaaatatttcattgtagctttctgacgaaaggtgctataatatttttatctaagtatgattataggggatgaaatcgtgaaaaaaaacaagtatgagatcgatatgtgcaatgggtcgatcatggacaagctgatctcgttttcactgccgctgatgctgtccggtatcctgcagctgatgttcaatgcagtggatatcgtggtagtgggacgtttcagtggaagtgaggcgctggcggcagtaggctccactaccgcactgatcaatgtgtttaccaacctttttatcgggatctctcttggtgccaatgtgctggcagccagattttatgctgccggtaaggatgaagaaatgtcagaaacagtacatacatcgatcctgctggctctgatcagcggaatcatcatggcagttctgggagtgatctttgccagaatctgcctggagctgatggatacgccggaggatgtgatcgatctttctactctttatatgcgtatctattttctgggaatgccgttttttatgctgtataactatggcgcagcaattctgcgtgcagtgggagataccaagcggccgttggtctttttgatcatttccggttgcgccaatgcgcttctgaacctgttttttgtgatcatttgtcatttaagtgtggcaggtgtcggaatcggaaccgtgatttctcagttgatctcctgtatccttgttctccgatgcctgtatcagacagagggaagctatcagctgcgtttttcgagtctgtccataaatatggaatatctgaaacagatctttcaggtaggacttcctgcagggatccagagtacagtgatcaatttttccaatgtgctgctccagtcctctgtaaattcttttggctccattgcaatggcaggatatacggcagcaaacaatatcttcggatttctgtatgtgtctgtaaattcagttacccaggcctgcatgagctttaccagtcagaattatggtgtgcgaaaaccgaaacgtatggaccgggtgcttgttgactgtatgatcctgtcctttgtcgtatcctttgccatgggctgtggtgcatactttttcggtccgcagcttctgaagatctatacggaagaccctaaggttatccaatgcggaatggagattcttgcctataccacagttacctatttcctctgcggacagatggatctgtttccgggagcactgcgcggaatgggccgctccggtgtccccatgatcctgtcgatcatcggaaccgtcgggctccggatcgtgtggatattcggaattttcccggcacacagatcattgaaggtactgtttatttcctacccggcatcctggatctttacgatcgttatgcaggtgatctgtttctggtttgtaagacggaaggtacacaggcagcttttgggagaaaatgcataataaaaatgatgagtagaatatcagagaaagcggacatagttccgcttttctgcatttacagggaaaataaaataagccggttcagcgtctgctcctggacagcagacaatgcttacagcctggaaattgactttataacctgagattatattaagtatcaaaaatatacattttaattatacgatgttttgtgttagaatataggacgaatagggtagcagaggaatgactgccctgaaatggataacgatcagaaaggaacttgttttatggataagggaacaatttttaaatttcataatgaccttgataccgatcagatcattgcatcccagtatctgcttctgccgaatctggatgaaatgaagggccacacatttgaatcactggatccagatttttccaaaaaggttaaaccgggagattttgtagttgggggagagaacttcggatgcggatcctccagagagcaggcaccgggtgttcttaaagcacttggagtaaaggcagttattgcgaaatcttttgcccgtatttttttccgcaatgccattaatatcggacttccggcaattgtctgtaaggatctcccggatgccgtgaagacaggagataccatggaacttcatatgtccgagggaactgcagttgccaatggcaagacttattcctgcacaaaactgccggaatacatgcagaatatactgaatcagggcggccttatcgcttctctgaaccgtgaggaggaataagagatgggaatgacgatcgcagaaaaaatcatcgcggcagcggctggagtggacagtgtaaaacccggagatatctatacagtttcactggatcatctgatgagtaatgacggaaccacacatctgactgttgatatgtacaacaataaattaaaaaatcctcatattgcagacacaaagaagctggtatttatcgtagaccataacgtaccgtctgacagcccgaaaacagcggcatcccagaaaaagatgagagattttgcaagagataataatattgatttctgggagggaaagggtgtctgccaccagatcatgatcgagaattatgtccgtccgggacagctgatcttcggtgctgacagccatacctgttcctacggagcacttggtgctttcggtactggtgtaggatgcacagatttcctttacggaatggtaaccggaacttcttgggtcatggttccggaaaccgtaaaatttaacctgacagggaagcttcctgagggtgtttacgcaagagatctgatccttaccattatcggtgagatcggggcaaacggctgcaactatcaggcaatggagtttacaggtgagggcgccagaacattaagcatcagcgaccgtatggcgctttgcaacatggctgttgaggctggtgcgaagacaggaatctttgaggctgatgataaagctctggaatatctgaaagagcatggacgtgagccaaaagcggtatatcacagcgatccggatgccgtttacgcaagagagtatacctttgatctttcaaaagtacgtccggttgtagcgaaaccagactttgttgacaatgtggttccggctgaggaaacctgcggcatcaagattaacgaagcgtttcttggctcctgcaataatggccgtattgaagacctccgtgtaggcgcagaggtgatcaaaggcaaaaaagttgcagagggagttcgtttcctggttgttcctgcaagccagaccatctatcgtcaggcattaaaggaggggcttatcgatatcttcatggaagcaggagctattgttatgaacccgaattgcagtgtatgctggggaagctgccagggtgttatcggcgagaatgaggtcctgatcagcacaggaacccgtaatttcaagggacgtgcaggacatccgagctccaaggtttacctgggatctgcggcgactgttactgcatctgccgttgcaggcgagatcgcgactgctgacagagtataagagtttcagaaaagatttaaacaatatattcagaaattatcagaggataatccgtttcggcgtgggttcttataacagggcagacagaaaacatttgcctgatgatacggaacggaataaacaggagatatacatatggaagcatttacaggaaaagtgtgggtacttggtgatgatattgatacggatatcattatcccgacggagtaccttgcactgaaaaccattgacgatatgaaacagtacggattcagcccccttcgtccggagttggccggacagattcaaaagggagacattattgtagcaggaaaaaacttcggctgcggttcctccagagagcaggcaccggagatcatcaaggcactgggcgtacagtgtgtcattgcgaaatcttttgcccggatctttttccgcaactccattaacaacggccttcttcttattgagcagccggatcttcatgacaatgtaaaagaaggagatcaggttacggtagtaatgaatgagcatgtagagcacaatggaaaacagtacccgatcgcttctcttccgaagaatctgatggatatcatccaggctggtggactggtaaaggccatgcgtaagctaaacggcctggactaaaaaacggagaggagagaaataatgggcgagacgatcattgaaaaaattatcagacataatacaggcaaggcagtaaagcctggcgatatcgtgacggtcaatgtggaccgagtgatgatccatgatatctttattccgtttgtagcggaaaaatttgaggagatgggatttcagaagctgtgggatccggacaaggttgttctgatctatgaccatcttgtaccggcaagtcagcaggatgataccagacatttccatgtgggagatgcttttgcagctaaatacggcatgaaaaacgtacacagaagtgacggtatctgtcatcagcttatgactgaggcaggttatgttaaacctggcaatattgtatttggtacagacagccatacaacgacttacggatgtgtcggtgcattttcttctggtatcggttacacagagatggccagcatcctgggaacaggaaccatgtggatcaaggttccggaaactataaaggttgtgatcgacggagaacttccggagaatgtcatgtccaaggatatcatcctccgcctgatcggtgaccttcgtgcagatggagctacttaccgtgccctggaattttccggaagcaccattgaaaatatgtctgtggcaagccgtatgactatggcgaatatggcaattgaggccggtgcgaaatgtgcacttttcacaccggatgagaagacagctgcttactgcaacgtagagcttgatgattatcagaagagtcttgtgggagatgaggatgctgtctacatgaagaccataacttataaagcagaggattttgtgccggtaatggcatgtccgtctcaggtggacaagatccgtgatgtcagtgagcttcagggtgagaccatcgaccaggtattcatcggttcctgtaccaacggacgtctggaggaccttatggcggcagcagaggtgctgaagggcaaaaaggttgcagactttgtaaagctgatcgtgactcctgccagccgcaaaatttaccgtcaggctattgagcttggcattctggatactcttgcggaagcaggggctatcattacacatccgggctgcgggctttgctgcggaaggaccggcggaatcctgacagacggtgaaaaggtcgtggcaaccaacaatcgtaatttcctgggacgtatgggaacttccaaggttcagatctatctggcatctccgaaaacagcagcagcctgtgccgttgcaggcaagatcgtaatgccggaataagaagcagaagatcctgagagaaatactgctgccagaaacagataaagaaacgtatgagaaagacagattttcgcagaggcgtcagtctgtctttttttaccggatcagaaggatccgggataagtcatttttacagaaaatgggatttattgtattataataacagccagtgtgacaacataacatatattacataagactcgagggataagggtatggagaaaagatcaaccatcagtaaaaagacactgaagatcatacttggaatctgtattggcgtaacgatcctggcagtggcagggttatttgtctatacatacttggcagatcacaatacgctgggacggaagatttccatatggggagtggatgtttcaggactggatgcaaagcaggcagaagaaaagatcactgcggaatttgcagatcgtccggtatcctttcaggaaaatgatcaggaagtttacagtacaactctgaaagatcttggatacagtctcaatgaagaagatcttttgaataagcttacagaacttcagaaacagagagaagagaaccggaaaattttcccaaaggaagaaaatttcaatctggagtgtcagatcgaggaaaatgaggaacaggaaaaacaggctctggatctttccaattttggcgcagaaggaagaaaagcttccaccgatgcatctatccagtacaatgaggagaaaaaagaattcacgcttgtaaaacagacgcagggtacagaaattgatccggataaactggaaactacggtagacacaaacctggatgcggcatttgatacatctcttctgggggatgtcatcacagtgccattgaacaaacatgtatatgtcagtccaacagtaacagcaacagaagatatgaagaataaagtcacaagcctgaacagccagctgaaaaaatatcggagtgccacagtgacttacacatttggaagcgagactgttgtgctggattctgataccatcagttcctggctgaaagcagaaggagatacactgacactggatgatgacgctatcaaaacttatatcagtgacctcgctaacaaatataataccatttatgttccacgtacgttccatacatctgcaggaaaagatgtgacaattgagggaaatgagtatggataccggattgaccaggacggagagtacgcacagcttatagaagatctgaaaagcggtaccgcagttacccgggatcccgtttacagcaaaaccggttatcagagaaacggaaccgacgatcttgcaggcagctacatagaagtcagcctggatgcccagcatctgtggctttacaaagatggaagccttgtgacagaaacagatattgtcagtggtaagccggtgaagggccgggaaacataccggggtgcatggccaattgcatacaaagcaagtccctataatctgtcaagctctgagtatggatacaacgtaaaggttaattactggatgccttttgtctacgggcagggacttcatgatgcgtcctggcagtcatcctttggcgggaaccgttataaaaccaacggaagccacggctgcatcaatctgcctaaggatcaggcagcactgatctataacactattgatgcaggttatccgatcattatttactgataggagcaaaaaagcttcggagagatccggagctttttttatgcccgaaaatgaaaattatcatggaagcaggatcgtaaatgataaggtttttcaaaagtacgttaaaaaaaacacaaaaaaatatcgaaaaagccttgtcgaaacagaaataacgtgatatgatgatttcggaaatcgagctaatacacttcttaattgcggaggaagagtgtttttctcttttatttgggtgcaaattgataaaaaaactcaaataagtgttagttggggtttcatttttttgtttatgtattgttaaaaaaaagacaatatatgaacaagaatatctactataaacgtcagattttagactaagaaaggataatgaaaggtatgaagtacagttattatccgggttgcaccctgagaacaaaggccagagatctggatgagtatgccagagccagtgccacagcccttgggtttgagcttgaggaaatcgaggattggcagtgctgtggtggtgtttatccgcttggcacagatgagatcgccacaaagctttcttccgtccgtgcgctgaaccaggcaaaagaaaaaggccaggatctggtgacaatctgttctgcctgtcatcatgtgatcaagcgtgtcaatgatgatatgaaaaacgtggaagatatccggaccagagccaacaattatatgcagctggaagctccctatgaaggagagacaaccgttctccattatctggaggttctccgggacagagtcggttttgataaactgaaagaaaaagtagtaaatcctcttaccggaaagaagatcggagcctattacggatgtctgcttctgagacctggaaagatcatggcatttgatgatccggaaaatccaaggatcatggaggattttatccgtgcccttggcgctgagcctgtgatctatccttacagaaatgaatgctgtggaggatatatatccctgaaagaaaaagaaatgtcacagaatatgtgtgaaaagatcgaagaaagtgcagccggatttggcgcagatatgctgatcactgcctgtccactgtgcaaatataatctgaataaaaatgccggaaacagactgccggtttactattttacagagcttctggcagaagcccttggcgtcaaagaggaggtggcaaaatgagagataaccattctgctgcggaaaaaataaaggagattagtggaaccaatcctttaaaatgcatgaaatgcggcaaatgttccgcaacctgcccttcttttgacgagatggatatcaaacctcatcagtttgtatcctatgtgatcaatgaaaatatcgaagcacttgtaaattcagcatccctttggaaatgcctttcctgttttgcctgtgtggagcgctgtccgagagacgtaaaacccggaaagatcattgacggggcaagacagcttgttgtccgggaaaaaggtggcaactatctttcaccagatgagatcccggaacttcttgatccggatcttcctcagcagctgctggtaagtgcattcagaagatacaggaggtgagaacgtgcagagaatcggtgtatttgtctgtcactgcggaagtaatattgccgctacggtagacgtaaaaaaagttgtggaagtcatagcgaaagagccgggtgttgtacacgccgaggattaccagtatatgtgttccgaggcaggtcagtccagaattcaggaagccatccgtgaaaaaaatctcacaggtgtggttgtctgttcctgctccccgcgtatgcatgaggcaactttccgcaaagcagcggaaaaagcaggcctgaatccatacatggtggagatcgcaaacatccgtgagcactgttcctggatccacaaggatatgcaggaggctacggagaaggccgtgatccttgcaagagcagcagtagcaaaagtcaatttaaatgctcctcttcagccgggagaaagccgcgttacaaagagagcactgatcatcggaggcggtatcgccggaatccagacagctcttgatattgctgacgcaggctatgaagttgatatcgtggaaaaaacgccaagtatcggcggaagaatgtcacagcttgacaaaaccttccctactctggactgttccgcatgtatccttaccccgaaaatggtagaggctgcagctcatgaaaagatcaatatctatacatacagtgaagtagaaaaagttgcaggttttgtaggagattttactgttgatatccgcaaaaaagcgcgaagtgtcaacatggacaaatgtacaggctgtggagtctgccaggaaaaatgtccttccaaaaagatcccaaatgagttcaacagagggctgaacaaccggtcagctatttatactccgtttgcacaggcgattccaaatgttcctgtgatcgacagagagcattgcctgaaatttaagacaggcaaatgtggtgtctgctccaaagtatgtcaggcaggagccattgattacgatcagcaggatgagatcgtaacacagaaatacggagcaatcgtggtggcaaccggatttgataccatcaagcttgacaaatatgatgaatacgcatacagccagagcaaggatgtgatcacatctctggagctggagcgtatcatgaatgctgcaggacctacaaaaggacatcttgagcgtctttccgatggaaaagcaccgaaggagatcgtgtttatccagtgtgtgggaagccgttgctccgatgatcgtgggaaaccatactgttccaagatctgctgtatgtacacagctaagcatgccatgctgatccgtgacaaatatccggataccaatgtgacggtattttatattgatgtccgtacacctggtaaaaacttcgatgagttttacagaagagcagttgagcagtataacgtaaactacatcaaaggtcaggtaggaaaagtaattccgcagccggatggaacacttcttgttcagggctcggatcttcttgataataagcagatcttcaagaaagcagatatggtagttcttgcaacagccattgagccgaatccggatgtacgtaagatcgctaccatgcttactgcaagtattgacactaacaatttccttacagaagctcatgcaaagcttcgtccggtagaatcaccgacagcaggaattttcctttccggtgtatgccagggaccaaaggatatcccggagacagttgcccaggcaggagctgcggctgtaaaggccataggacttcttgcaaaggataagctcacaaccaatccatgtacggcaaaatccgacgagcttctctgtaacggatgctctacctgtgcaaatgtatgtccttacggagcgatttcctatgaggagaaacaggtcaacgatcacggtatccgtgagacaagaagagttgcggttgtcaatacagcactttgccagggctgcggtgcctgcacagtagcctgcccgtcaggagccatggaccttcagggcttctccaacagacagattatcgcggaggtggatgcaatatgtcgatagaaacaaaggaagaattcagaccaaagatcgtggcattctgctgtaactggtgcagctacgccggagcagaccttgccggaagcagccgtttaagctatccggcggatgtaaagatcatccgcgtgccttgttcctgccgtgtcaatcccatgttcatcctccgtgcctttgaaaaaggagccgatggtgtgatcatgtgcggatgccatcctggagactgccattacagtaccggaaactattatgcaagaagacgtatgacacttctgttttcaatgctggattatattggggtagaaaacggaagaacacgtgttgaatgggtatctgccgcagaaggcgtgaaattttcacagactatgaatgagtttgttgagaagatccattcacttggtaaaaacgtgagattggaggatataagatgcaggagctgataaaacgtgcaaaagaactgcttgcagatggcacggtagtccgggttcttgggtggaaagccggagatcttgcctttaatccggaaccagcctattttgaaacaccggaatctctggaggattttgtctatgatggattctgcggtgccaatttaagcaaatatatgatcgaagcttccaagctggaaggaaaaaccatggtctgtctgaagccctgcgatacatatagctttaaccagcttttgaaagagcatcgtgtagacagagaaaaagcctatatcgtaggcgttggctgtaaaggaaagctggatattgaaaagatccgcaaaatggggatcaagggtatccggggaatttccggagcagagattaccggagatgcagaaacattgactgtggatactgtttatggagaaaaaacctgtgcatacaaagatgccatgctggaacgctgccatgtatgtaaaggaaaagagcataaaatttacgatgaactgatcggtgagtcaaaggagacaaaggacgctgaccgtttcgcagaagttgagcggatcgaggcaatgagtccggaagaaaaatttgcattctggcagagcgagctgagtaaatgtatccgctgtaatgcctgtcgtaatgtatgtccggcctgcagctgccgcaaatgcgtttttgacagcaacaaattcgacagcgcccagaaggcaaatgtggattcctttgaggaaaagatgttccatgtgattcgtgccttccatgtagccggaagatgtacggactgtggcgagtgcagcagagtctgcccgcagagaattccccttcatctgtttaaccgtaagtttatcaaggatattgataagttttacggtgagtaccaggcaggcgaggatgcggagtcaaagggtccgcttaccagctttacctttgaggatgtagagccagggatcgtggcagaaaggggataatgtatgtataagatcgcagtagaaaatctgccggcattattccggaaaattgccgcagaccaggaattatatttaccggtaaaggtaagtgaccaggtaaacttcaagacatggagcgaggatgcagaagtttcccttgaaacactgaaaaccgtgaaatcaccgaaggatgccttctttccgcagagtgaaaatctctatacctgtaaaaaagacggaaagaatatcagtattgagcctcaggcactgaaagaccagaattttgttgtattcggaatgagagcctgtgatgtacagggtgtgaaggttctcgacaaggtattccttggggatccggtggatactttttaccaggcaagaagagaacatggaactatcgtagctcttgcctgtcatgaaccggaggaaagctgcttctgtaaagtatttggcattgatgctgcagatccggaagcagatgttgcagcctggatcatcgagggagaacttttctggaagcctctcacagaaaaaggaaatgctctgacagaagctgtgaaggagctcttggcagatgctgatgagacaaaggtagaagaggagaagaaggcgatccgtggtattatcgagcttcttccatatacacatctttcactggaaggatgggcgcaggaagaatacatggaccgtttcaattctcctgtatgggagaaactgtacaagccttgtcttgcctgcggaacctgtaccttcgtatgtccgacctgtcagtgttatgacatcaaggattacgacacagggcacggtgttcaccgttaccgctgctgggattcctgcatgtattctgattttaccatgatggctcatggaaacaaccgtaccagccagatgcagagattccgtcagagatttatgcataagcttgtttattatccgttaaataatgacggcatgttctcctgtgttggctgcggccgctgcgtggagaaatgtccggaatctttaaatatcgtaaaagtcatcaaggcctttgaaaaacagggaggtgaaaagaatgagtgaatgtacctgtcataaaaattatacactggatacgctgatccccaaggttggtgtgatcacagatatccgtcaggagacaccggatgtaaaaaccttccgtgtggaagctccggagggcggaaagcttttcgagcatatgccaggacagtgtgctatggtctgtgcgccaggcgtcagtgaaggtatgttttctattacttcttctccgactgtaaaggattatcaggaattcagtatcaaaaaatgcggatcccttaccgatcatctccacagccttcaggttggagatgagatcgcagtccgcggaccatacggaaatcattttccggtggaagataagttaaagggaaaaaatctcctgttcatcgcaggtggaatcggtctggcacctcttcgttccgtgatcaattatgtgctggataaccgtgaggattacggaacagtagatatcctctatggttcccgttccgcagatgatctggtgcagcttaaggaaatccaggaagtatggatgaaaacagaaggtgtaaatgtatatcttaccattgaccgcgagcaggaaggttgggacggtcatgtaggatttgttccgaattatctgaaggagattggttttgataccaataagaccgctctggtctgcggcccgccgatcatgatcaaattcgttctggcaggactggaagagctgggcttctccagagatcaggtatataccacactggagcttcgtatgaaatgcggtgtgggaaaatgcggccgctgcaacatcggagacaaatacgtctgcaaagacggcccggtatttaggtgtgatgaggttgatgaattacctaatgagtattgataagcaatgagcagtgcacagacgttgataaaaacagatgcgtcatgcttgcatgtaagcagctgtttttatcggcggctgtatagggcgaacgccctcaagcgagatgaagtgaagcggaatcgagcttggcactgcggggtaccgtatgtcaggcgtcatgcttgcatgtaagcagctgtttttatcggcggctgtatagggcgaacgccctcaagcgagatgaagcgaagcggaatcgagcctggcactgcggcgtacggtttgaataagtaaaagaaaggactggtaatctcaaatggaaaataatatggtaaacgtatattttttcggtaaaaaatacagcgttcccggtgatctgaccattatgacagctatggaatatgccggttatacattaaaaagaggatgcggctgcagacacggattctgcggtgcctgcgcgaccatctacaggatcaagggacagaatgagctgaaaacctgtctcgcctgtcagacacaggtgcaggagggaatgtatgtggcaagcatcccgttcttccctacagacaagagactttataatatagaagatcttaagccgaaccagcaggtaatgatggagctttatccggagatctacagctgcatcggatgcaatgcctgcacaaaggcctgtacacaggacttaaatgtcatgcagtatattgcatatgctcagagaggcgaacttgaaaaatgtgcagaggaatcctttgactgtgtaagctgcggctgctgttccgtaagatgtccggcaggaatttcccatccgatggtaggccttctggcaagacgtctcaccggaaaatatattgcgccgaaaagcgagcatctggagaaacgtgtggaagagatccatgagggcaaatttgacgatatgatcgagaagatcatgcagaagccgatcacagagatgcaggaactttacaacagcagagaaatcgagaagtaggagggcgtaaaacatgtatgcaccatatccagaaaatatgatggaatccatcaaaaaggtagaggctacaagagcggagcgtatggcaacagagccaagacgtctgagtgcagatgagaaagatgctcttctcaaaaaattccatccggactataacccggatgcatttgcagagatcaaggtaggaccgaacaagggacagaaagcaccactggaactgacaaaaatgctccattcggaaagccgtctgctcaacgaaaaaatcgatcttacaaaaatcgattatgatgtagatgtactgatcatcggcggtggcggagcaggctcttcctgtgccatcgaggcccacaacgcaggtgccaacgttatgatcgttacaaagctccgtatcggtgatgccaacaccatgatggcagaaggcgggatccaggcagcagataaagaaaatgattctccggtacagcattatctggactgctttggaggcggacattttgccgcaaaaccggagcttgtaaaaagactggtaatggaagccccggatgcgatcaaatggctcaatgaccttggtgttgagtttgataaagcagaagacggaaccatggtcactacacatggcggcggtacctccagaaagcgaatgcatgctgcaaaggattattccggatcagagatcatgcgtactatccgtgatgaggtcttaaatcttaagatcccggtagtggaatttacctccgctgtagaacttctgaaggatgaaaaaggacaggtttccggcgcagtccttcttaacatggaaacaggagattattccgttgcaagagcaaaaacagttgtaattgcaaccggtggtgcaggaagaatgcattaccagggattcccgacatccaaccactacggagcaactgctgatggacttgtgcttggatacagagcaggcgcttcccttctttaccaggattctatccagtatcatccaacaggtgcaatctatccgtcacagattcttggtgccttggtaacagagaaggttcgttccgttggtgcacagcttgtaaacgcaaacggagaagcttatattcatccgctggaaacccgtgacgtaaatgcttccggtgttatccgcgagtgtgaggaaggtcgtggtgttgaagttccaggtggacgaaagggtgtatggctggatactccgatgatcgagatcctgggaggtgagggaactatcgaaaagaggatccctgccatgttccgtatgtacatgaactacggcattgatatgagaaaagtcccgatcgtgatctatccgacccttcattatcagaacggtggccttgagatcaacggagacggctttacaaaagaaatcccgaaccttctggttgcaggagaggcagcaggcggaatccacggaagaaaccgactgatgggcaactctcttcttgatgtaattgtattcggacgaaatgcaggtaaaaaagcagctgccaaatgcaaagaggtagagcttggtacaatgaacctggatcatatcagaaaatatgaagaggaactgaaaaatgcaggagttgatacaggagacgtatctcctatgcttctgccgaaatatgcccgccacgaacgttaagttaaaaatatgttatgataataaaaacatatgagataagcgaaaggagtctattatgagagaaatcgaagtaagcagacttacagaggttatcgaaaaactctgtatcgaagccaatgaacatctcccggaagatgtgaaggatgctatcaaaacctgccgtgcctgcgaggacggcgagattgcaaaaggtgtccttgataacattatcgagaattttgatattgcggacagtgagaatgttccgatctgtcaggataccggaatggcatgcgtattccttgaaattggtcaggatgtccactttacaggcggagatttaaatgatgccatcaatgaaggtgtacgccgcggatacgataaaggttacctgagaaaatccgttgtcaaggatccggtacgccgtggaaacacaggtgacaatacaccggctatgatctatacagagatcgttcctggagatcaggtgaaagtaactgtaggaccaaaaggcttcggaagcgagaatatgagccagatccgtatgttcaagccatctgcaggccttcagggaatcaaggatttcattcttgaggctgtagaaactgcaggtccgaacccatgcccgcctatggtagttggtgttggaatcggaggaacttttgacaaatgtgcacttcttgcaaagaaagcgctgatgcgtcctctgaatacagagaacccggatccttactatgcagatcttgagaaagaaatgctggagaagatcaacaagcttggtatcggtccccagggctttggcggaaagacaacagctatcggtctgaacattgagactatgcctactcatatcgcaggtatgccatgtgcagttaacatcaactgccatgtgacacgtcataaaacggaggtgctttaatatggaaagaagaaagatcacactgcctctgacaagagagctggcaagaactctccatgcaggcgaccaggttttactgacaggaaccatttatacatcccgtgacgcaggtcataagagaatgtgcgaggcccttgcaaaaggagaaaagattccttttgaccctacagacgctaccatttactatgtaggtccgactcctgcaaaaccaggcgaggtcatcggctccgcaggccctacaaccagcggccgtatggatgcttatgcaccgaccatgatgtccgtaggcgccagaggaatgatcggaaaaggtgcccgccttccggaagtcgtagatgcaatgaaaaaatatgacggcgtatatttcggagccatcggcggtgcaggtgcacttcttgcaaaatgcatcaaaaaagcagagcttatcgcttacgaagacctcggagcagaagcactccgcaagctttatgtggaagacatgccgcttgtagtcatcattgacagcgagggaaataacctctacgaagaggggcgtgcagagtacctgaaagaccacgcagaataatcttttgctctacaatatgatattgtgatatatttcaaaaaggaataaaaaggataaaagtccgacagtaaatgctgaagatccgtgcagaagcatttgttgttggactttttaatttgatcctttttgaaaaaacatcacgattaacgcaaatgctgctgcataaacatcctcctctgtgaagcataaaattttacccggatttacaataaatttaaccataaatccggttgacaaaacccggccgggaacgttataatggccgagttgataataaaatttaagaaaaaaaggcaggtgaacagaatggacagttgtgattctcatgggcgaagttgtagctctcagagtgaaagatggaaagaacagagcgagatgagactgttccattctgttttaagtgtacagaatattatgtctgtatatcagaaggatatatttgacaggatgtatcggtgacatcagaatctgtacggtattattacattataattgcagcaggattataatacatatttttttcattcttctcattctgagaatcttacagtaaagcgatcatgtataaattcatttcgctttatactcaaatcccaaggaaacacaatcaaaaatcaaacagcacatagacatgctttaacatgtctgtttttggtgtgcgtattttgtgcgatactatgtgaggaggatgagaaatgacaaaaagaaatcaggatttttcaaaagatattctgagtctgatccgaagcagtgtttctccggcagttttaagtgaaaggctgcaggatttccatgaaaacgatctggcggaagtattaagagaattaagcactacggagcgcagcagactataccgtatcctggaaagcagtatgctggcagatgtttttgagtatctggaggaagaagaaactgtacaatatctggaagagatggatgtaaaaaaagcggcagccattctttccaaaatggaaaccgatgccctggcagatgttttaaagcagatcgataaagaaaaacgcaagcttctgatccagcttctggacgaacaggtgcggaaagatattgaaatgatccgttcctttgatgaggatgagatcggaagcagaatgacaacgaactgcattgtgatccgtgaaaacctgaccgtaaagcaggccatgagtgagctggtttcccaggcggcagataatgataatatttctacgatctttgcagtgacggacagaggggagttttatggagctctggatctgaaggatctgatcacagcaagacaggaccaccctatggaagagctgatcgtaacttcctatccatatgtgtatggtactgagcagatcgacgactgtatggaacgactgaaggattattccgaagattccattcctgtgctggacgatgacaatcgtttccttggagtgattacatccgcagggatcatcgatctggtagacgatgagatgggagaggattatgcaaagctggccggtctgactgcagaggaagatctgaaagaacctctttttgaaagcatgaaaaaaagaatgccctggctgatcgttcttctgggccttggtatgctggtatcttctgttgtgggaatgtttgaaaaagtagttacctgtctgccgatcatcatgtgcttccagtctctgatcctggatatggcaggaaatgttggaacccagtccctggctgtaaccatccgtgtactgatggatgagacgctgacgggaagacagaaagcagagcttgtgctgaaggaaatgcggatcggtctctgcaacggtggtctgctcggtattctgtcttttgtactgatcggattgtatattttcttattcaaaggaaaaacactcgtatttgcctatgcggtatccggctgtatcggattatccctgctggtggccatgctggtatccagtgcagtgggaacctgcataccgctgtttttcaaaaaggttggtgtggacccggcagtagcctcaggtcctctgatcactacggtaaatgaccttgtagccgtgataacatactatggaatgagctggatattcctgattgagatgttccacctggctggctgagagtaaaatgcagctatgctcataaaaagagacagatatcagaaatctgtcgaataacagaaaagttaccaatataaaaaaattccggatcgaaagattcgggatttttctttacatacgaacagaaagctactataataaaagatacgctttgcccgtttaaaacgttgcagaaataaatacaaacaacgggcagaaaaagagaacaaaacgatcacatggggtgattggggaaaggaaacagtaacatgatagtaacaatgatcgaaaaggtctattcatttctgtggggagatctgataaggatcccgcttccgggaggaagtacgctgggaatctcacttctgatcctgcttttgattccgactggtatttattttaccatccggacaaagcttctgccgatccgtctttttccggatatggtgcgagccctgtcagaaaagaaaagtgacaaaaaaaatctttcagcatttcagacgctgatcgtatctacagctacccgtgtgggaatgggaaacctggtcggtgtggtagctgcaatctcagcaggaggtgcaggagcggtattctggatgtggatcacggcgctgatcggttcctccactgcttttatcgaagcgaccctggcacagctctataaagaaaaggatcctctttatggtggctacaggggcggtcctgcctactatatccatcgctactgggaagaaaaacagggcagaaaacgaaaaaaggttctgctttccgttctgtttgccatttccggcctgatctgctggtgtgggatcagtcaggttatcagcaattcagtcacggcgtctttcaaaaatgcttttgatattccgccgctgtatactaccatcgtgctggtagtgatcgcagctgtgatcgtgcttcggaagaatgcaacggttaaagttctggatattctggtgccggtgatggcagtgctttattttgtgatcacactgtttattatatttacaaatctcggaagtatgccgggagtatttaaacggatttttgaagaagctttcggatttcgtcaggctgctgccggcggatttggcgtcgtgctgatgaacggagtaaaaagaggtcttttttccaacgaagcgggaagcggctccgctccctgtgcagcagcggcagcagaatgtgacagtccggtaaaagccggatttgtccaggccctgggtgtatttgtggatacgatcgtgatctgcagctgtacagccatgatcatgcttctggtaccggaggatctggtacagggactttccggaatggaacttcttcagactgccatgcattatcatatgggacagtttggagtgatctttattgctgcaacactgtttatgttcagcttttccacattcctgggaatcctgttttatgcaagaggcaatgtgtcctatctttttggggataactggggttcacagacaggatataaggtgctggcactggtgatgctgtttatcggtgggatcgcagcttacacatttgtatgggatctgggagatgtaggaattggcctgatgacgatctttaatattttcatgctgtatcctcttggggaaaaagcactgaaagagctgaaaatctatgaatcggaaaagaagaaaaaataaaacggtttacagaccttgagagcatatgataatatcaaggtaaagcgctaaaagaataaagagttctgacagccggaaggagtcagactctgtgcaatatcaacggtaagttggatcaagaggaggatatgaaagatgtatattacatgtctggacgtagaaggtgtactggtaccggaaatctggatcgcatttgcagaggcaagcggaatcccagagcttaagagaacaacccgtgatgagccggattatgataagctgatgaactggagacttggaattttgaaggagcatggtctgggactgaaagagatccaggagactattgcaaagatcgatccccttccgggagcaaaagaatttctggatgagctgagatctttttcccaggtgatactgatcagtgatacctttacacagtttgcaactccactgatggagaagcttggacgaccgacacttttctgtaattccctggaagtagcagagaatggagagatcacaggctttaagatgcgctgtgagaaatccaagctgacaactgtgaaggcactgcaatccatgggatttgagactatcgcaagcggggattcctacaatgatctcggaatgatccaggcaagcaaagtaggcttccttttccgcagtacagagcagatccgtgcagatcatccggaaattcctgcttacgaagagtacgatgaacttcttgcagcgatcagagaagcgatgaaatgaagaggggaaaaccggaatgatcaacgaaagaattatgatcgaagagaaaacaaaggattataatgaggcatggatagaaacttatttctggcaggagtcggaagaactctatccgggacagaagcgtccggtcatagtgatctgtccgggcggagcttattgcatgacttcagacagagaagcagaagccattgctgtccggtttatgggaatgggctatcacgcagtggtacttcgttacagtgtggcacctgccagatatccggtggctctccgtcagctggcaaaaacagtagctcttctcagagagaacagcgataagtggcatattgaaaagaacaagatcattgtatccggcttttcggcaggaggccatctggcagcttctctgggagtgttctggaatactgaggagcttgccgggatcacgggaatggaaaacgagcggattcgtcccaatggcatgatcctgaattatccggtgatcacttcaggggaagctggccatgaagaaagctttcgaaatcttctgggagatcgttatgaggagctgaaagatcagatgtctctggaatttcaggttacggaagatacacccagaagctttatctggcatacctttgaggatcagacggtgctgctggataatacacttctctttgttcaggcactctataaaaagggcattccagtggagtatcacgtttttccgcagggcccccatggaatcggcttggcaaatgagctgactgccaacgaaaacggcagagggattgcaagagcctgtgaaccatggagtgagcttgcaggaaaatggctgaaccgtgaattcccatggtggaatggagcaaagatcgaaagataatacgagactgctatgtcggataaaatatcctttttaccgggaaaccggtagagagggtattttttatgattgtgatgcttgtgatgactgctgtatttgtcggctgttttgtctggcttatttgatgataaaagctttgcagggctttggtgtggatctggatcaacattcacattgcagaaagaaaggaattttgataattatggataaaaatcagatttttattaccagtggtacggaatataaaagaatgacaaaggagcttctggaaaaagcggatcttcagtcccatatcggggacagaaagaaaaagatcgggatcaagccgaatctggtttctccttcagaggcttcttggggtgcaacgactcatccggaagtggttgcaggaattatcgagtatctgaaggagcatggcttccgggatatggtgatgctggagggatcctgggtaggagataagacaagggaggcttttgagacctgtggctttgacaggcttgaggaagagtatcaggtgccgttctgggatatgcagaaggataagggtatttctgtggactgcggcggaatggagctgaatgtctgtgagcgggtaaaggagcttgattttctgatcaatgtgccggttctgaaaggccattgtcagacaaaaatcacctgtgcccttaagaatatgaaggggttgattccaaataaggaaaagagacggtttcattctctggggcttcataaacccattgctcatctgaatatggggatacagcaggactttattgttgtagataatatctgcggggatctggattttgaggatggcggaaatcctgttgtgatgaaccgggtgatggctgcctgtgatccggttcttgtggatgcatatgtgtgtcagatgatgcattatgaggtagctgaggttccttatgtgaagctggcaggtgatcttggcgtgggctgttcagatatttccaaagcagatgtcagatttctggaggatggtgcggatcagaggatgccagtatccagaaaggttgtggagcttgcggatgccgtggaggaagtggaatcctgcagtgcctgctacgggtatctgatcccggcattggagatgctgaaggaagaggggctttttgagaaactggatgaaaaaatctgcatcggacaggggtatcgtggtaagacgggagtgcttggtgtgggacactgtacctgtaagtttcagaattatgtggaggggtgtccgccattggagagggatatatatgagtttttgaaagagtatattggtgaacggacgccggggaagtgacagtcctccgggccggactccgtcgggggatgctgctaaggttccgtgagccggctaaaaccattgcggaagggcccagaactcgccttcggctcaaacagctgggcccttccgcaataacgccgtctcccgcaacctaaccatcatcacccctcctccgtagcagcccggaggactgtcacttccccggctgacgtttcagacggagaggtggaagcggacgcgtggtgtcctgtccttacgttttgatgagttgagcgtccgcagttggaggtgtgggaaggatagcgtctggtcaataaatattttggtgttgctcaatgtgttggaatggtgggaaggatacgtcttcttgttgaaaggtgttatgccgatgagatcagcgcagcctggcgttttaaacaaacgcagaatccatcgccctgtcagtaacgtaacatagccaaaacgtacggttcatggcggggcctgagggaaggggtgcaggggaggggaaacggcctttcgcaactacgagtgcttcccctcccccgcggtttcacttacgcttccaaagcgtaaaaacatttttcagaaaaaaagaatcctaaagacatctctttacaatctcaacaatctgctccatagaaaaccggctgctgtcaatacagagatcatactgtgtcatatccagccatttgctgtctgtaaagtattcatagtaagcttttctctctttatccatttttttgaccagcttccgtgcgctggcttcttctctgccggtacggcgtatcacattctgaactctttcctcaaaaggtgcatggataaaaagtttaagtgatttatccttcaggatattggtcgcacagcggccgacaattacgcagtcctctctctgcggaagggacaggatgatctttctctggagatcatagagcacatcgttcattggtacaaaagagaaattatctgtaaactgcagctcactgtcaacgggaaatacccactgactggcttttttctcgtctacctttgccagggtgtcgaaggggatattgtttttcttggcagccatgtcgatcagttctttatcataaaaaccgatgtccaggttttcagccagagtcttgccgataaggcgtccgttgcttccaaacatacgattgatggtgataatacgttttgccataaagatacctcctttatctcggaccggaagcaggaatatctgatttccggtagtttttcttacttcttttataacatatttcggtaaaaaataccagaaaataatatataatttttaaaataatatttaatatatacaaaaaataatggtagcagacagaaaatataattaattatttgtatttgtatatgaaaaataggatgcttttttcaccgggttttcacagatcacacaaagactttacacatttttttttaaaatatttttaaaacagagagaacatacacagcatatttggaggttaaggaaaatgaaacgacggcgtaaaaggcttatggtgatcatcccgttttctactatgaccaggcttgcggataatgtactggatgtgaccatgttttacgcatccggagcagatgaggatagcctggagccggcagaaaatgcgtttacagagctcctgatggaacgctttgagcaggacgaagacgctttttccattgtggatcagtcagagatcatggaagccatgtctggtgtcaccaacaccatgtctctgatgatcggtgtgctttttggcctgtatccggctaacaaggcagcatccaggaagcctattgatgcgcttcggtattccggctaaaaagaaattataataacgtgatttgtgagatggattttttgtcagaacaaattgcgtttttttatctggaaatccgcacattgataaggtataatctataacagttagaggaatatctctgccgggaggacggaactgccggcagggaactgccgagaaagggatgacagtaaatttgaacatcgtggagaaatgtgtttcatgcctgaatataaaagaatcttatgatctggccaggcgcatggaacaggaaaaaacaaatccggttctgggatatcgtacagcaggctccctggcagagcgaaaaaccggagatatgcttttggaagaaatgaaaaaagccggtctcacacaggtagaaaaagataagatccgtgtggatgcatgggaatttaaaaaagctgtgatgcgctgccatgacagagagggaacctgccgggagatccagcttggcgcatatcagacggattttaagaccaatggctttcagaggtttgatcttgtatatcttggaaagggtacagctgacgaatataaggatatcgatgtgaaaggaaagctggttcttatcgagatcaatcagagagaagaatggtggatcaactacccggtgtatcaggcacacctgaagggtgcagcagctctgatcgccgtacagagcagaggatacgcacagatcgatgatacggctttgaatgcacaggatatcgcaggaccttcctgtgcgcctgcattttccatgtcacggacagattttcttatgatccgtcagctgatggaggaaaaaaatgagaatgggaatcgtgttccggagctttccgtggaatttgatgcggacacagaggtgatcaaagaccagtatacctacaatatcgttggcaaaatctcgggaaccgattcggattccatgatcctgttaagtgctcactatgattcctattttgagggatttcaggacgataatgcggcagtggccatgatcattggaattgccagggcgctgctccgtggtggctataaacctcgccatactattgtggtatgtgctcttgcagcagaagaatgggggatttccgacacaaaatatgactggtccacaggtgcttaccgccaggtatttgaggcgagaccggagtggcaggggcacgtgatcgcagatctgaattttgagcttccggctcatgcacacagtaccagagatgcagtacgatgtacctatgagtatgcggattttgtgcgcagcttcgtggatgctgtgcagatgccggaggggatttatccggagggcatgaccacgttgtatcccattgaaacctggtctgatgattttaccatggctatttctgggatcccgtccatggtcaatgatttcagcggtggtccgtttatggaaaattattatcattcccaatatgataaccaggatgtttatgaggaagaggtatacagattccatcatgaattttatctgaaacttcttctggctattgacagccttgctctgccgccaatggatttcgggcgggtactggaccaaagtattaagaccttggatacggatctgtgtatgcagaccggcgccgacagtacactccttctgaaaaaaacagaagaggcaaaaaaagcggctgccatccttgcagagcaggtacggcgcttcaacagccttccggaagaaaaacgtgactggaaaaaagccgatgccattaccgaaaagcttctcggtgtattccggaaatcccaggattatctggtacgtctggactgggatgacaatgtgatctttccgcagcaggcagtgcagaacaatctttatgcactgaagaaagcgatgggatatctggaaaaaggagagatcgcacctgcgctggaggctttttacagtattgacaacaactgttatgcctttcagtttgagcgggaagtcttttatcattttacagaatatatcttgaagcagtccccggatcgcctgatgtggggaaagggcaggatcatccaccatgagaacctttatgatcttgtggaaagtctgaaggaaaagaagccgggtgacagcctggaggcagaaaagcagagcctcaaggaagcctgggaaagacagaagcgttattatgcggatgatattgaatatctgatccgtgcagcggaaaagctcaggaacctgatctgcgaggtcagtgatatgtttgaaaaaggaacagaataaaaccatacctggaggaaagaatggaaagccataatttataccgagtgaaagaagaagatctggataagctgatccggatattgaccgtatgtttttcggaggatcctctgtatcatgcactgatcccggacagggataccagagaacggctgatgccggagctttttacctgtgatcttacggagttttttgagacctgcgagatttatgcagatagcagtgagttgaacagtatcctggtagtatccgacggaacggagcatgaagcagccttacataatctgatggtggatttttttgcccttctgaaaacagatggctatctgatcaaagaggatccaagtcttgcgaccttgcggaaattcatccagggaaaagactatctgaattccagctggacttcccagcttcatacagcagaaagacttcatgtgatctatctggcagtggcgccgaagatgcagcatcacggtcttgctgaaaagctgatggatgaggtgatcgattatgcggacaggcataagttgatgatctctctggaaacccataatccggcaaatgtttctatgtatgagaaattcggatttaaattatacggcattgtacagaaaaaaggatttgatctgaagcagtactgcatgatcaaacaggcataggaggaattacgatgaaacgaaaatggtggcatgacaaagtggtatatcagatataccccaagagcttttatgattccaacggagacggaatcggagacatcccaggaatcatcagcaagcttgattatcttaaggaactgggagcagatatcctctggctttccccaatctataaatctccccttgcagaccagggatatgacattgcagattattatgcgattgatccgaggtttgggaccatggaggatatggatcgtctgatcgcagaagcaaaaaaaagagaaatgtacatccttatggatctggtggtaaatcactgctccgatgagcatgagtggtttcagcaggctattaaggatccggacggaaagtatggaaatttcttttatatccgggacaaaaaggatggcaaagctccctgcaactggagaagctatttcggtggtccggcatgggaagagcttccgggacatccggataaacagtatctccatgtattccacaagaagcagccggatctcaactgggagaatcctgaagtaagagaggaagtctacaaaaacatccgctggtggatggaaaaagggcttggcggattccgtattgatgccattatcaatatcaagaagaagcttccgttttccgattatcctgccgatcgtgcagatgggctctgcagcgtcgggaggatgctggaggaggcagaagggattggagaatttctgggagagatggctgagaagtgttttcatccctatgatgcttttactgtaggagaggtcttcaatgaaaaggaagatgagatcaaagattttatcggagaaaacggatatttttcatccatgtttgattttgaagaaacctgttacggaaagagcgaggatggctggtatgcatccaaaccgtacctgactccggaagagtacaagaagtgtattttccatacgcagaaaaagattggggataccggcatgatctccaacattattgagaatcatgatgagccaagaggtgtctgtcactatatttctccggaagaccgctgtccggattcaaggaagctcctggcaggtgtttattttctgctgaagggaattccgtttatttatcagggtcaggagatcggtatggaaaatatggagtttacttctatggatcagatcgatgacatcagtaccatcgatgaataccaggtagcgctccgtgccggatgcagtgaaaaagaagcgcttgatgctgcttccgcattttccagagacaatgccagaactccggtacagtggagcgcagagaaaaatgcgggattttcagaaggagagccgtggcttggggtcaatcccaattataaggagatcaatatagagtctcagttaacggatagtaactccctcctttctttctacaaaaagctgactgcactgagaaaagctccggaatataaagaaacgcttgtatacggaacattcgctccatatcaggaagaacagaagaatctgatcgcatatacaagaaacggtgagaaaaatcttctgatcctgggaaatatgcaggcacagtcacagaaggtatctttgccgggagaagtaaaagaggtgcttctgaataatcagaaagctgtggagatcacagaaaaagagatcattttgaaaccgtatcagtttatcgttctggagaccgctgtctaatgcggcgtcagaacagcagagaaaaaaacaatagctatttagctgacagtctgttaaaataaatgttcggctgaaaaaacagccgtaaagaaagagaatgagaattcagaagggaataaagtatgctgaagataaagaattacgtaaaggcagaaagccttgaacaggcatatgaactgaaccagaaaagaacagcctgtgtgctgggcggtatggtctggctgaaaatgggaaaccggaacatcatgacagccattgatctgtcaggtcttgggctggatactattacagaaacagaagaagcatttgtgatcggctgtatgacaccacttcatgcgctggaaacccacaaagagctgaatgcctatacaaacagtgctatccgtgaaagtgtacggcacattgtgggtgtgcagtttcgaaactgtgccacagtgggcggaagtattttcggaagattcggattttccgatgtactgaccatgtttctggcactggatacctgggtggagctgtacaatggaggaaccattccgctggcacagtttgcatccatggaaaaggataacgatatcctggtaaatatcattgtaaaaaaacagccgctgaatagtgtgtacttaagtcagcggaacaattccacagattttcctgtgctcacctgtgcggccgctcttattgacggaaaagcaagaactgtcattggggccagacccggaaaagcaatgatcgtggaagatgaagaggaaatcttaaaagattttgtacagatgaatgcacagcagaaaaaggatgcagcagcatcttttgccgcatatacggcggaacatgtttctacagacaagaacatgcgtgcttcaaaagaatacagaagtcttcttgtgaaagtccttacaagaagagcctgggaagagatcggagggagagcagaatgaatatcactttctggctgaatggtgtaaaacggcaggccgaggtacgtccggatgaactgcttctggatttcctgcggaaaaacagctgttacagcgtaaaacgtggctgtgagactgcaaactgtggtctctgtactgtgctgatggatgaacgtccggtactgtcctgctccatgctggctgcccgcgcagacgggaaacggatcgtgactctggagggaatgcaggaggaagcaaaggaattcggcgcttttatggcaaatgagggagcagagcagtgcggcttctgcaatccgggatttatcatgaatgtatttgccatgttaaaggaactggaagatcccacagaagaggatatcctggagtatctttccggaaatctgtgccgttgctcgggatttgtgggacagaccagaagtatcctgaaatttctcgactataaaaaaggacaggaggaaggaaaatgaaatacgtaaacaagccggtgccaaaaacagatgcaatgtcgctggtaaccggaaaaccggtctataccgatgatcttgcaccttctgactgcctgatcgtcaagatcttaagaagtcctcatgccaatgcctgggtggaagagatcaagacagatgctgcaaagaagatcgaggggattgcctgtgttctgacctatgaggatgtttcccacaaaagatttaccctggcagggcagacagcgccggagatcagtccatgggatcgctatatcatagataagcatgtgcgttttgtaggggatccggttgccatcgtagccggtgagacagaagaggcagtagataaagctctgaagcgcattaaggtaaaatatcgtgtggaggaagcggttctggatatccacacagccaaggataatcccattctggtgcacccggaggatgactggtatatgccgatcccggccggcggagataataagcgtaatctttgttcctctaatgtagaagaagtgggtgatgtggatgccatgctggaaaaatgtgcgtatacagtagaccaggtttaccacacaaaggcaaatcagcagaccatgatggagaccttccgtacctactgttatatggaccattttcagagactgacggtggtttcttccacccagatcccgttccatatccgaaggatcgtaggaaatgcgctgaacattccgtcttccaaagttcgtgtgatcaagcctcgtatcggcgggggctttggtgcaaaacagtcttctgtcagtgaggttttcccggcattggtaacatgggtcaccgggcgtccgtccaagatcgttttttccagaaaggaatccatgatcgcgtcttctccgcgtcatgagatggaagtccatatccgtatgggtgcagacgaaaacggtattgtaaaggcaatcgatctttatactctttccaacactggtgcctatggagagcatgggcctacaaccgtaggactttcaggccataaatccattgcgctgtatcgtcatacggaagcctaccgttttgcttatgatgttgtttacaccaatatgcaggcagctggcgcttatcgtggctatggggccacacagggtatttttgctgtggaatccgcagcagacgagctggctcataagatggggatggatccggtaaaattccgtgagctgaacatgcctatggagggagaggcacttccaggatatccggatgtaccgatcaacggcagttgtaccatggataaatgccttgcccgtgcaaaggaaatgatcggatgggatgagaaatatccgttccgtgatatgggtaacggcaaagtacggggtgtcggtatcgctatggccatgcagggctcatctattgcagggatcgatgtcggcggagcagacattaaattaaatgaggatggttcctataccctggcacttggatgttctgatatgggaaccggctgtgataccattcttgctcagatggcagcagactgtctggatacagatatgaaaaatatcgtggtattcagtgtggatacagatatttctccctatgattccggttcttatgcatcttccacaacctatgcaaccggaaatgccgtgatccaggcctgcggagaactcagaaagagaatccacgcttttggcgcacagatgcttggagtatctgcagaggattctgattttgacggggaaaaagtccgcacagaagacggaaaagaggtaacgctgcagcagattgcaggaaaagcgacctgtggagtctgcagtgagcttcaggttgtaaaagaatattcttctccgatctctccgccaccgtttatggtaggtgccgctgaagtggaggtcgataaagagaccggacagatcgatgtcattgattatgtgggcgtgattgactgtggaactccgatcaatccaaatcttgccagagtgcaggcagaaggcggtatcggtcagggtatcggaatggtcctgtatgaggatgtgcagtatacagataagggaaagatccgtaacaattcttttatgcagtataagattcccaaccgtatggatattccgaaggtgcggatcgagtttgagagcagctacgagaagacaggtcctttcggtgcaaaatccattggtgagcttgtgatcgatacaccttgtccggctattgccaatgcggtttataatgcaacaggtgtacgtgtcagagagctcccgatcactccggagaaggttgcaatgggaatccttgccagagaagccggagagaaggtgtgaaatgcaggagctgatactggcaattgccggactgatcctggaactgctggtatttttctgtgcaggaagtctgctgacacggatactgaaaatgaaggcggaagtaaccatggaactggtcttgggatatcttctgtattttgcggtttttgagatacttgcagttcctatgacactgaaatgggtaaaactgagtaccttttcgtatctgtggatggtgatcatggcagcttgtgtactggcagcatgtctgtttgcgcataaactttggaagggacagctggaccggataggagaaacatttcggaagcattcactgctgctgcttttgaccgctgcggcagtgatcctgcagtgttttctggtggctgcatatcaggacgttactgcagatgcaacacattatattggtgcagtaagcacttctgtgtatacagacactcttgcccgatacagtccgcttaccggtgttatccagagaaattttaatctccgctatgatctttctgcatatccgatgaacaatgcggtgtggtgtgtccttctgggcatccacccgatcgttcagtccaaggtcgtgatggctgtgatcaacatgctgatgatcaatcttctgatctaccagatcggaaaaagcttttttcgtggagatgaaaaaaaagcagacctgatggttctttttgtgtgtctgatgcaattgttttctttttctatctatacaacaggaacctttgcgtttatgcgggtttatgaagggaaggccctgctggcaaatatttccattccggcagcgcttctggtaagtatacggctctggctcaacaaagatggcagaaataaagagagctgggtgctgcttttcattgctgcagtcagtgcgctaacgttttcaggatcctcccttatttatcctgcagtagtcagtacggcgatccttccggtgatggtgctgaagaaaaagctttcctacgcgattccctatgcgctttgtatgctgccgggatttttgtatgccctggtttatttttcggcgaagcttggatggattgcatttccggcatcataggaaactgggaagatactatggataggagaagaaaatggcgggagtaacgatcgaagaactgggactgcgttttgtgcagatctgtatggaaaattactggagtggctgtctgctgcctgtattttttctggcaggtatactctgggatattttttaccgcaggagaaaagaatctagagtattcctgtattatctggtctttctggcacttacggtatataatccggttcttgtaaaatatgtgataccaaaggtacattttgaaagtgaatattatcgttttatctggatccttccggtgatcccgggtgctgcctattatgctgtacggatcgtagaagcggtaaggtttcgatggctgaaggctgtaacagcgctgatccttgcggcagtgatcgtcactacggggacacctgttcccggcattgcaaaagattatgtgatggcggaaaacatctataaagttccgaatgagctgcgctcagtatgcgatgtgatccatcaggactgcgataaagaacaacccaaggttgtttttgacaatgagctgaatctggtggctagacagtatgatccgtcactgatccttgttctggatcgtaattttatcctgtatcgtgcaggaagtactgtggtaggaaactacgaaaacagcaaggcctaccagatccagaaagtgatcatggatgtgatcagttatcagatggatgtagggatcgataagttccggcaggtattgaaaagaacggaaaccgattatctcgttcttccggtagatcttacaaatcatgactatattcgtcaggcaggatgtacccctattgcacagacagaaaaatatgtggtatacaggtttgaagggtgaatgtgttcgcccttctggcctggaaaaatgactaaagtgcgtaaaatgatacggagaacggagtgaacagcaaccataaaatgtgtgatgaatatgtactgtttaaaaaaatctttacaatttcatggatttgtgttaaaatcataaacagtgtaaacctactttgataatttcatacctgaatttagaagttatgtttttcattatgcacctgtagctcagtggatagagcagtggtttccggtaccatgtgcgggggttcgattcccttcaggtgtgttacccggaacagtgggaattgttccggcgtgttgttatgataaggaggacaagaacttggatgatttcagagaatggttatcagataaccttcgctattttatgttaggcggagccattctggtgatcgtgcttgttctgatctttggcgtccgcgcctgtgttggaggtaagaaggggaattccaataaagatcagacaacagcccaaagtaaccaggaaaatgatccttcttctccggcaaatgatggggagacagacgagaagaaagacgccagttccgcggcagatacggatgcggagacaaccatggaaaaagccagcacggaagtaaccgagctgattcagagctattataaagcttttggggaaaaagacattgcaacacttaagacgattgaggacggatttacgccggctgacgagtcgcagattaattcaagggattatattgatgggtatgaggtacagaatgtttacgctaagaagggactgacggacgattcgtatgtcgtttatgtagtctttaattatatctgtactggaattgagactccggttcctgcactgagccagttttatgtggagacgggcagtgacggcaatctgaagatcaaaggtggtgctgatgacgatgcagatatcagtgcctatgtgaaaaaactggaatctgagaaggatgtgcaggagcttatcacaaaggtaaagacggactatgaagctgcgcaggagagtgatccctctctggcagaattccttcagggccttggtgaagatgccagtgcttccgcagatgcaggaacaatgcttacagttacagaggattgtaatgttcgtgcttccgcagattcagagggtgaggttatcggtggtttttctgcaggaacggaagttgaaaagaaagggcaggaaggcgactggatacaggttgattatgatggacagaccggttatgtctatagtggtctgttagaataataagggttaataaaatgcaggttccggaagaacctgcatttttgttgctctgatataacgaaagatcattttttgagtgaaccgtctgctgccaatgtgtatttttttccatttacggtgatggttccggtctgcatgattccgtcttcgtccagataataacgttttttgcctagggtgatccagccggtctgcatgattccgtccttattgaaataatatcgatgaccatctgtgtcggtaagccatccggtataggcggttccgtcaaccataaatttccagttggtgtcatccggtgtccagactccgttttctgcctccggcgaaaccttttctgtttcgggaatctctgtgggaacaggagacggtgtggcggaaggtgagggagcgccggaagatatcgatgcatctgtatggtgatcgcgatctgaacttggttcaatggtcgaaatatcgctggtatttatggaaactacggaagtactgctgctttcaaaaggaccggccgatgactgggtaaagagaataccgcagatcagacacaggaaaacagcgacaaagatcagcagccggttcatacgtggagtatgctctgacatgtttttcctcctgatatttaagtatatttctgtttatcatacaataatgagaaagaaaatacaagaaaaataaccggttgcgaacacgtgggaaaaaatatataatagaacaatggacgaaaaaatcagaatcaataaatatttaagcgatataggagtctgctcaagaagagaggcagaccgactgacagaagcggggagagttactgctaatggagaactggtttccacaggaatgaagatccttccggatgcggagatctgtattgacggaaagcctgtaaaaaaacaggaaaaaaagatcctgcttctttttcataaaccaaaagggattgtctgcagcaccagacaacagcggaatgagatgacagtaacagaatatctggattatccggtgcggatctatcccataggacggctggataaagattccgaaggactgcttctccttaccaatgaaggagatctggtgaaccgtatcatgaaggcggggaactaccatgaaaaggaatatcaggtgaccgtgaataaaccggtgacagaagaatttatccgtggtatgggcggcggagtgccgatccttgatacggtcacacgtccctgcaaggttacaaaaacagggaaaaacagttttcgtatcatccttacccagggtctgaaccgccagatccgtcgtatgtgtgaatatttcggatataaagtcgtaacactgaaacgtgttcggatcatgaatctgtatattgatggcctggaagaggggaaatatcgtgagatccgaccggaagaacgaaaagaactggaggagatgctttcctccgaaaaatcagaaaaaaggacgggaggaagccatgaacgaatcatccataaaaaaaatgaaagagctgggagaaaagctccgggaagcgtccagggcctattatcaggaagacagggagatcatgtccaacgtggagtacgacgccctgtacgacactctgagcgcactggagaaagaaacagggatcgttctggcagacagtccaaccgttaatgtaggatatgaggcagtggagcagctccccaaggaagaacatgagagaccgatgctgtctctggataagaccaaagagagagaagctttgagagagtttatcggggaacatcctacacttttatcctggaagctggatggcttaacgatcgtgcttacctatgaaaacggagagcttataaaggcagttaccagaggaaatggtattgtgggagaggttattaccaataatgccagagtatttaagaacatacctctgaaaatttcttttaaagggagactggtacttcgcggagaagccatcattacctattcggattttgaaaagatcaacgaaactatcggagatgcagatgccaaatacaaaaatcccagaaatctctgcagtggttctgtccgccagctgaataacgaaattacagcgaagagaaacgtacggttttatgctttttctttagtgagtgcggaaggcgtggatttccggaattccagggaggtgcagtttcggtggctgaatgaacagggcttcgaggttgtggaatatcgaaaagttacagcggaaactctggatgaagcgatggattactttgcggaagcagttacgaccaatgattttccgtcagatgggcttgtggcattgtatgatgatattgcttacggagaatctctgggaactacggccaagtttccaaggaacgccatggcatttaaatgggccgatgagatgcgtgatacgagacttctggagattgagtggagcccgtccaggaccggactgatcaatccggtagcaatttttgagccggtggaactggaaggcaccacagtgagcagggccagtgtgcataatatcagtatcatgaaggaactgaagctggggattggagataccattcgtgtatacaaagcaaatatgatcattcctcagatcgcggaaaatctgaccggaagcggtaatgcaccgatcccgcatacctgcccggcctgcggacaggaaacggtagtaaagaaagaaaacgatgtggaatgtcttttctgcgtcaatccggggtgcccggccaagaagatcaaatcctttgggctttttacaagcagggatgccatgaatatcgacggactttccgaggcaacactggagaaatttattgccaggggatttatccatgactttggcgatatttttgagatcagccggtataaaaatgagatcgtggaaatggaaggctttgggcagaaatcctatgataatcttatggaaagtcttgaacgggcgaaagagactacacttccaagggtgatctacagtcttgggatcgcaaatatcggtctggctaatgcaaaggtgatctgccgccattttgataatgatctggacaggatacgtcatgccagtttggaagaggtcagtgatattgataccattgggccggtcattgccggaaatctggtagcttattttagggatgaggataatgatcgtcgcctggatcatttgatgagctttcttcatattcaggaggacagtcccaaacaggaacagatctttgaaggaatgaattttgtgatcacaggaagtctggtgcactttggaaatcgaagtgaggccaaagagctgatcgaatccctgggaggcaaggttaccggttcagttaccaaaaagaccaattatctgatcaataacgacatccagtccaattcatccaaaaacaaaaaggcaagagaactggggattccgatcctttcagaagaagattttcggaaacttgccggagtgcagtaaaggctgtacagactggagatactttttatctgaagaaaaaagccgagcggctcctttataagagacgcttcatatataaggagggcaaacaatgccgatcaaaacacagggggatcttccggtaaaggagatcctggagagagaaaatatatttgtaatggacgaaaaacgtgccatgcaccaggatatccgtccgatccagattctgatcctgaatctgatgccactgaaagaagaaacagagctgcagcttctgcgttctctttccaatacaccgctgcaggtggatgtgacatttatggctgtggagagccatgaagccaagaatacatctctcagccatctgaacaagttttatgaaacattcaccgatataaagaaaagtaaatttgatggaatgatcatcacaggagcaccggtggagcagatgccttttgaggaagtggattactggaatgagctgactgagatcatggattggactgagaagcatgtgacttccacgatctttctctgttgggcagcgcaggccagtctttatcatttttatggcctggagaaaaaacctctggataagaaaatgttcggactttttcagcacagggtgctgaaccgtaagatcccgttggtccggggctttgatgatgtatttcttgcgccgcattccaggcacacagaagttcccattgcagatatccatgcatgcaaagatcttacggtcctggcggaaagcgaagaggctggtctgttccttgcaatggcagagggaggtcgtaaaatctttgttatgggacatccggaatacgaccgcgtgactttggatggcgaatataagagagaccttgccaagggcttgcctattgaaatcccgaagaactattacaaagatgacgatccaaacaacaaaccactccttacctggagagcccatgctaacaatctgtatacgaactggctgaattactacgtataccagagtactccgtatgacctgtatgggacaccggattttagggaactgtaaggaatatgaaataagtattggcataagcccataaatcgtagataaagctatgatttatgggtttattttagattgtcgttcacgaatatcttccctggaaaattttcctacaaaatgtaggaataaatgcaatgtttatggtatgaaatgcggctggctttttgcatttattttgatacaattattacataaaagacatggaactgaaataagaatttttggttactgttcattggtaatattccgcgaggtgatttttgtgagcaaaggtcacagaaaacccgggaaataccgcgtgaatttatgagattagcataaattttgtatatcgcgaagcgtgttgctgagaacggagagaacagtaacagttcttgatgcaggccagaatatgttaacgggaggataaataatatgataatcataggtgaaaagatcaatggatccatcccctctgtggcggaggcgatcgcaaacagagatgcagaattcatcaagcagcgggcacttgctcaggcaaactcaggagcaagctatatcgattgttgcgcgtctgttccggaagcagaagaagtagaaaccttgaaatggatgatcgactgtattcaggaagtgacagatcttccgatttccgtagacagtcccagcgcagatgtccttacagaagcttacaaattctgcagaaaaccgggtatttttaactctgtatccggtgagggagataagatcgataagatttttcctcttatggcacagcctgaaaacaaagggtggcaggttatcgcacttctaagcgatgatacaggtatccctaaaagtgcggaagacagactgaaggtatttgacaagattatggcaaaagcgaaagagtacggaatttcaccggatcgtatccatattgatccattggttgagatgctctgtacatctgaagatggtattgcgatgaacgtggaagtaatttcaagtgtccgtaaacagtatccgatgatccacattacagcggcgatcagcaacatttccttcaatctgccggtacgtaagcttatcaatttcggatttgtggtacttgcaatgaatgccggccttgacagtgcgatcatggatcctacaaacagagatatgcttggacttgtatatgcaacagaggcattgcttggtctggatgattactgtatggaatacatcggagcatacagagaaggtctgatcggacctgtaaaaaaataaataaaacgcatatgcggaatgcggataaaaaataaaaagcggaggtgtttgattatgtcaaaaatcacagaagtagcagaattggtagaaaaaggaaaagcaaaacttgtaggtgcagctgtacagtcagctcttgatgaaggctgtgaggcaacagagattcttaacagcatgatcgatgcaatggctgttgtaggtgaaagatttaagaacggagaaatctttgttccggaaatgctggtagcagcccgtgcaatgaaaaagggtgttgaggttctgaaaccacatcttgcatccggcgctacaggaagtatgggaaaacttattatcgctactgtagcaggagatcttcatgatatcggaaagaatcttgttgcaatgatgatcgaaagtgccggttttgaagttattgatctcggtgttgatgtacctgcatcgaaggttattgaatgttacaaagaaaatccggatgttaaggtaattgcactttcagcgctgctcacaactacaatgccggctctgaaggatacagttgcagcacttaatgcggaagatttcagaagcaatgttaagatcatggttggaggagcaccaatcacgaaggaatttgcagatgagatcggcgcagatggatattcagaagatgcagcaagcgcagcagttcttgcaaaagctttggcagcataagggaaaataaaacgggccgctctgtattgtctgtgcatggcatagacggcagagcggtttttgctttacagtgaccatcggagggataaaaatgtaccgaataaaatttatcagggaggaaaaggagatcctggtggaaccgggtaccaggatccttgaggcggaaagaaaagcaaagctggttcctgatgcaccttgcggaggtcggggaaagtgcgggaaatgtcgtgttaaaatagaggatcacatggtgcttgcatgtcagacagaaatccacagtgaccttgaagtagatacattgtccggatgccaggaagaggagatccttacagaaggaatgcagagaccggttgcgtttaggcctgatctgaaacagaaaaaagtgattcttaagaaaccggagacaggagacaaccgctctgaatgggagcggctgacagaacagctggatgtggaaaaacctgttctgcctgatactgaaattgcatcgaagctttacggctgcagaaaagaagcagaagaatggtatgtgatctgtgcaggaaatgagctcctggatatcagcagagaagagaaaaaaatctgttttgcggcttttgatataggtacaacgacggtggtcggctatcttatggatgcattgaccgggaagcagctggctctcaagagcagaatgaacccacagactcagtatggcgcagatgtgatcatgcgggcggatcatgctctggagcatggcttagagcagttgaccggctgcatacagaatgcggttgatgaaatgatccaggaactggcagaggaagcaggaagaagcagatcagatatctgtcaggtatccgtggtaggaaatacctgcatgcatcatctttttcttgggatttctccggcatcgctggtccatgcaccgtataatccggcgatcagtcaggggcttacactgaatgcagagcaatatgggctccatatccacagaaaggggcagctgcttatgctgcctgatatagccgggtatgtaggggcagatacctgtggctgcattttgacgctcagacaggatcagcagaacgagatcagccttatgatcgatattggaacgaacggggagatggtccttggaaataaaacgagattagcctgttgttcaacagctgccggtccggcatttgaaggtgcaaagatcgagtgcgggatgcgtggaggagcaggagcagtagatcatgtagtatgcaaaaatggaaaatgggaatacacgactataggaaataaggctccggcaggattatgcggttcaggtctgatcgatcttgtggcacagctgtacctggctggctttattgatgaaagtggtcatctggaaagcggccaggaaaaggcgggagtgtttgtgctggtacctccggaaaaggcgggaaatgacaggggcgtttatctgacacagaaggatatcggagaggtacagctggcaaaagcggctatcgcagcgggaatctttcttcttatgaaaagactggagatcacagaaaaggatattaaacgggtctatcttgccggtgcattcggcaattacatgaatccggaaagtgcggcagcgatcgggatgttcccggccggactgctgcccaggatacagccggtgggaaatgcggcaggcgaaggtgccaggatcgcactcctgaatgaagaggaaagaaaagaaatggatcgaactgtcaaaaatatggattttgtggagctggcagcttcgccggagttccaggactgttttgtggatggcttatgctttccgtaatgcgaggagaatggatatgcttaatataaaagaactggaagaaatgggaaaaaaggcaggattttctcatgtagcgcttctgaagagcgattcgatccagcttatgccggaggtaagggaaatgtgcaaaaataatacctgccatatgtatgcaaaacgctggagctgtcctcccggatgcggagatcttgaagtatgcagaaaaaagatagaaaagtacagggaaggcattattgtccagacagtggggaaactggaggatcctctggacggagagacgatgatggagaccgaagcggttcataaacagaatttttatgaatttgaaaaaatgctcagagaaagatggccgggcatgctccccataggggccgggtgctgtacaaaatgtaaaacgtgtacatatccggatgctccatgccgtttccccgaacaggcattttcttcgatggaagcctatggaatgctggtaacacaggtatgccaggcaaatggtctggaatactattatggtccctgtacgatcgcctataccagctgttatcttcttgaatagaacaggagtgaaaaaatgaatgacagagaacgggaggcatatctgaacaggatcggatatgagggtgaattaagaacagataaaaaatgtctggaaaagataatggaccttcatctttgcagtattccctttgaaaatctggaggcttttgacgagggaaggattccttctctgaggtcggaagatatttatgagaagatcattgtcagaaaacgaggcggatattgctttgagctgaataaattgttttatgagcttctgaaagctttggatttccgtgtgatccctgtggcggtaaggatattgtggaaccgggaagagcttccgccggtcctgcaccgggcaacccttgttatttttgaggaaggaagctattactgtgatgtaggatacggaggtcccggtcccaagaagccggttcttatgaaggatggtatccacagagaaaaaaacggatggtaccgtgttaacatgaagccgggaaatacaaacggagagatacttgttgaacgaaggaaagaagaaaaatatctgccaatactcagattttcacagactcctacagtagaagcagattttgaactgctgaatttctattgtgcaaaatctccagatgtattatttaccagaaaaagagtggtgagcatctgcagaccggaaggaagtgttgcgctgaccggggatgttcttacgatccagaaggaagatggatccattgaaacgaaaataagtgattcagaagaaaccatcaggctatggatggaacattatttcggattggagtttttacagatataaacagaaaaaaggaccaggttgtcaggtgacagtctggtccttttcctgcagaagaaagcagagctgcagaagaagccggtctttcggattatccagatcaacctttgtgagcttctggatgcgctccagacggtaggtcagggaacttctatgtataaaaagctcccgggctgtctgaagagaattgcgttcatgctccagatagaccttgagtgtgtgatatagctcagtattgtttttttggtcataattctgcagtgcatccagccgtgaagagaccagaagctcgggactgatctgatggctgatctgggaaagcatatattccagaagataagcatcaaaatgatagcaccaggccatgctctggctttttttgcccaggcgcaaggcggaaacagcctgaatatagccctgagggatcaggagaaaatcacgaaattcagagcttactcccattttaaaaagcccttcgcgcaggatgatcgcaagtgaactgataacatcggaagatacagagtgcttaaaggacagattaacgatcacaacgattccctgctgataggtaaaggccagaccttccgggatctgggcttcaatgtgtcccagtgtggcgatggaagagtgcatacggtcatcctgctgctgggtttccagacgaagtacaagataccggtcatggcgattccagttcagatactggatctgatcggtaactgcctgtagttctgtgagctttccggaaagatactccgtgaaaaactgccgggagtcatttcccattgaaatttggaacagattgtgccgacggatgcacagctcgataaaggagccaagatactcaagagcagaaaaatgtccgggctgtatctccgtctggagctcatccacacaaagtcggccctgataattgccgctgacccagagattcatgtagaggatacggtaaccacggagctcttcggaataaatattagcgccgtgggtgataagtgtgcgctggtattcggcgtcaagcttgaaatcctgaatcaggcttaaaggtgcgatgagtcttcctgtacgctggtcatggacccattcagacataccggttacgtgccggggagaagaaaggatatagaagttggtgtcgtgggcaaaaaccggattatgaaatatatccagactggcttccagcatctcattcaacggatcgatacttccaagtgcaagctggagtttactgtcccagtcagaatatctgtcaaaggtctgctgtatttggttgaagacctcagaaaaagaaagggttcccttaatgtgaaggatcctgcagctttcggaaaagcaggaaagatcaccggagcccaccactacaaatgcgatgttctggtatcgcaggaagctttcggaaagagaattgccgaagacaagataaaggtagcatggcttcagcagggctcctgcctgatatatgcgaagaccatccagcgtcagggggtcttcacggcagaggatggaaacatcctcttttttctccgcaaaatcgtcagcaatgatctggagattaagatggaagccggtatgcgggctattcacgaaatgctctcttttattcaaaatatttcctccaattcataaaagccttgtatttataggaaattataacatattagacggaaaataaaaagaaaacggagaggaaattatttgtgcatatttacaataataactgtacaaaaagtatgaagcattggagaaagaatgaagaagtgtgcggatttacgaacaagaaaaaaacaactatactataaccatcaaaggtaacgtgaagttgtggaaatggccggccccacaaaaaacagcgaagggggaaagaaaatgagtaaaaatgaaataccgaaacaagatccgaaacagaaaaagggtcttacaaatgccctgaaatatttctttggtgttggtgatgccggatttgttcttatgagtaatatcgagacattttactttatgacatttctgacggatctggctggttttgcagctggtgtagctggtgtgatcaattccgtatttaccattgttgatgcatgtctgtcctggctttacggaggaatcatcaatggcacaaaagcaaagaaatgggggcgttatcgttcctggctgatcatggttccgtggatggtgccgtttctgtacgcattcatgttcatacgtgtcagtgataatgaatggctttcggcagtggtgatcattgccgcatccatcgcatctcatgtggcatggaattttagctatgttgccaacgcaaccctgatcagtgttgttggtaaaacaccggaagacaaagcaacgcttgcatcctccagggcaacctggaataacataggcggtctgttgttttcctatatgggtcttccatttgcaacacttcttgccggatatgtcggtgagaaaaataaatttgcagcagcagctttctgcctgggtattctgatggtcgtaacctatttcgcccatttcaagatgacggaaggctatgaagagattgaaacggaaacagcaggaaagaaaaatgacaaaacaaagatcacgatcagagagatgtttgcttccctgtttcagaatccgcctcttatggtcctgatgctggcagaccttgcaaaatggtgtgtgaaatttgtaacagcagcatctgctatttactatttcagggatgcaatgggaaatccgggactgatgaccacctatcttctctgggttgccatcggtgccatcatcggagctttttccatgagatacattgcaaaagcaatatcgtcccgtacaactatgatcatcgcttatgcaggaatggcagtatcactgttcctggtatatattttctatggaaatgcaatgacagtgatcgctcttatgacacttgcccagttcttctatggtatggcttttgcagcttcacctgcactttatgcggacactgtagtgtatgcaacatggaagagcggaaaagatgcatccggatggatcatgggattacagaatcttccgctgaagattgccgtattcttaagaggaacgatcctcagcgcctgtcttgtggcggtaggctggaaatccggagttgttcttgagggaacggcccgtcagggaatgacgatttcctttgcacttgttccggctattttctgtctggcaggtcttctgcttctggtgtttggatttaagatcacaaaggaaaaggttcttcagtatcaggctgagattgacgcaagatcataaagataagtgatcgggtatttcgaaagatcacaggataataaaggaggaagcattatgttgaaagcatcggagattttacttgaaacgataaaaaaggacggtaggccggaacgacttctgagacagtatgagggtgcgaccttttacccgccgaacccggcaaataattatgtgcgtggaaaccgtcaccgtggtatggagcctatgaaggatcttttcgggactgagatcctctggccccaggaacagctggctgcaatgccacatgtaacagaggacaacaaggtcattgatgatatcacagaatggaaagagcagctggtgatcccggatattgtcggtcagtgctcggatccggctttatgggaaccatttaaacagaaggcacaggagataaaggattcaggaagccttttcatggcatttatgcctacaggtgtttttgagaggcttcacttcctgatgggatttgaggatatgctggtgaacttccttcttgagccggaggatatgatggatctctgtaatgccattggggagtaccgttttcagcttacaaagctgatcgttgataatctccacccggatatcattctttcccacgatgactggggttccaagcagtccctgttcatcagtccggacacatggagagaatttatcaaaccacagtatgaaagatcctataaatatatgaaagaacatggagtgatcattatgcatcacgcagattccttcatggaaccgatcatagaggatatggttgatcttggaattgacatctggcagggaacacttccgcagaatgatattccgaagctccagaaacagctgaacggaagaatgacacttatgggcggaatcgatgcttcgattgtagaccgtgtggattccacagaagaagagatccgtaaggaagtcagaagagcatgtgaggagtatgcaccaaacggacatttcattccatgtattacctatggaggtcccggttgtctgttccctcatgtagattcaattattgatgacgagattgaaaaatataataaggagcattcctgtaattaattaaaagcgccaattgaataaaaaagaacctcaaggtatgattgagttgcatcttggcggatgtaaacaaaacaatcaagcactggaggttccaaatgaattatacacagaatgaaaagattgagcaagtaacagattcaacaatggttgtcggagttgatatcggaagccagatacattatgcaagagcttttgataacagaggacgcgaacttacaaaacgtattttttcttttcatagcgatctggaagggttcaattctttcaacctttgggcagagacacttaagactgagaataaaaagactgcagttctgatcggttgcgagccaacaggtcattactggtttgcgtttgcgaagtatgtaaatgatcatcagaaaagattagtaatggtcaatccattctcggttaagaagatcaaggaacttgatgataacagtccaaagaaaacagattcaaaagatccaaaaacaatcgcaaaactagttgtggatgggagatattcaatcccatacatgcaagaaggcatttatgccgaaataagagacctggtatacagccgtgacaggatcatgaagcagcacaacatatctgcaaacaggatccagagatggcttgcaatacatttcccggaatatctgggattatatacacgatttgatgcaataagcggcctggcagtgcttgaaaaagcaccattgccaaaagatgtgatcgcgcttggagtaaatgggatccgaaagatctggcatgataaaaagatgcgaggcagaggagttactgaagatagggcaaagaccctggttgaagctgcgcacaacagtgttggacttgacggaggaattggaacaaaaagtgaattatatatgctgctcaggtttccagcacggtttatctttacggagaaccaaagacaagtaccgtctgggcagctattgacctgaagcagcggcagctttttgatctggattaaaaatttaaccgaatcagggaagtactctgtgggggtgcgaatatccgcatgacattttacataatctttatttgattatttgaaaaaacagtgctatagtagagttggttccggaaaacggatgatttatggataccagaagaggaccgggcggaaccaattactgttgaccggtcaggatctggatcaggaaagaaggaagagggaaaaaattgcgtaaaaaatcacatatactgttaggcagatacctggctgaccagatgtctgaggtgtacagtctccagcagcacagaaaagcgttttgcctgggcaatatcatgcctgatctgaaaccatcgtttctcaccaccagacatgagtttttcggaacattcgattacctccagaataggatgagggcgcttgtcgagaagaacccggaggaagagaatgccagagtatactggagaagattcggtgaggtcatgcattatatggctgattattttacttttcctcataacaaaacatacaaaggaaatcttgcagcacataattcttatgaagctgagctgaagaaccgcctgagagaatgtatcctcagcggcgcagcagacagccagctggaagaagcaaagcagtttgaaagctttgaggaacttgtggaatatatccgtgagcgtcatgcatattatctggaaagcccgcggtgcattgccgatgacattcgttttatccttcgggtgtgctatcaggttgtacaggggatttttcagctctgtgtcagaaaacagtttcatatgggcggacagccggcagtgactgtctgacagtatacaaaaagccgcagtgtgtgagagcgctgtggcttttttatgttatggtaaaccaaaaagaatcttacaaaaatatgaataaaaagtgaaaaaaagatgaattggaagagatatcctaccagaacggttgatttcacaattttcgtatgctaaaataaattgaattaaactttaagttatcaaacggtttaaggcagacctttattataggggaagtaaagggatgttcaaggaaagaagggagcatcttaataaatatgaagaacaagtacctgaataagtttttttgcatcacgatgttatcagctatggtactggcagttccaaccggagtaaaagccgccgaggaagcagataatattgttgcggaggaaggtgtttcgggagacgggagtgaggtaagtgaaccggaagttccggcagatccggtgccgacagctgcgccgcaaccggaaataactgttgcacctgaaccggaaccaactacagcaccggaaccaactacagcaccggagccaactactgcaccggaaccaacggaaacaccggcgcctgcaccgacggaaacaccggagccaaccgcaacacctgcaccgacggaaacaccggagcctacagcgacacctgcaccaacggcgacaccggcaccgacagcgacacctgcaccaactgcaacgccggaaccaaccgcaacacctgcaccgacggaaacaccggccagggatgattctgcaaaggtacaggcggtgatccggaagatcaaagcactggcaggcagaacgatcacagcagcagataaagctgagatagagagcgcacgtgcagcttatgaggcgctgtctaatacagaaaaggccaaagttacgaattataagattctgacggaggcagaagccaagcttgcagctgccgacaagaacgacagtgataacaaaaaagacaacaaaaaagatgataacaaagatacagagatcacagatggaaataacgccacagcaacacagatcggagatcctgtttatgtgacaaatatggtttccaatctccatgcaggcaaggatttttatctggatagtcttaagaacaattatcatctgtccttctctgatgattttgcttctgtaatggaagagattgaaagagaatataaagagaagtacaagcttaccgatacggagaatacacttctggtaagaaactggcaggatatccttgctgtttatatttatgaaaagagcaaagcaggagtaacgtcatttacattggatgcatcctgtaaggatgatctggcaaggatctttgcggagatgaacccgatcgtcagggacaaacagaatattaccaagatatcctacggaaatcgcaagatcaactactatatcaagaagaacaatattgcaaagaaagacagaagcgtccttaagaaatatgtggaaacagactgtaagcttctttgtgcggtagttaccgcatccaaaggctttgtccgtgaaagtgtgggagacgatgtttctgaggatcgtgtagatgttatcactgcggcgtattcactggttggtaaggttggatatttctggggcggtaaatctacggtgatcggagaagacccaagctggggttccgttgagaaggtatctgcagacggcagcagaagctccggtacgctccgtgcatatggtctggactgcagcggttttgttacctgggcggtgatcaatggatataagaatcagggaatgcaggcagcagttggagacggaacctctgaccagtgggagaaggccggtgttgtcagcgaagcagatgcacagccaggagatctggtattccagagaggaccggaagcaggaagcaacaaccacgttggtatcctgtgcggaaagacggattccggcgactggatcgcagtacattgttcttccagcaagaatggtgtaacggttggtgaggcatacagtgcaagcttccgttatatcagaaaaccatccttctatcaggatacaacagcggaggaaacagttgataagaccacagctacagagaatgatgttctgacagaggagagtgcagaaaagctccttacggatgtggttagatccgatgcactgaaggatgcactggcatccagtgatactgtttccagtgaccttcttgcagattttaagaatacggctctgcaggaggacgaggaagaagatgaagttgagacgctgactctggatcaggagaccatggacgatgcagtggatacatttgatgatgatgtagaaacactggaaatggaaaactaagggacagcgattgaagataagggcagtctcccacgggaggctgccctttcttacaatcgctgcttcagacagaggacatgatattatgaaaaaaagaaatttctgccccatggcagccgcagtacttgcagccgcagtgatccttcagccctttagcgcttcggcaggggcactggatcagatccgatccatagcaaagagcgttatttcaggggagccaaaggaagtagaggaactgcgtcagatggaggttgcccagagcgaagaaggacatcaggaatattatttcaaacagcttacggaagaagagcagagagtgtatcgggagctgctgaaagggatccgtgcccgggaaaaggagttttatctgacaatctccgatgatgacagtattgacagaagctatcatgcagtattgaaagaccacccggagatattctgggtccacaatcgtgaaaaaatctacaaaactacgtattcagacagtgattactgcgtttttactccgggttatacttatacagacagcgagatcgatgagatacaaacggcaatggagcagagctttcaggaggtcagagccctgattccggaggatgccggtgactacgagaaggtacgcattgtttatacgtatgttattgaccatacccagtatcagactggggaggatgatcagagcatagcaggtgttttctggaaaaaatccgcagtctgtgccggatatgcaggagctgtccagtatcttctggaaaggctggatattccctgtatttatgtggacggaagcacaaaaggaagcacagagggtcatgcatgggatattgtaaaaattggccaagagtattattatgtagatgctaccaatggggatcagccggattttctaaatggagatgccgcgcagctggaagaacataagacgatcatttacgattatctctgccctttcccggaagaatatgaaaaaacctatacaccatcggaagaactgacagttccgtcatgtactgcgagggatctggatttttatgtgcttaaccaggggtactttgaagattacagctggcaggatatatatgattattgtaagatgagactggataatggtgcggctgtggtgcgtttcaagtttggcggtcagaaagctttttccgaagcctgtcaggaattgctggatgatggcgtggtacagaatgtggcacagtattatatgaaacttcacggacttggtcaggtggagtatcattatggagtgatggataatttttataccatatattttattttctgaaacagctttgggaagatttccggaggttttggaaagagaggagtaaattatgaatatggatatgttgtcaagaggatttgacatactgcagagagcaggaggtatggaacagatcagccagctgatggtgatcgtatacggagtgctctgtgttttcgggcttttgaactgtatcctgggatatcgtatcctccggttctggatgatgatctttggatttatcatcggagcaggtgccggttttggggtgacctatatgtccggtgttcaggataaaatggtgatcgtaggtgccatggcgggactgggaatcgtactggctgttgtttcgtttctgatctacagggcaggaatctttgtactgggatttggtattggaataacattgagtatctatctgattcatccgaccagttctttttcctttttcctgtgcatccttatcggcgtgggactgggaatacttgctatgcgttatgcgaaaggagtgatcattgtcggaaccagtatactgggtggtgttctggcaggattatccattgcaaagatcgcagggctggcgcagtttccatatggcgtcggtatggcagcgggaattgcgatccttggtatgctgatccagttcgccatcaacaaagaccgatacgatgaggaagatgacgaagaagaggatgacgacgatggagctctgccggaggagaccaggaagccggcaggaagggatcgtagaggaaacagccgtgaatatacctctgaccgtaacagggacgatcacagatatacatacgaaaaccgggcaaacaatgaccgggaaagccggggtgaaagacgttcccgcagaccatctgacagagaaggacgcaactctgacagacgagaaagaaattatgcagacagccgaaaaagatccggaagcgaaagaaacagcaaaggcagttccactgaaagaagaagcacttccggaacctccggcagaaacagaacctccgacagaaattatgcttcggatgacagaagaggccgcagatacagccagagcagcagcaccagggaacgaaggaatgcaggaacgggaagcagatcccgctatgcagatccggaggatcatgaagactatgatcgttttgatgagtcggaaaacagggacagctatgaagattttgaaaaactgcagcagaaaagacgccggatggatattgaaaatatggcggattttgatgagcaggaagaatatggaaattacaggaataacccggatctgatgaatgatgaggatctggatgagcttgatgagtggaaagacaactgagaaaaatccgaggagtgacagaaatgggaaaagaagccaaaacaaacgcgatgagaatgctggatcgaaaaaaagtaaaatatgaagcgctcgcatatgactgtggagagttcatagatgggatccactgtgcagacattacaggagcccctcatgatcagtcctttaagaccctggtcatggaagggaaaagcggcggctactatgtgtttgtagttccgatcgagaaagaggtggaccgtaaggcagccgcaaagtctgtaggcgaaaaaacagtagatatgatccatgtaaaggatcttacaaagatcacgggctatatccgcggaggctgcagccctcttggaatgaaaaaaaattatccggtggtgtttgaccagtctgccgaaaactttgatgagatctatgtaagtggtggaagagtaggccttaccctgaaggtaccgcttaaagatcttctggatgtaacacagggcaagcttgctccgatcactatggagtaagcgcatataaaacagataaaaaaactcccctgactgcctgtaaaggcggaagcaggggagattttttgttacagaagcatgggatttagttatcctgtgcgtcctcttcgttaacctggaatacgtgacgcttcttggccatttcgtcgctggcaagatactcgtcgtaagtggtgatcttgtctaccagcttgccgttaggaaggatctccatgatgcggtttgcagttgtctgtacaaactggtgatcgtgtgaggtgaaaaggatcactcccgggaatttgatcagtccgttgttcagtgctgtgatagactccatatccagatggttggttggctcatccaggatcaggatattggcaccggagatcatcatcttggaaagaagacagcgaaccttttcaccaccggaaagaacacggacacgttttacaccatcctcaccagggaaaagcatacggccaaggaatccacggacgtaggttgcgtccttgatctcggagtactgtgtcagccagtcggtgatagtaaggtcgttatcgaattcctgtgtattatccttcgggaaatatgcctgggaagtggtaacgccccatttgtaatttccttcatccggctccatttcacctgtaaggatcttgaagaaggttgtgatggcctgctcgttggcgcccacaaaggcaaccttatcttcacgaccaagagtgaaggaaatgttgtccagaacctttactccatcaatggtcttggacagattttccaccatgaggacctcgtttccgatctcacggttcgggcggaagtcgatgtatggatatttacggctggaaggacgcatgtcatccagctggatcttttccagggcacgctttcgggaagtcgcctgcttggatttggaagcattggcgctgaaacgggagatgaactcctggagctctttgatcttctcctctttctttttgttggcctctttcatctgcttgatcagaagctggctggattcaaaccagaagtcgtagtttccggcataaagctggatcttgccataatcgatatcagcagtatgtgtgcagaccttgttcaggaaataacggtcatgggatactacgataaccgtattgtcaaaattgatcaggaactcctccagccattcgatagcaggaagatccaggtggttggtcggctcatcaagaagaaggatatcaggatttccgaaaagagcctgtgcaagaagaaccttgaccttcatactaccggtaaggtctgccatctgtgtatagtggaactcggtgtcgacgccgagaccgttgagaagagtagcagcatcggactctgcttcccatccgttcatttctgcaaactcaccctcaagctcgctggcacggatgccatcttcgtctgtgaaatcttcctttgcgtaaatggcttctttctctttcatgatctgatagagtctttcattacccatgatgacagtatccagaaccggataagcatcatatttgaagtgatcctgctgcaggaaagaaagtctctgaccgggggtgatcacaatgtcgcccttggtaggctcaagctgaccggaaaggattttgaggaatgtagattttcctgcgccgttggcgccgatcaatccataacagttaccctctgtaaatttgatgttaacgtcttcaaacagcgctttttttccaacgcgcagtgtgatgttatttgctgaaatcatatcatacctcttttttcattaaataaatatcgtttcaattacatacgaaagcattacaatcgtttcctattgtaccgtaaactgaaaaatttgcaagctgtattttccttttttcggctaaataaaggaaaaacaggggattactatgaatcacaggaaaataataaccttttattatataaaaaaatgggttatactgtcgtatgtggtaatgaagtattccggggatatggatatccggctctctggcacatcagaaacacccaggaacgtggcagatcggatggaatgcggaaactatcataaatcagcagcttagttgaacagaagagaggttaaaaatgtttatcaccagagaaagcgattatgcgatgcgggttatccgcgcattgatgtgggagccgcgtttgagcgtcagcgagatctgtgagagggaatcgatcacagcaccctttgcatacaagatactgaagaagcttcagaatgcagggctcgtggaaggataccgcggagttcatggcggttacgcgctgaagagagatccggaagaactgtcattatatgagatatacagtgcgatcgatccggatatgtccatcattgagtgcctgaacggcacatatcagtgtccaaggaacggacaggacggagttccctgccatgcacatgatgagcttcaggagatccaggatcagctgtggacaatgctccgtcggaaatccatgaaggatcttttcggaaaagaggagaagtgattcccggatgtgagttgggataagcgtatgagatgataaggagagcagtttggagaggaaaaattccgaacagctcttttttatttgtgaaaaagataacggcgtttgtacaggataatatacaaaaaacaatgaaagaaaatggacataactgggaatctatgatataataaccaatggaattttaggccttcataagcctaaataatatattttttaacaaacctttaaggaggaaaaaacaatggcaagaaagatgaaaaccatggatggtaaccatgcagccgctcatgcatcatacgctttttctgatgtagctgctatttacccgattaccccttcatctgtaatggctgaggctacagacgagtgggcaactcagggaagaaagaacatctttggacaggaagtacaggttacagagatgcagtctgaggcaggtgcagcaggtgccgttcacggttctctggcagcaggtgccctgactacaacctacacagcttcccagggtcttctgcttatgatcccgaacctttacaagatcgctggtgagcagcttccgggagttatcaacgtatctgcccgtgcacttgcttcccacgcactttgtattttcggtgaccattccgacgttatggcctgtcgtcagactggatgtgcaatgctttgtgagtcttctgtacaggaggttatggaccttacaccggttgctcatcttgcagcaatcaaaggaaaagttccattcatcaacttcttcgacggattccgtacatctcatgagatccagaagatcgagacatgggactatgaagatctgaaagatatggcagatatggacgcaatcgcagagttccgtaaccgtgctctgaacccgaaccatccatgtcagagaggttccgctcagaacccggatatcttcttccaggcaagagaggcatgtaatccatattatgacgctcttccggcagttgttcaggagtacatggacaaagttaacgagaagatcggaacagactacaaactgttcaactactacggagctgctgacgctgagcacatcatcgtagctatgggttccgtaaacgataccatcgaggagaccatcgattaccttatggcagctggcaagaaagtcggtgttgttaaagttcgtctttacagaccattctgtgcacaggctcttatcgatgcaatcccggatacagttaagcagatctctgttcttgacagaacaaaagagccaggagctcttggcgagcctctgtatcttgatgttgttgcagctcttcgcgacagcaagttcagcgatgttaagatctttacaggacgttatggacttggttccaaagatacaacacctgcacagatcgtagcagtatatgagaacactgagaaagagaaattcacaatcggtatcgttgatgatgttacaaacctttctcttgagacaggcgcaccacttgttacaacaccagagggaacaacaaactgcaagttctggggacttggagctgatggtactgtaggtgctaacaagaactccatcaagatcatcggtgacaatacagacatgtacgctcaggcttacttcgattatgactccaagaagtccggcggtgttacaatgtctcaccttcgtttcggtaagaaaccgatcaaatccacatacctgatccacaaagcaaacttcgttgcatgtcataatccgtcctatgttaataaatataacatggtacaggagcttgttgacggaggtacattccttctgaactgtgcttgggatatggaaggacttgagaaacatcttccaggacaggttaaagctttcatcgctaaccacaatatcaaattctacaccatcgatggtgttaagattggtattgagactggcatgggaccaacacgtatcaacacgatccttcagtccgcattcttcaaacttacaggaatcattcctgaggagcaggctatcgagcttatgaaagctgctgctaaagctacttacggacgtaaaggtgatgacgttgttaagaagaactgggcagctatcgatgccggtgctaaacagatcgtagaggttcaggttccggagagctggaagaacgctgaggacgagggactcttcatgtctcacgcatcccacggtgctcaggaagctcaggacttcgtaaacaacatccagtgcaagatcaatgctcaggaaggtaacagcctcccggtatctgcattcaaggattatgtagatggtacaacaccatccggaacagctgcatatgagaaacgtggtatcgcagttaacgttcctgtatgggttccggacaactgtatccagtgtaaccgctgtgcatatgtctgcccgcatgctgcaatccgtccggttgctatgacagcagatgagacagctaacgctccagagggaatcaagacacttcctcttacaggaatgaaagactatacattcacaatgactgtatccgctcttgactgtacaggatgtggttcctgcgcaaatgtctgcccaggaaagaaaggcaacaaagctcttgagatggctccgcttgaagctaacacagaagagcagaaattcttcgattacggtgtaacacttcctcagaaggaagacgttatcgctaaatataaagagacaactgtaaaaggcagccagttcaaacagccgctccttgagttctccggcgcttgtgcaggttgtggtgagacaccatacgctaagctgatcacacagctctttggtgacagaatgtacattgcaaatgctacaggatgttcctctatctggggtaactcttcaccatctacaccatacacaacaaacgctaagggacagggacctgcatggtcaaactctctgttcgaggataacgcagagttcggttatggtatgcttcttgcacagcgtgcgatccgtggcggtctgaaagagaagatcgaagaccttgtagctaacggaacaaacgaggatgttaaggcagctggtcaggaatggctggatacttatgctgtaggcgcaacaaatggtgcagctacagagaaactcgttgcagctcttgaggcttgcggatgtgacaaggctaacgagatccttgcacagaaagacttcctctccaagaaatcccagtggatcttcggtggtgacggatgggcttacgatatcggattcggtggtgttgaccacgttcttgcaagcggacgtgacatcaacgttatggtattcgatacagaggtttactccaacacaggcggacagtcttccaaatctacaccgacaggtgcgatcgcccagttcgcagcaggcggaaaagagactaagaagaaagatatggcatctatcgcaatgagctatggctatgtatatgtagcacagatttccatgggtgctgacttcaaccagactgtaaaagcaatcgcagaggcagaggcatatccgggaccatccctgatcatcgcttacgctccatgtatcaaccatggtatcaagaaaggtatgagcaaagctcagacagaggaagagctggcagttaagtgcggatactggcacaacttcagattcaacccggctgctgagaacaagttcagccttgattccaagacaccggatatggagaactatatggacttcctgaacggtgaggttcgttacaattctctgcagcgtcagaatcctgagaaagctgcaagactgtttgctaagaacgagtctgaggctcaggctagatatgagtatctgcagaaacttatcactctttacggagcagataagaaagaagactaattattgatcaatagttactgtttatacagtgtgcttgctgattaagcattaggtgacaggcctgcggtgtttagcgcaccgcaggccttttttcatatacaggagagacatatatgaagagaattttttcgaaggagaaatcccggaaagagaaaaaagcagatttttatattctgtatacgattgtttttgcggcgatctcgctgtttatttacagttgtttttatttcaatggaaaatccctgatctggagtcatgacggtgttccgcagcacatcaatgcattggcctattatggaaaatatctgcggaatgttctgcagacgctggtgacggagcataagctttcccttcctatgtgggatatgcatatcggatacggttccgatatccttacaacacttcattattatgcgatcggtgatccgctgaccttactgtccgtttttgtaccggaaaaagacacagagatcttatatgagattctgatctttctccgcatttatctggcgggtatcacattcagcatttactgcttttaccgcaagaatcccaaacaggccacatttcttggaagccttgtttatatttttgcaggatggaccatttatgcgtccatgaagcacccatatttttccaatcccatgatctatctgccgctggtccttatgggaattgaaaagatttacaaaaaagaaaagccatacctttttatctgtgcgacggctgtagcggcaatgtctaatttttatttcttttatatgatcagtatctttatggtgctgtatgcagctttccggtattttggaatattccgcaagcgttcagtaaaagatgtatttcagtggttcctaaaatttgctggcttttatctggtcgcacttatgatcgctgcactgatctttttacctgtggtaatgactctgtttggaacagagcgctttcaggcgcagaattatgtgccgctgttatatgaccgcatttactacgaaaaatatctcggctgcctgatcggcgaaaatatgatccagtggggagttgctggatattccgcagtcgcaatggcaggcgtgtttgtgatcttttccaaaaagaaaaaatatacgggactgaagctgggctttgtgcttctgaacttgtttttgctgatcccctttgcaggtcatgtactgaatggattttcatacgtgtccaatcgatggatctgggcgtatggaatgctgatcgcatatatcctggtacaggcatatccggaactgtttacgctgggcatcagggaaaaacgacggatatttgtgatgctgctgatatatggcgtgctggcactgttttcggaatctgcccgtacggaacgcaatatcatggcactgatgatgctggtcctggctgtgtttacagtggtttcctacggaaacgtatttacacagggaaagtatctctgtggaatgatcgtggccgtgcttgtgacaagcatccttctgaatgtttcataccagtattcttacgaaaaagattatctgtcagaatttgaggaaaaggatcaggcgctggagaagcttcagtccggaccggacaaagcaatccggtcaatggacgattcagcggttaccagatatgaccagtacaaaacgggctcttatgtaaacactgccatgtatatgggaaccaacagtacttcctattatttcagtgtggccaatggaaatatcagccgtttctttgatgagatgtatctgaataccccctgggattatcattacagcagcctggacggacggagtatcctggatcgtcttgcctcggtgaaatattttgccatcaaaaaaagcggatatgggtatctgccatacggctatgacagtgaagcagcagtcacaaaaaaatacaggatctacgaagacgaggattcccttcctcttggttatacctatgattcctggatccccagagaaaactatgaaaagctttccgtgaccgaaaagcagcaggcactcctgcagggggcagtccttgaggacagcagtctttctgagacagacctcatctttgacgataagaaagcagattttacactggaagcaggaaaaggctgtaagataaaaggcggaaagatcattgtggccaaagaaggagcaaccgtacagatcggatatcagggagagccggaggcagaggtttatcttgtggcaaaaaatctggattttaatgcctattctccacgtgcagtggtcagtgataaaaaatgggattccatgacagaatatgagaagaataccgtgcgttatgaagacaataactggcgctactggaaagaaagcaaggaatcagcagtggatgtttcgctgggctccgtggacaagactatccggatctttacagataaatacaacggctacagcggaagacataattttcttctgaatatgggatataaaaactattctgcaggaactatgacactgacattctccatgccaggagaatatacctttgatgatctgtatgtggtatgtcagcccatgtcttctgttgaagaacagacagaggagcttggaaaagaagctcttcagaatatcaaaatggagacaaattgcattcgtggagatatcacaaccacttccgataagatcctggtattttccattccctacagcgcaggctttaccgcctatgtagatggagaaaaaacagaacttgtgaaggcaaacagtatgtatatgggactggaattaaaaaaaggcaggcatacgatcacgctcagatattgtacaccgtatattgtgcccggaatgatactgacggtgatcggccttatcctgtttgccgggatcgtaatatcttaccggcgccggggaaaacaaaaagaaaggggaaaacaggagaaatgagccgattatcggtagttttgcctgcctgtaacgaggaaccgatgctggagaaaacctgccggactctcagagagctcctggggcaggccgggatcctttatgaactggtcctggtagatgacggttcctctgacggaacctgggcagcgatagaaaaagtatccggagaagataaaaatgtgacaggtgtgcatttttccagaaatttcgggaaagaagcagcaattgtggccggccttgcacaggcatgcggagatgcggtggctgtgatggactgtgacctgcagcatccgccggaaatcctcctggaaatgtaccggctctggaagcagggctacgaggttgtggagggtatcaagaaaaatcgtggaaaagaaactctttttcacagaaaaagtgccggatttttctatcggatcatgtcccgtgccaccggctttgatatggaaaatgcttccgatttcaagctgctggacaggaaagcggtggagagtgttctcgccatgcctgaacggagcatgtttttccgggcggcatcgtcctggataggcttcaaaagcatctccgtaccttttgaggtgcaggagcgtgaggcaggagaatccaaatggtctgcaggaacgctgatcagctacgcgtttcggaatatcgtggcatttacaacacttccgctgcagtttgtaacagccggtgctgtgggttgctttgggtgctccctgctccttctggtctattctctggtccggtatttttccgggcatgcggtggaaggctataccacacttctgatcgtgatgctctttatcggaagtgccgtgatgatgagcctcgggatcatcggatattatatcgccaggatctatgaggaagtaaaacgccgtccgagatatatcgtgtcaaagatcatacgaggaggagataccaatgaaaaagtggatccttaaattctatgaaaatgatgtgatccgttatattttctggggtggttgtacgactctcgtaaatctgttaagcttttatatcatgagggcaatgggaatcccgctgatgagtgccaacatcatatcgatcatcctggcgatcctgtttgcctatgttgtgaattccagatttgtatttcatgaccgctgtgaaacatggaaggatcatatacggccctttctgaaatttataagtgcccgtctggtgaccatggtcattgaggtaggtggcgtatggcttctggcggagatcctgggattccgggatatgtttgcaaaattctgcacacaatttatcgtgctggcgttgaattatatctttagtaaatttattatttttaccacaggtaaaaggattggaggtagcaaatgatgactttggatgaggcagtgaagaaagtccgccctctggatgaaaaggctatggagggggcgagaaagagatgggacagtattgcaaagcccctgcattctctgggagagctggagaatatgctgacacagatcgccggtatcacaggtacaccggaggtacgtgtggaaaaaaaagcagtggttgccatgtgcgcggataacggagttgtagaagagggggtgacccagaccggacaggaagtgacggctgttgtggctgagaattttctggaagggactactacctgctgtgtgatgtgccgtcagtgtggagcagagctttttcctgtagatgtgggaatggtcacagatacaaaggtccgtacagatcttaaggttgcctatgggaccagaaatatgaccagagagccggcaatgacaagagatcaggcgatccgtggcatcgaagccggaattgccatggcagagaagctgaaggaaaaaggctatcaggttcttgcaaccggcgagatgggcatcggaaataccaccaccagcagtgcggtagcagctgtgcttctcggaaaaccggtggaagatatgaccggacgtggtgccggattgaccagtgaagggcttgtccggaagatcaatgcgatcaaaaaggcgatcgccctgaataatccggatcgttcagatgccattgacgtcctggcaaaggtaggtggactggatattgcaggaatggcaggagtattcattggaggagcagcacttggaatgccggttgtcatggacggatttatttcctgcgtatctgcactgatcgcaataaagatctgcccgcaggtaagtgatcatatccttgcgtctcatgtatccaaagagcctgcagcacagctgatcctgaaggagcttggcaaggaagcgatcatccacgcaggcatgtgcctgggcgagggaaccggagctgtggcactgtttccgatgatggatctgtcctgtgcagtatataattccatgagtacctttggtgatatcaatgtagaacagtacgaggagctgaaataatatgctggttgttgtaacaggaggcagcggaagcggaaaatctgcttttgcggaagaaaccgtactttcccttggcgaagccagaaggatctatatcgccaccatgcaggcttttgacgaagaaagccacaggcgcatccgcagacaccggcacatgcgtgcaggaaaaggcttcgaaacaatagaaagatatacagagctggatgagctgctcatcccgaaggactgtgtggttcttctggagtgcatgtccaatctggttgcaaatgagatgttccgggaaggcggcttccacccggaggtggcagaaaagatcacagaaggagtgaaaaatcttctttcccaggcaaagcatgtggtgatcgtcaccaacgagatcttttcagacgggatcctctatggggaagaatcagaacagtacaaaaaagagctgggacagatcaaccagaaactggcagagatggcagaagaggttgtggaagtcgtatacgggatccctatatggcataaaggaggaaaggaagcatgaaaagcttatggaacagttttaaggcagcctttgccatgttttcaaagatccccatgcccatggtggactggaagaaggaaaacataaaatttatgatgtgctttttcccctttgtgggtactgccatcggcatcctgacctggcttgcaggagggatcctcggagtgcatgcagctctggaaccattttttctcgctgtgatccttactgtgatcccggtatttattaccggcggcattcatgtagacgggcttctggacacatcggatgcattaagctcctggcaggaacgcacaaggaggctggagatcctgaaggattcccatgcaggtgcatttgccattatcacagcctgtgtatattttatcctctggctgggagcctgggatcagctccttggaaattataacgggatctgtatcatgagcctgggctttatgatgtccagatgtctttccgggatcggtgtgatcacatttcccaaggcaaggacagacgggactgtggcagaattttccagaaatgcgtcagagatcgcagtgcgaaatgttcttatcacgatgtttgtgatccttgcggcgctgatgataagggtagatccggtcctgggtgttctggcagctgtcagcgcacttctggtattctggtggtatcaccatatggctttgaaatattttggagggaccacaggtgatctttccggatttttcctttgcatctgcgaggttgtgatggcactggtgcttgctcttggtggcacgtttaatctgtaatgaagatttggatgaggtaaaaaagatatggaaatgataatcggaggcgcatatcagggaaaagctgcctatgcaaaagcacagttcccggatgtggactggaaattcggaggagagatcacagaagaggagcttctgaaggcagcgggtgttctgggatttcaggaatacataagaaaagctctgaaggcaggagaagatctcaccggcctggcagaaaagctggcacagcaggatccggatgtgatccttgtcagtgaggaggtaggctacgggatcgttccggcggatgcttttgaacggcagtaccgagaagctgttggccgggtgtgcactgcactggctgcaaaaagcagaagggtcacaagagtggtatgcgggatcgggacggtgctgaaggatgattagattatatctgatacgacacggacagacacccggaaataagcttcagcgttatatcggaacaacagatgaaccactgagcacagagggaaaggaatttctggaaaagctgacctatcccatgccggaggccctttatgtaagtccactctgccgctgtgtggaaactgcggggatcctttttccaggaaaaagctttcatattatcgaagagctttctgagtgtgattttggagagtttgagaataaaaattataaagagctttccggaaatcaggattatcagaggtggatcgacagcaatggaacgcttccttttccgggaggagaaagtcgagaagagtttaagcgccggagccttacaggatttcagaaggctgtcacacagtgtatccgtaacaacacaaagacagcggctcttgtgatacatggcggtacgatcatgaacattatggaagaatatgcggacagacccagggccttttatgaatggcatgtaaaaaacggcggcggttatctggcagagctggatcctgcgctgtggcagaagggacggagagagctctgtgtccgtgaagcatatatggagggttaaattatgaatgagcagaagatcagctggaaacgcagtgacctgaaatggcgtggaaaacaggcattcaaaaaaaattactggtcagcagtgctggtaagtctggtgctggctattgtgatggcaaccggcggaagcggtgcggccacaggcagtgccggaaatgtggcaggtccggattacggtgttacaacgtatcgtttgggtacggatatcaatggtgttacttcttatgtcagccatgtatttcgctccccactggcagtgctttttgcgcttctgagtgccagtgccgtggtagctgtggctctgatcggaatcctttttcatttttttgtgggaaatgttttggaggtaggcggaagagatttttacattgagaacctttattctgtacccgggcccggaaaactcctcagtgtatttcgttccgggaattacggtaatatcgtaaaaaccatgtttttacgggacctgtatcttgtattgtggacgttgctttttattattcccggagtggtaaaatcctacgaatataagatgataccttatcttcttgcggaatatccggatatgagcacaaaggaagtatttgcaaaaagccgtgagatgatgaacggacagaagatggatacctttatcctggatctttcctttattccctggtctgtcctttcggcaattacggccgggatcgcgggactcttttatgtatccccgtataaggatgcaacctatgcggagctttatgatactcttgcggcaggaatgccgggaaacggacagcaggtgtatgaagatgaaaacagcggcatttactgataaaatgatccttgtgagaggtggcggagatctggccacaggagtgatccacaagcttcatcagagtggctatcaggtcctgatcctggaatgtgaccgtccaagtgccatccgccgtcatgtggctttctgtgaagctgtttatgacggaactgcagaggtagaaggcgttgtgtgcaggaggatcacggagaacgatatccggacccagtgcaggaaatgctgggcacagggagagatcccccttctgacagatacccatggaaaacatatccgcgaactggagccggaggcagtgatcgatgccatccttgcaaaaaagaatcttgggaccagcagggacatggctccactgacagtgggacttggcccgggctttaccgcaggggaggatgtggattatgtgatcgagaccatgcgtggacataacctgggaaggatcataaaaaaaggcagtgctctgccgaataccggagtgccgggactgatcgcggggatcggaaaggaacgtgtgatccattcaccggcagccggtaacatgaaaaacatctgtcagatcgcagatcttgttgaaaaagaccaggtgatcgccatggtaggtgatacgccggtgaaggctactatttccggcgtgatccgtgggctgattcgggatggttatcctgtttttgcgggaatgaagatcgcggacattgacccaagggcagaacagaagaaaaactgttttacgatctcagacaaggcgaggtgtatcgcagggggagtactggaggtgctgctttcctgcggagtgcttccgggaacagagaaagctgtgaggaatgagaatctgtgaccgatacagagcctggtgtccctgaaagaagttagaagataaatggagtgtgtcatgaagaaaaatgaaaaagcgcttactgtggcattcacaggaggcggcggaaagaccagtctgatctttggactggcagaaatattttccggacagggaaaacgtgtgatcgtgaccacaaccacgcatatggcatgggaaccggaacgtccttttgcggaggcagaggacattccgggagcatgccggcttatagaacaatacggatacgttatcgcggcacatcataaggccgggcagccaaagatttccggccccgaaaaggagatcctggaaaagctgcccggcttttgtgatcttcttcttgtggaagctgacggatccaggcgccgaccccttaaagtgccggctgttcatgagccggtgatcccttcttttgcagatgtggtagtaggagtgatcggtcttgactgcatcggcaaaaagatctgtgatacgtcacaccgtccggatgatgtggcgggatttctgggaaagcgtacagatgagcctgtgacatggatggatgtgtggaagatcatccggtctgaagccggattgcaaaaaggcgtggacgggcgaagatttctcgcgtatctgaacaaggcggatactctggaggatccttgtgtggtggaggagcttatggcacaaggtcaggagtctgggatcatggtgatctgcggaagcctgcagagaagtgtaaacagctagtacagcgaatattaagtttctgctatattgacgcaggatgatttcttcatctgcaaggcggaggaatgaggcgtagcggtggctacgacgattgacgacaacgcagcagatgaaaaatcaggcaagtcaatatggcggttacttaatattcgctgtactagaatcgaaaggaagtggagcggtgatatgaaactgggactgatcatgctggcagcaggaaacagccggcggtttggaagcaataagctgctgtacgggatagacggaatgccgatgtacaggcatatcctcctggaactgaaaaaagtgaaagcagcactggaggaacaggggcacaggtgtgagatcacagttgtcacacagtatgaggagatcgcgcaggaagcagagaagcttggcgcgcggtttctttataatctgcatccggatgaggggatatcttcctcattgaagattgggctgcgggtcaaccgggagatggatgcttgtttgtttacggtggcagatcagccgtggttgcggtgggagacggtttttggactggtggatgtgtttttgagagatgggaaggggatcgcctgtgtggagcatgatgggaagaccgggaatccctgtgttttttcgaagaagtattatggggagctgatggaactttccggtgatgtcggagggaagagagtggttgtggcacatcgggaggatgtggctgtgatgaaggttgaggatggacgggagatggtggatgtggatttttcggacggacgccggtgaggtaccgtctggtttgggctggggcttcgtcgggggctggcttctaaggcgctggaaatctgctaaaaccgctgaaaaaaatccagaactcgctcctgcgtcgctcaaacagctggattttttccagcaacgcagattcccaccgcctaagaagcgcacccctcctgcagagccagcccaaaccagacgctacctcgccggctgacgtgcgaaggagtggaaggctatagtggaggcgtgaggttgaagaatatagcgaaaagagctgttgacgtgtgacagagggaatgtgctggagtgaaggtgtgaggttgaagaagatgacaaaaagagctgttgacgtgtggcatagagagtgagctagagcgtgtctgaaaaatgcttttcgcaagatgggcgtcacaatttgtgggagattttgtccggacgagggtgtcgtagcgggctacggcaaccgaattcgggcaaaatttcccgcaaagtggggcgtgcagattgtgagaatgatttttcaaacacgctctagggtgaaagcaccgtgtctgaggcaattttcacgcatacaaaagccagcagggaaccgccctggcgtggcgggatgttctgcaggagtcctgctgattcttaggtggtgtggcagcaccttagaagccagcggacgacgaagcccttcccgctacgccagggcggttccctgcgtacgttcgttataatttataattataaggtagacaaatctcaaataaaatgattcttagccgcttcttcctcagccagacgaaccgtctcaccggaaggattggagatcactgctgaagctacgatctcacaaggcgggtttccttttacactgtcaacggcagccgtaacagcagaaacatcaccagtcagaaaaacagtggcatgaccaccacacttcgtctgccaggtaagaaaagaaacatcagaagtcttcagcatctggtcgatcaccaggatcgcattactgctgccaacaacctcaactaaaccaaaagcaccataattcataaatccatcgccccctttatttattgatcgtcatcttcagtgcgatctcagtatcctcagaaggagaagcgatcacagtatgagaaacaaccttaccaagaggtttggctgcctccagcgcaacctccatagctgcattaacgtcagaaacagaaccacgcatcttgacacaggcgccactcttcagacggttacgttcaacactctggatcttgacattggctgctttggaagcagcatcaagagcaacaaaacaggcaaccaggttatccagctcaaaaacacctacagccatgcccttataattattatccataaaaatacctccatgcggaacagattccagtaatgtggtttcttgaccggttttacgtggaatcattaccgtttttatggatttattataacttttttagacaaaaatagcaagaaataaatacacagataacaaagtattactgagaacggagtgaacaatagctcacgaagagaacagtaacgcaaagtttactttggacgccggatatagtatattaattaaataagaaatagcaagaaggtgtaaagaaatgcagatacatcagacagacttttcaacaggaaatgtctatcgtaacattatggaagtggctgtgccgatgatcattgcacagatcctgaacctcctttacaacattgtagaccggatctatatcggaaggattcctgagatcggagccactgcactgacaggagtgggactgtgttttcctattatcaccctgatcaccgcatttacctatctttttggaaatggaggagcaccgctttgctccatggaacggggaagaggaaaccgggaagaagcagaaatgctcatgggaaacacctttgtgatgctgatcggcacaggagcgatcctgacagccattggccttatcttttacagaccgatcctctatgcctttggcgccagtgatgtaaccttttcctatgcggcagactacataaggatctatcttctgggaaccctgtttgtgatgatcactctgggaatgaacccgtttatcaacagccagggatttggaaacacagggatgctcacgatactgatcggtgctgtactgaacattcttctggatcccctgtttatctttggaatgcacatgggagtccggggagcggctttggcgactatcatttcccagttctgttccgccatctgggtcttacgcttccttacaggaaaaaaggcgatcctgaacctgaaaaaaagcgccatgaggatctcctggaaaagagttggcagtatcgtaagtctgggtatgtccggtttttttatggcatttacaaacagtcttgtgcaggtggtatgcaatgccacactccagacctggggtggtgatatctacgttggtgtcatgacagttttaaattctgtccgtgacattttcaccatgccggtccatgggcttaccacaggtgcttctccggtcatgagcttcaattatggagaaaaagcatacgacagagtcaaaaaagcaattaaatttattacagttgtctgtgtgatctataccctggcaggctgggggatcctgaaggtgcttcctgaattttttatccggatctttaacagtgatcccaggcttctggaaaagggagttcccgcccttcatatttacttttttggcttctgctttatggccttgcagtttaccgggcaaagcgtgttcgtggcacttggaaaggcaaaaaaggccacctttttttctctgttccgaaaggtagtgatcgtggtaccgctgacgcttctgctgcctcatgtgaatggtctgggaacagatggcgtgttctgggcagaaccggtttccaaccttgtaggcggctgtgcatgcttttttaccatgctggcgacagtactgccggagctgaataaacgtaaggcataagacgggccggataaaggtttgcgggaaattttgatatgtgttagaatggacgagatgatttttttgcaaactaagcagaaatcttaagaagggccggcgtatagccggacaggaatgagaggaaaacataatggctttatttcaggcatttcgggcagtaagacctgcttcggaaaaagcagaaaaggtggcggcacttccttatgacgtagtcagcagagaggaagcgcgagagatcggggaaaaaaatccggaatcttttttacatatagaccgtgcagagatggatctggatccggaaacagatctttatgatccgatggtttatcagaaggcaagggaaaatctggaccgtttccagaaagaagggatcctgatccaggatgagaaaccgaactattatctgtatgaactgattcgtaagggaaaatcccagacagggatcgtaggtgtcagctccattgatgattacatgaatggtgtgatcaaaaagcatgagcttacaagagaggataaggagcaggaccgcatccatcatgtggatgtctgtgatgccaacacaggccctatttttctggcgtgcagatatccggcagagcttcttactcttatggaagaatggaaaaatgcacatgctccggtgtatgattttacttccgatgacgagatcacacatcgtgtatggatcgtagatgaggaagaaacgattcggaccatagacagcctttttggcgggatctcatctatctatattgcggatggccaccacagagcagcctccgcagtaaaggtaggacagaagaaaagagcggagcatccggactacaccggaaaagaagaatttaactttttcctgtcagtggtatttccatatgaccagctgaccattcttccgtaccacaggatcgtaaaggatatcaaaggcatggaacccaaagcctttatcggaagtatgaagtttaattttgagctgatggcaatgccgggatttccatgtaaaccggtggagaaacactgctttgggctgtatgtagacggagaatggttccatctgaaggcatatccggatatctatgcaggtaaagacagcgtaggtcagctggatgtgtctattcttcaggataaggtcctgggtccggttctggggatcagtgacccgcgtaccgatgaaaggatccgctttatgggaggaaaccaccggctgaaggatctggcagcagctgcagatgagacaggaggagctgcctttgccatgtatcctacatccatggaggagctgatgacgattgcagacgagggtaagcttatgccgccaaagagcacctggtttgaactgaagctccgcagtggtctttttatccataagctttcagactgatgccggagactttatagaattttaataaaatcgtcaggaaaatcttaggaaattaatacagatcgctcacatttgtccggtaatatacagtatatgctgagcaaatgagaaagaggggtttcatgacaaacgaacagtattacgattgcatccagccataccagaatgcatgccagatcatgcgcgccaagcttgaagtgctcaacggaagtctgtatcagaagtctgccgtatctccaatccacaatatccaggaacggatcaaatccaagaggagcatcgaaaaaaagctggagaagttgggacattcggacagtgtgcagaacgccaaggatcatctccgggatatcgccgggatccgtgtgatttgctactttattgatgatatatataatcttgtaaatgcgctgaaacggcagagtgagctgatctttatcagggagaaggattacatacagaatccaaagcccaacggataccgcagccttcatgtgatcatcgcagttccggtatactatctggataccatggagtattttccggtggagatccagctgaggacgatgactatggatctctgggcaagcatggagcaccgtgtctgctacaagaagcttccggaacacagggatgagctggcagaggctttctgtcagtatgcagatatcctcggaaagatcgaggaacagtttgaagcctacaatgaaacaggaatgctggaggagatcacaccagcccagattgctgagaatccgtcggagggataaaaatggagattgaagaggaatttgtatccggtttctgccgtaccatgaacgggggcgaaaccgtctgctgtgagtatacacggcaggaggacgggagcaggaagctgacttttatggactgcgcgcatgagagatgtgtaaatacaggcgcctgtgagatcttcaaacaggcccatgagctggagcagaaataaaagatcaaagaaaagaaaacggcgaaaatgcataatgatcaaaaataataatgataaaaaaacaattataaaaaaatcacagaaaacaggaggagtaggtatgaagcacacagtagatgcgatgggaaagcaatgtccgatcccggtggtgatgaccaagaagattcttgacaaggcagagcagggagacgagatcttaatcctggtagacaacgaaacggcagtaaacaacttaagcagacttgccggaagtaccggatgcagcttcgtatccagaaaaacagaaggtggttacgagatcaatatgacagtaaaatcagattcttcttcaagaagccaggcagagcctgagatcgtctgcacaccggctgttcctaagggagattatacagttgccatcacttctgataagatgggagacggagatccggagcttggtgcgatcctgatcaagggatttgtgtatgcgctgacacagctggagacaccgccgtcagttatgctgttttataatggcggagccagacttactgcacaggattcaccatgtatcgaagaccttaagaccttacaggaacagggaacagagatcctgacttgcggaacctgtgtgaacttctatggactgaaggaaccggcagtgggaaccgtaacaaatatgtataccatagcggaaaaactcacaaaagcaggaaaagtgatccgcccgtaaacagagaaacatatagaaacaacaaaagtatatagaaacttacagaagcagacaaaaacatatagaagcagacagaaacaaatagaaatacacagaaatgccgcagagccattttgaagcctgcggcatttctgacatccagttggtatctggttgatatccacttaatgtcttctatatgaaaagattttaatgaaaaactgcacatcctacgcagataacatgataattttatgaaaagcgaaaggaaatcattatgaaaatcgaatacacaaaagtgggagactattatttaccgaatctttaaaaagataatgatatggcagtagcaagatatatacttgcggtaaatagaagatataaacgtgacggagaacaggaagcagattttatctcctgtgtcacatttggaaagagtgcggaatttgtatagaaatagattgcaccacgagatttatatgtctgatgcaagaaaggttgctccagataaagggaaaactgtaattagacatccgattaagaaagcgtaaaatcgggatttacttctacttagacatacaaactgttgacagtaaaactcctatatagtattatttgataaaatactatataggagtttttgtatgaaaatgaatggcggatttcttgttaccaaaataaaacaacttggagatcgaatctttgagaagattctcagcgaaaagaatattgatgcgtttaacggagcccaggggcgtattctttatgtactgtggcaggaagatggaatctcaatcaggtcactctcgattaaatgtggattagcgataacttctcttactacgatgctggaaagaatggaaaatcaagggctgataagacgcgttcagtctgaaacggacaaaaggaaaacactcctgtttctgactgaaaaagcacatgccttaaaggacgaatacgattctgtatctgataaaatgggcagtatttactacaaaggtttttcggaggaagaaattacccagtttgaggaatacctcgaccgtatcagaaagaatcttgaggagtggcagaaat

SEQ ID NO: 217 - DNA, 5059 bp, Unknown
  gut microbiota DNA sequence
aaacggtgctagaaaaaatacaacccttcagtaaaagaatttcagacgcttgtggcaacaggggaagtgaagcatgttgcaggccttgcagcgtgggcacgctggatgagcagagaagacgaaaaataatggaatatcatggactggtgtcttataacacggacaaatatcaggaagatcatgtatcttggtgggactgtgtcgacgtgatcttttccaacggatattatccaattgatcaatgggagcaggaactggattgtatcgaaaaaactgtcttaaaatataggaaaccatttttctttgccgaagcgggatgtatgtcacgaaaaggctccgggatgattccaaataactgggaattgcagggagaacttcgcctggaagaacagtgtgaatggtatcgtgcaatgtttgaggcctgtaagaaacgaccatggcttcgtggctttgctttatgggagtgggcaccaaagttgccttctgcttccgaggcatggaaggacgacagctatgaaatatgtgagaaaccggtgcaggagataataaagagattctatgggcatgaggcaggaatctcattaacgtaatatttgtaaaggaaaaagaacagtctgttttgatggaattaatttctgttatgacagactgttttttctattccattatcaatagtcgatttgcggaaaacattgaaatatatgtgtcgtgaggagaagtttatgctgtatatgcatataatactattagctgagttatatgggcatatgtcaaaaatgttattgacatatgccttttatagagctattatataagaaaagcaagaaaggagcagtttatgccgagaccagtaaaatgcagaaaagtttgccatttccccaatgttttagaattctttccggcagatgatactgagaaaaaaacacctattgttctgacggtagatgagtatgaaaccatccgtcttttggacaagaaaggttatagtcaggagcagtgcgcagcatctatgcaagtcgcaagaacaaccgttcaacgaatttatgagattgccaggaagaaaatagcagatgcactcattgatggatatccgcttaaaattgaaggtggagatttcaaaatctgtgatggtcagagcagtaattgtggacttggaggatgttacaaacaggaaatttaccaaaaatatgcagcggaaaaaggagaaggtatcatgagaatagcagtaacgtatgaaaatggacagattttccagcactttggacacacagagacatttaagatttacgatgtagaggaaggaaaagtagtacattcagaagtagtagatacgaatggaagcggacatggtgcattggcaggagttcttaaagcattgaatgcagatgttttgatctgtggcggaatcggaggcggtgcacagacagcgttagcggcagccggcattaagcttttcggaggagtttccggagatgcggatgaagcagtagaagcttttatcaatgaaacactggagtataatccggatgtgaaatgttctcatcacgagcacagccacggggaaggacatacatgtggcgagcatggatgtgtaagccatagctgtcattaagaaaaatagcaaaaaataataatacaaaagaatgtgtcaaggtaatggagaaaggcaactgttgacttttgccttttagcgtgttaaaatcgagagtgtagaaaaacaaagacgttttgcagtcattattgcaaagcgtctttttattttatcagcagtgataaagagtgtgcggtaaacagataatacagaaaaggaagaatgctctatgaaagaattgttatttttgcttgtattgtttgtttctaatgttattcaggctatcacagggtttgccggtacggtattggcgatgccgccttccgtttatttgcttgggctggatcatgcaaaggtggtcctgaatgttatggcctggctgtccggactgatgatcgcagtgaccggatatcgacatataaactggaaagaactgcttaagatgtctgcggtcatgttggttggaatgtttgcagggatacagatctgccggatcgtgaaatctgaaaatattcttctgacaatatatggaatcataatcgtcgtagttgcattaaagaatctgtgcatccatacagagaaaaaacttccggatttcattttgtggatagttctgatcctagcagggataattcatggtatgtttgtatcaggaggggctttacttgtgatctatgcaacacaggtactgaaagaaaaagaagaatttcgtgcgacagtggcccctgtatgggtggtgctgaatttttttctgatggttacccagttcaggagcggcctggttggaacggcagatattcgactgatctgtatcagtatcctgccattacttatagctacatggttaggtaaaaagctggtatgtaaagtatctcagaaggtatttctgaatctgacttatatactgcttctgatatctggagtatctttgatcgtctgatgcagttgatcacaggaagctgcggtggagaaaggtgtataaatatggcagtaacattgcgtgagatcataaaacaggtacagcatctggagatgaagctggtagcaggtgagacaggactggatcatgaagtgtcatggactcatatggtagacagcgacacgatttctgcatttctgcagggacaggaacttacctttacaacagggttgggactgaatgaaaatctgactcttcttcgtctggtaaaggaagtatggcgaaacaaagccagtggaatcgtgatcaatatagggccttatatcagtgagatcggacaggatgttattgattttgcaaatgaaaagggattcccggtatttgaagtaccgtggagggttcgaatggctgaaatcatgcggatcatatgttttgcaataacaaaagagcagcagaacgcaattgaggttgcgacggcactgaacaatgcctttttatgtccgtcccaggaagaactgtatgtttcggcactgatgagaaaagggtattttacagacagtgcatatacggttgtgaatgtgtgtgttctggaagacaatgatcgtgtaacaggaacaaggctagagcagattttatctaaactgagcagtcatatccgctgtaattataatgggattttgtgttgtgcccaggataagcagattcttctggttttgtgtgattattctgatgaagcatgcagaaaaactacagagaggatttttcagatactatgcaggatggtatgtcagaaggaacagatttttgtaagtgtaggtaagcagatttccgggatcaggcagatttataagagctatcagtttgcggaaaaaatgtctgatctattatgtgtctgtcaggttccgggcgagcaaagtacagatggcggaaagattattttttacaaagatcttgggatttacagggtactgctcacacttacagataaggaagcaataaaagaatatctggcagatacagtagctccattgtatgaatatgatgagatgaaccactcagatctggtcagagtacttcagtgctacctggctaacgactgcagtgtcaaaagtgcgtcacaggaattgatcgtacatcgaaatacaattaattataagcttggaaaggccgctgagatacttggaaaaaatctttctgattttgaggtgcgttttcagctgaggctgggtttcctgttatatcagatgaatgaaatgtaaaaggaaaatgcggcagcagaataataacaattgtgctgcagcacaaaaataattggatagatgtctattgcagacagccagtgtcgagagtaatatatgactcagataagacaaaggcgtctggttcacaaatgaatgtgggccgggcgcttttcttattctacaacaaataataagtttgtttaccgcaaaaatgaacaatatttaaaactgaattacagataaagaggaggaagttattatgagtttaacaggaaaagaagtagcacagatgcacaaagattatgtgatgcagtcatgggcaagatcaggagcagatactttaccggtagaaagagctgagggaatttatttttacgattatgatggaaaaaaatatgcagatatggcttcacttctggtgtgttccaacctcggacatgagcttccggagatcgttgaagcgatcaaggaacaggctgataagatgtgcttcatggcaccggcatatgcatccgagcctaagagcatgctggcaaaaatgcttgtagaagcagcaggagcagatacatacaagagagttttcttcacaaatggtggagcagaatccaatgagaatgctataaaaatggcacgtatggtaaccggaagaaccaagatcttttcctgctacagaagctatcatggagctacacttggagcatccaatgcttccggtgactggagaagatatgcagcagagatcggtggtgcaaatggattcgtacactttatgaaccctcagatgtatcgtgacggatatacaaaaggagttgatgatgcagaggtaacgaagaaatatctggatgcgctggatctgcagctcagatatgaaggccccggaaatgtggcagcgatcctgatggagtctatagtaggtgcaaacggtgtcattcttcctccagacggatatatggaaggtgttcgtgcactttgtgacaaatatggaatccttctgatctgtgatgaggttatggcaggattttatcgtacaggaaaaatgtttgcatttatgaatttcgacatgaaaccggatatcattacatttgcaaaaggtgttacctgtggttatgtacagctgggcggatgtattgtaagtaaaaaggttgcggagtattttgaggaaaatgttcttcagtgcggacttacttacagtggacatacacttgcatgtgcggctggtgtagcagcaatgaaatattataaagaacacgacatcgagggccatgtagctgagatgcacgagatcgttgctccgtttatggatgagat

SEQ ID NO: 218 - DNA, 6335 bp, Unknown
  gut microbiota DNA sequence
atgtacgctgatgcgtacctggctcagacagatggggcttactctgcggcttgtggccgcagagtaccttcccgtcagaagcctcaggcgctaagtatgaccagcggcttactccgacgcaccgggtcccgaccatgcagccgcccctccggcagtccgtcctgtgcgttggagagaaacaaaaaggatgcactacaaagaaattctggaatcgtactaagtccgtcctgtatgttggagagaaataaagaaagcatcaaggttgtgataaatgggctgatctgagtccgtcctgtgcgttggagagaaataaaaaggatgcactacaaagaaattctggaatcgtactaagtccgttctgtgcgttggagagaaataaagaaagcatcaagggtgtgataaatgggctgatttgagtctgtcctgtgcgttggagagaaataaagggggtaagaaatttccagtgcaaaaaatatagcgcgggtggggtgtgcatgctataatgattaggattatagtgctgtcgtctggtttggggcggcggtggttggttttttgtttgaatgggaggtctggatatggcggagtctatgaaggattttgagagggagctggaggcttcttttaagaggatcgatgagggggatattatctcagggactgttgtgagtgtggatgagtcgggggttgttcttgaccttaagttttatgccgagggttttattccggtggaggagttttcccgggtgccggggtttaatattaaagaggctgttcagccgggggatgaggttcaggcgatggttcttcgcagggatgatggtcaggggaatattcttctttccagagcggatgctgcggatgtgcttgcctgggacaggctgaaggagcttcaggattcgggtgaggtgctggatgttgttgtgaaggggatcgttaacgggggtgctattgcttatgttgagggtgtccgtggttttattccggcatccaggcttgctttggagtttgttgaggatactgaggtgtttctgaataagccgatccaggtgcgggtgatcgaggttgataaggcgaagaagaggctggtgctttcggcgagggagattcttcgtgagagggctgaggtggagaaacggaataagatttccaatatccaggttggttttgtgacggagggtacggttgagagtttgcagccgtatggtgcgtttgtggagcttgggaacggggtttccgggctggtgcatatttctcagatctgtgagaagaggatacggaagccttctgaggttttgagtgttggggataaggttaaggtgaaggttatcgcgatcaaggatggtaagctgagcctgagtattaaagaggcatcggatctgatggctaaggaggttgaggaggagtcttttgagcttccagagtcgggggaggaggctactacttccctgggtgctttgtttgcaaatattaaattatgattattttggatgaaaaaggatggatgtgtatgaaaaaaccggagagaatatttgtaatcggacataagaatccggatacggattccatctgttcggctattgcttatgcggatattaagaacagaactacgcagaataaaaaatatatcccgaagagagcggggcagatcaatgaggagaccaggtatgtgctgaaccgttttggcgtacagccgccggcttatctggggaatatcggtacgcaggtcaaggatatggatatccggaccagtccgcaggcggataagaatatgtcgctgaagaatacctgggatctgatgcaggagaacgggatcgtttctcttccaatccgggataaggatgggtgtctggaggggcttgtgacgattggtgatatcgcaaagacctatatggatacgacagacagttatcttctttccaatgcgaggacgcagtatcagagaattgccgagactgttggcggtgaagtggtggaaggtaacggacacggatattttgtgaaggggcgtgtgcttgtcggtactgccaacccgaagatgctggagggctacgttgaggaggatgatatgatcatcatgggtgaccgtgaggaggatcatcttcaggcgatcagccagaatgtcagctgtatcatcgtggggctgaatatcgtggtttccgagaaggttataaagcttgctcatgagaagaatatcgtgatcatccggtctccgtatgatacgtttaatattgcgcgtctgatcaaccagagtattccggtcagctttgttatgaagcgggataacatggttacgtttaataccgaggattttacggatgatatccaggatgttatgatcaaaaaccgtcacagggcgtttccggtgatcaatcctcatggtaagtgtatcggtacgatctccagacgtaattttctggatatgcataaaaagaaagtggttcttgtggatcataatgaggtggatcaggctgttgataatatcgagaaggcggagatccttgagatcattgatcatcataagctgggtaccttgcagaccatgacgccggttgcttttcgtaatgagccggtgggatgtacgggcacgatcctttatgagatctacggagagcagagactggagatcccggaaaagatcgcggggcttctctgtgcggctatcatttccgatacattgatgttccgttcaccgacctgtacgcagacggataagatcgctgccagtgctcttgcgctgatcgcggggatcaagatcgaggagtttgcccgagagatgttttctgcgggaagtaatctgaaggataagtctccggaggagattttttatcaggattacaagaagtttatcggtgagggtaatgtttcctttggtgtgggtcagatcagttccatggacagcgaggagcttaaggagatcaaggagaagctgatgccgtttatggtgagtgagtgtggccgtcatgatatcacgagagtttattttatgctgacgaatatcctggaggagtctacagagcttctgttttacggggagggcagccagcagatggcggagatcgcttttgagcggaaaccagatggagataccttcagtctgccgggtgtggtttccagaaagaagcagctgatcccggctatgatggaggctgctcagctgatgaacagcgattatgcataagaggtgacggaaaatggcgaaacagttatggaagccggggaacatgatctatccgctgccggctgtaatggtgagtgttaccgatggtgaggggaatgataatatcataacggttgcgtggacgggtacggtgtgtaccaatccggcgatggcttatatttctgtccgaccttcccgttattcctatgatatgatccggaaaacgggtgaatttgtgatcaatctgacaacggaggagctggcatttgcaacggatttctgcggggtccgttcgggacgtgatgtggacaagttccggaagctgaaccttacgaaagagaaagcgcagtttgtttctgcaccgatgatcggggaggctccggtttcgatcgagtgcagggtgcgtgaggtgaaggagctggggtctcatgacatgtttcttgcggatgtgcttgcggtccatgcggatgaagcttatatggataaaaacgataggtttcgtctcaatgatgcgggtcttctggtttattcccatggggagtatctggcgggtggtcggaaggtgggaaccttcggctacagcgtaaagaagaagcagcaaaagaagcagatgcagaagaagttggataagaaatcagacagggaagcagacagggaatcaaagaaggcagggatgtcagagaagttgaagacgtcggggaagccagggatgtcagggaagttgaagacgtcaggaaagccagggatgtcagggaagttgaagacgtcaggaaagccagggatgtcagggaagttgaagatgtcaggaaagccagggagagagaaaaggtaggttctcggagctgtaaggtttattgagatttggtggctgttatgctaaaatgaaaggatacagtatgaataatattacactgataggaatgcctggtgcggggaagagcagcatcggtgtcgtacttgcgaaggtacttggttaccagtttattgactcagatcttctgatccagaaggaggagaaaaggactctgagtgagatcattgcggatgagggtacagagggcttcaaggcgatcgagaatcgtgtgaatgcttcgatccaggtggagaatacggtgatcgctaccggtggaagtgtggtttactgcgatgaggctatgcagcatctgaagtctgagggtgttgtggtgtatcttaagatctcgctggagcttctttccaggcgtcttggtaatcttaagggacgtggagtcgtgctcaaggagggacagacgctggcgagtctttatgatgagcgtgttcctttgtatgagaaatatgcggacattgtggtggatgaagaggataaggatctggaggggagtctccaggttgtgcttgaggcactgaagaacaggggagataaggcgtaactgttggcttgtggaaacggtttgctggagtgtttcgggtcatgggttgtgacaggttttcgtcataaattgtttacaaatctgaaatatgtgttataatatacaactgacctaaaaaacggtattgcggaacgtttgttcctgcagtaaattcagagaaagtttctgctcatagaggagtaaataatagaggtgtgttatggaacagtatgtgattaaaggcggcaatcctctggttggagaagtggatattgcgggtgcgaagaatgcggcgcttgcgatattgtcagcagccattatgactgatgaaactatattgatcgagaatctgccagatgttagggacatcaatgttctgcttgaggcgatctccgagatcggggctcaggttgagcgtattgataagtctactgtaaagatcaacggttctactatcggcaatctcagcgtggattatgagtttatcaagaagatccgtgcttcttattatcttctgggtgctttgcttggtaagtataagcatgcggaggttccgcttccgggtggatgtaatatcggcagcaggccgatcgaccagcatttgaagggtttccgtgctcttggtgcggatgttgatatctgtcatggtgctattgttgccaaggcggagaatctgcatggcagccatattttcctggatgtggtttctgttggtgctactattaatattatgatggctgcttctatggcgactggtcgtacgatcattgagaatgctgcgagggagccgcatgttgttgatgtggcgaatttcctgaacagtatgggggcgaatatcaagggtgccggtacggatgtgatccgtatccgtggtgttgagacgcttcatcgtacggagtattcgatcattccggatcagatcgaggctggtacgtttatgtttgctgctgcggctactcgtggtgatgttactgttcgtaatgttattcctaagcatcttgaggctactacggctaagcttgaggagatcgggtgtgaggttgaggagtttgatgatgcggttcgtgtccgtgcgccgcatgtgcttcatcgtacgcatgtgaagacgttgccttatcctggttatcctacggatatgcaaccgcagatcgcggttactttggctttggctgagggtacgagtattgttactgagagtatttttgagaaccggtttaagtatgcggatgagctttcccggatgggtgccaatattaaggtggaggggaactctgctattattgatggtgtgaggaagcttacgggggcacgtgtgagtgcgccggatcttcgtgcgggggctgcgcttgttattgcggggctggctgctgagggtgttacggttgttgatgatattgtttatatccagcgtgggtatgagaattttgaggagaagctcaggagtcttggggctgagattgagagggtttccagtgagaaggagattcagaagtttcggctgcgtgttgggtgatgattgataacgattgatgataattggatatttgagttttgggagagttcctgggtgtttggacctgggggctctttttttgtgtgggggagggagggatgaatggagggacgaacggacagtctgccagcggggcggctgcatggtcgtgcctggtgcggtcgtttcgccgggtcatactaggcgtctgaggcgcctgtcgtgcagggcgccccataactcgccatgtacgctgatgcgtacctggctcagacagatggggcttactctgcgg

SEQ ID NO: 219 - DNA, 8565 bp, Unknown
  gut microbiota DNA sequence
ttttttatgtctttatatcaaaaacagaaatcaaagagaaattttaatggaaacagaaagtggaggaaaacaaaatgatgacaccatccaagtacaaacgtcagtattacatgccgccggtgaaatgtatgaaatgggcggagaaagaatatgtggataaggccccgatctggtgctctgtagaccttcgtgacggaaatcaggcacttgtgatcccgatgagtctggagcagaaagtggaatttttcaagcttcttgtaaaaatcggttttaaagagatcgaggttggatttccggctgcttctgagacagagtatgagtttctccgtacgctgatcgagcaggatctgatcccgaaggatgtaacgatccaggtgctgactcaggcaagagagcatatcatccgtaagacctttgaagctgttaaaggcgccccaaaagcgatcgttcatgtatacaattccacatccgtatctcagagagagcaggtattcaaaaaatcaaaagaggagatcctgaagatcgcagtagatggcgctgcacttctgaaaaagctggctgatgagacagaaggcaattttcagtttgagtacagcccggagagctttacgggaacagagccggagtatgcactggaggtgtgcaatgcggttctggatgtatggcagcccactgcagataacaaagcgatcatcaacctgcctgttacggttgagcattctatgccgcatgtgtatgcaagtcaggtggaatacatgtgtgataatctgaaataccgtgaaaacgtgatcgtttctcttcatccgcacaatgatcgtggatgtggcgttgcagactccgagatgggtcttcttgcaggtgctgaccgaattgagggaactttgttcggaaatggtgagcgtaccggtaatgtggatattgtaacgcttggtatgaatatgtattcccagggtgtggacccgaagattgatttttctgatatgccgcatatttgtgaggtttatgagaaatgtaccggaatgcagatctatgaaagaagtccatacagcggagctcttgtatttgctgcattttccggatctcatcaggatgccatcgcaaagggtatgcactggagagagaacggagatctggagcactggactgttccgtatctgccgatcgatccgacagatgtgggaagaaactacgacgcagatgttatccgtatcaacagccagtccggaaagggcggtgtaggctatatactggagacaaagtttggcctgaaccttcctccgaaaatgcgcgaggctatgggctatgcagccaaagcagtgtccgatcacaagcacaaagagcttcatccggacgagatcttcagtctgttcaaatctaccttcgaaaatgtggttgaaccatacagcatcagtgaggttcatttccagcagaaggaagacggcatcgtaacacgggttacttctacattccgtggaaaaaccatcgttacagaggcttccggaaatggtcgtctggatgcggtaagcaatgcactgaagaaagcttacgaactgaaatacacactggagacttatcaggagcatgctctggagcagagttcttcctccaaggctatcgcttatgtgggaatccgtaaaccggatggaacgcttgcctggggagcgggtgttgatcaggatatcatccgtgcctctattgatgcactggtaactgcgatcaacaatcgataagcatccggttccggataggtttacaaaaaatgagaagctgccataaaacgcagcttctttttttgccgtgcagatgctataatagtgcggaatgtgaaaataacagtgagtaagagggatattatgaaaaataagaaaaaaaacagaagctcatacagcctgtctgcagagctgaaaaatactctgaaatatctgctgatatggggaatgatcctgatcttttccgcatatctgcttagtgattcggagatcctcggaaatgtaaagcagcaggcaagaccggatacctggtctatgatcggtgcgggaggaagctttgaagaggagtttacctgcaaaacgaaccgtctgtccggtgtggagctttttctttctacagagagtgcatcggttgctggaacgtttcaggtaacgctgtatcagaatgaaagggagatccagagctggcaggccagcagactgaccatatcgtcgggggataccacgtatttccggcttgaccagaagcttacggaatgtaaggggcagaaattccggatcgttttagatggcgcaaaaggggataccggagtggcagcagggttggtgagccagaaggatgatacacagacacttgcctatcggatcatttccaggccatttccaaaatcactggtgtttctggtgattggagcggcggcagctgtgatgctggtgatctttgcatttctgaaacgcagacagctccgggcagaagtggtgtttgtcgttgtttatatttttatgagtatctgtacgctggcggcggttccggcctttaattcgccggatgagtacagccattatctgagaagctatgaggtttccagaggatatctgacgtcggaaggcaacggaggaaacgacttattctcatatggaaggacgtttaacagtggtctggttccggaattttccgccaaggatcatgtatcattatgggatatcggagagaatgcagaccagcgtatcgaccgggaaaaaacacagttttacggatttggaaatacagccttgtatgcacctacttcgtatcttccccaggcagtagggatccgcattgcagatctgtttacggaccggccgatggttcttgcctatgcgggaaggatcgccaatatgcttatgtttggactgttctttttctttgccattcgtctgacgcctgttgggaaaaatttcctcgtacttctgggactggtacctgtgaatatccagtcagcaaattccatgtcagcagatgccctggccttggctctgacggttgctctggctgcctttgtactggctatgcgatataaacaaaaagaagtgatgagtagaagacagctgatatggatgtacgtgctggccggattcctgtgtctttgcaaagtggtttacatgccgttttgcctgctcctgttcctgatcccaaaagaacggtttaaaagcagaaaaaattactggtttcatgtggtctgcgcaggaaccgtgatcctgatcttaagtttcggctggctggccattgcgtcccgatatctctgtgagtcacagccgggtgtggatacagctgcacagcttgtggggatcctgaaggatccggctgcctttgtcctgacttttgtgcggagcctggataattttggtgtgacctatcttacagaaatgataggaagtaatcttggatggctgaacattcctgtctgtgccctgctggcaatgggatatcttctggtcctggtccttcaggtttccgggaatgatgatatgtcgggaatccgtctggatcttccggtaaagagcattctgggaggagtcagtctcctggtatttgcgctgatctttgtaacgttatacggacagtggacagcctatggctacgataagatcctgggcgtgcagggacggtattttctgccgcttctttttccactgatccttgcgctgaagcccaaacggtttgccgaaggagccggggaaacaccatggggactgtttctgggagcctggagtatcgatctgtgtgtttatgcgacacttttcgtgcaggccctgtgccgttttgcataaggtgtcggatctggtcgagcaaaaatccttgactgactgaaaacaaaatattataatcaaatctgtaaataacagaggaaaaaactgttctgaaaaaggataaacaggcagatagaagtacgatttccggaaagtgggtgtacaacattggacggagatggagacgctatctgccttttttctgaaatgaaatagggtatgagtgtggataactctgcgattttatgtggattttatgtggaatacatgtggataaggtgtggataaaacacaaataccgccgttgaagcgttaaatacgggaaaaagcttgacatattcaatattattaaatataattttcccatacattacaaaaatgttacaaacatgtaaaggaaatcgtaatgatccgtatttatccgggaagcgatgataatgggggctgtgatatcgcatcggaggattatgggctgttacagaaaatgaaacgcaaggaatgagattatgaaagttgagaaagatttacgcgaggctgacggagtgcaggatgaacgtagaaatggaaaaaccggaggaaattccgcgcgcagttttgcagtgctgacattatgtgcagttttggcgatggttatttctctggggacaaggacatttgcagaaagtgagggaggcagggtttatgcagcttcagatggaggagagagctctccctatgaagaggttgctgttcctaccgggatcgcaggtgtggtttcaggagttacggatacaccattatccggaagcacggttacaaggatcggaagttcctgtgagcaggtgatcgtaggccagagagtacagaaagtaaccaatactgctgcagatcttaatgtaagctcctctatggaaaacaaagtaaatgaacttgatgcaaggtcgatcacactggcagaaaatcccacactgatgtcagatgaagattatgatacacttctgaggatcgttgaggcagaagcaggaagtgaagatatcaagggccgtgttctggtggctaacgtcatcatgaaccgtgtaaaaagcgaagattttccgaatacggtgacagaggttgtctgggataacagtgacggcgttccgcagttttcaccgacctatgatggcaggatcaatgaagttgcagtttccgatgaaacaagggaagcggtcaagcaggcgctgaagggtactgattattctgaaggtgcactgttctttatccagaaatctgcagcagaggaacataatgtgaaatggtttgaaaaggacctgaagaggctctttaaatacggggtccatgaattttatacatataaataggaagaactgatgcagtacagaaggaaccaaccgccggcagaaacagaccggcggtttctttttatccgaaagctgtgaatatctgtctgattacagggtgggattgggcaagacagattcttttttaaaagtggtggcattttccataattccatgctataatgtgataacgttgaaaagaaaacgaatatcttacaatagaaaggcggaacaccaatgcaggtattgtacaagagcaccagaggaaaagagcaggcagttacagcgtctatggccatacttaagggcctttctgaggacggcggactgttcgtgcctgaaagcattccacagctggatgtaccaatggacaagctggcacagatgacctaccaggagacagcatatgaggtaatgagccgtttccttacagattttaccgaggatgagcttaagaactgtatcaacaaagcatacgacggcaaatttgatacagaaaagatcgcgcctcttcatgaagcggatggggcatatttcctggaactgttccatggcgcgaccattgcatttaaggatatggcactttccattcttccgcatctgatgacaactgcagcgaagaagaataatgttaagaatgagatcgtgatccttaccgcaacatcaggagataccggtaaagctgccatggcaggctttgcagatgtgccgggaacgaagatcattgtattttatccgaagcatggtgtcagcccaatccaggagaaacagatggtaacgcagaagggtgccaacacttatgtggtaggtattaccggcaactttgatgatgcccagactgcagttaagaagatgttcaatgatcacgagctggcagcagagctggatcaggcaggcttccagttttcttctgcaaactctatcaacatcggacgtcttgttcctcagatcgtgtattatgtatatgcctacgcatcactggtacgtgacggcaggatcaaagacggacaggagatcaatgtggtagttcctaccggaaacttcggaaatatccttgctgcatactatgcgaagcagatgggactcccaatccacaagctgatctgtgcatccaatgagaaccgtgttctctatgatttcttccgcacaggaacctatgacagaaagagagatttcatccttacgacatctccttccatggatatcctgatctccagcaatctggaaagactgatctatcgtcttaccggagaaaatgctgaaaaatgtgctgagcttatgaaatccttaagtgagggcggcgaatataccattactgacgagatgaaagcacagcttggtgatttttatggtaatttctgcagtgaagatgagactgcacaggccatcagtgatatttacaaaaacagcaattatgtgatcgatacgcatactgcagttgcagccggcgtatataagaagtatgtaagtgagacagcggatcatcttccgacagtgatcgcctctactgcaagtccgtataaattcacaagaagtgttatggaagcacttggtgaggagcataaagatctggatgattttggccttgtagacgcattaagtgcgctttccggagtacctgttccacgtgcagttgaagaaatccgtactgccccggttcttcatgacagggtggtagatgcagtggatatgccggcagcagtaaaggatatccttaagatcaaataataattgataataaaatcagtaagaaaatgtattttctgttgaaaaagcacaaatactggtttataataaaaacaacgaaaaccgaatcctggaatgttcgatcccccttttctttttgaacctacattgacattttgggaatccaaaatcgcaggttggatgtcagacctcacgtcgtggtaggcagaagacactgttgaggatacccacctagcatctgctaggcgtcaaaaataagggaacggcatcccgggattaatcggttaaagacatagagccggttaatggctcttttttcatatatgggaggaattacagcatgagtgtttctgaaaggaaatttgggacacttcctacaggggaagaagtaaagatctatcatcttgagaataaaaaaggtgcctatgctgaagtgcttcagtatggtgcgatcctggtgaagatgtgtgttccggataagaagggagatctgaaggatgtggtccttggatatgacgatatccggggatatgagattaatggatgctttttcggtgcgatcattggaagaagtggaaaccgtatcgagaattccagattttttattgacgataaagaagtggttcttgcagagaatgagaatcataacaatcttcacagcggtccggatggctttgagaaaaagctgtgggaagtaaaagaaatttcccaggagaagaacagcgtggatttcttccgcatcagtccggatggagagaacggatttccgggagaattttccattgttgtgaaatatgaattcacagaggaaaacgaactgaagattttttacagaggacgctctgatgcagctaccgttgccaatatgaccaaccattcttattttaatctgaacggagaaggcagcggagatgtgcttgaccaggaagtatgtattcatgcgaagtattttactccggtaaaagacagccagtccattcctaccggtgaatatgcaccggtggcgggaacgccgatggatttcaatgtttccaaaccgatcggcagagacattgaggcggactttgaacagctgaagtttacaggcggttatgaccataactatgtaaccgataattatgcaaagggcaatgtccgttcgatcgctactgcatactgcagggaatccggtatcggtatggaggtttcctccgattgcccgtgtgtgcagttctatgcaggcaattttgttaaggatgagaagggaaagaacggtcatgtttatcatgaacgttatggattctgcctggagacacaggtggagccaaatgcagtcaatgtagaggatttccattctccgatcctgcttcccggtgaagagtacagctctgaaacggtttaccgtttctttgtgaaataacagacaaacagaattaaaagaggtgcgagaaggcaatgcagatacgtgtggcagaagagaaggatgcagcaacacttttggaaatttattcctactacgtagaaaaaactgcgatcacatttgaatatgaaacaccttccatagaagagtttacgcatcggatccatgatataaaggcgaaatatccgtatattgtggcagaagagaacggagagatcctgggatatgcttatggttctgcgtttcatccgagggctgcttatggctggtgtgcggaaatgtccatttatgtgaggcatgaccggcggggcagcggtgcaggaggcagactctatcgagccctggagagtcttcttgcaga

SEQ ID NO: 220 - DNA, 6594 bp, Unknown
  gut microbiota DNA sequence
agtccgggatgtacatgaacaatggaatgcagcagcctgggatgcagatgaacaacggaatgcagcaacccgggatgcagatgaacaacggaatgcagcagcccggcggtttgtggaaatgtcagtgcggtgcagagaataccggaaggttctgcgaatactgtggccagccaagaccattttgagtgatgatagacagagtggacagaattgttcactctgtttgtgataacaggggttgagaatggatggtttctctgaaaactatataataaaatatagctttatagtatacttatcacagaggtgtattaatgagagaggaattttcatgacatacaataaaaaaagggcactgtcgtatggaggaatcctgataagtgtatttctggcgtatttctgcaggctggtaagaccggaaaatgtttttatgagaaatctcgcagatcagtgtcgtaactgtatttatctgggaatgtattgtgcctgggtgatctatctggaaaagcatgtagtgcatagaaaaacgcgcagatgtctgactgcaattggctgtctgatggtattctggttttttgtgcggacagtaaaatttcatatttttcatgatccgcttggagaacatatctgctggtatctgtattatatcccgatgatcctgatcccggtccttggactggcagcagcgatgtttctaggagaaaaggatggagagaaaacagtcagaaaaattattgccttgcttgcttttgcggtggttttgatcatcagtgtttttacaaatgatctgcatcagctggtgtttcggttttccgggcggccgccgctttcagatagagattacagctatggtattctttttgtagtgatccagggatggatcatattttgcctgatatggatggaaattatactgatcagaaaaagcaggattccgggaagaaagcaattctggctgccggttattccgggaatattgctgctgggatggaatatcgggaatttactccgtctgcccctgatcaaaacaattgccggggatatgacagcagtatgctgccttttaatggcggcaatttatcaggggtgtatattatgcggcctgatacagacgaacaatcgatattttgaattattccagacctccggaggactggatgcagagattacggatgattcttttcagcgttattatcattccggtgattttccggagctgtcaccggaactgcgtaaaattgtaataaacagatcagctgtacaggaacagggaatccggatcaaccatattcctataagaggaggacatttgttctggtcagaagatatttcggtgcttctggatcagtatcaggatatcagggaacagcaggaggagctgactgccagaaatcgtctgctgcagaaaacctatcagaaagaggctgagcggagaaaaacagaagaacagaaccggctgctgaacatgatacagaatcagacagctgggcagctggaattgctgtcacagctgatggatgagctggaaagaacggagtcaagggaacactatgaccggatcctgggaaagatcgtggttgttggtacatatttaaagagaagaaaaaatctggtattgacacaatatgcatcagatggaaatcagcttacaatggaggatctcagacagagtcttgcggaatcctgtgacagcttaaaattatgtaagatccgggcggcttattatgtcgaaaatggtgaagtgcagctgaatgcagatgatatactaaaatgctatgatacctttgaatggcttgtggaacgattgtttgatacaatgcagtctgttttttaccgcgtgtcgcagatcgatgatgctctgcggatttcagttcatattgtagcagaagcagatcttcggggattaatgtcagaaagaccggaattaaatgtgcagcaggaagatgaaaacgaatggtttatcggatgtatcgtattcagaaagagaggcggaagatgactgattttgcggaatgcagtatggtaatgcaggattttctgatgatccttcttgaaatctgcctgattctggaattgatccttttgttgatcaggataacctgtttttacgggaaaaagaaaattataacagcagtgactgtttttgcagtttcttttatgcttatggggttcctgatgaatgatcacagatattgccagggggaaagcgcatatcagctaatgctccggatgtgtccggtcagtgttttgatggcagcgatggtggtattgttgctttatctttgctgggcaatctggagagagagatgcagatatcatcattctctgtcttactggtctgtgaatgaagctgttgatgatgttccctgtggggtgtgtttttcggatcctcttggaaggatcgttttatgcaacaccaagatgcatgaactgagcaggataatgacaggctcctatctgcaggattatgaggcattgcggaaagtaataaatggaggatccgaagcagagggacttcgcagattaaacagtgacagtaacgtattttattttccggatgattccgtctggatgtttcaggaatatcgtctgcaggagccggattgtgcaggatatctgcagacagtggcagttaatgtatcagaaatttattacaatggtgaaaagatcagagcaaataatgaaaagttggaaatcctgaatcataagctggaggaaatgtatgaaaaaatcggagataaaataagagagcaggagacacttgccatgaaaatgcaggttcatgacaattttggccgaagccttctgtcaatacgcaggatattggaaagaaaagaaaatcaggataaaatggatgaacagctatctgcactaaagcatctggtctatattcttacagattcttctgttgagaatatggaagaattatgcgcggatacgatcaggcatgcagaagagcttggaatttatgttcagatcagcgggaatttccctcagcatccctcctacaggctgctgacagacagggcgatccgtgaatgtgtgacaaattgtgccagacatgcccatggaagtacagttctggtgaagatagaaaaaggtgcaaatgaatacagcatccggataacgaatgatggagatgcacctgaaaaaaatgcagaagaaggtggtggtctgtctgcactgagaaaagctgcggagtcagagaaatgtattatgcaggtttctttttcgccggagttttgtctggtgttgaaaatgccactgacagaaaggatgggagtctatggtacggatactgatagtagaagatcagaggatcatgcagaagtattttgaaagtattattatgcgggaaccggaattccgacatgtccagacagtttcggatgcctgtgaagctgtaaagatctgctcttattcggcaattgatcttgtgcttatggatgtgcagacatttcataatcatgatgggctgagtgccggaaagatcatcagggaaaaatatccatatacaaaggtattggttgttacttcgctgatcgatcccaaggtgctggaaagagcaaagagcggatgtgcagacagtctatggtataaggatcacggtgaagaggaaatacggagtgtgatctacagaacgttaaatggggagcatgtatttccggatgtggcaccggaggtggaacttaactggatcacaagcggtgatatcagtcccagacagctggagatgctgcgcctgtatattcacgggatgtcatattccgagatcgcaaggaaaatggactgttctgcttctggggtgagatggaattttcaggaaatgatcgccaaggcgggatacagctgcaaagaggatctgatagcagctgcactggaaagtaaactgatcgtaaccacactgaaatagaagatccacagaatgcagaaacatattcggacagagggagtttggcgtgagctgacggagcattcacaaatatagcataagattttgaataataggaaagaggaaacagacatgagcgattttttgacagaaaaaaataaaaaaacaggaatactggggaaactgaaatgggttctttgtggcttttttatacttttttccctgggagctattggcgcatcggagaagtatatcggtgaagggcgctggggaatggcagcaacagagatcatacttggattgctgtttctatatccaaccttccgggaaattcaaaaagcattaaagaagaaaaaagccggagaaatcgcctgctggtttgaatcctatgcccagaataccgtctcatttgaaaagcttgagcaggaactgggaaaaggtgcagtgaaaaagctggaaaaatttattgcggggggatatatccggaatatccagatagacagagaaggaaattatattatgatcactgcaccgaacagacgcgtaaatgagaagatctatattacagttacctgccccagctgcggtgcaaagaatcaggtaataaaaggtcgtctgagcacctgtgaatattgcggacagcgtcttaccccatgacaaaagacacctttcggatctgccctgttaaagataaaatctttgtgcaatatgttcaatgcataaaaaggatattttataaacaaaattatataagttgcatataactaacgcatgcagcataacagaagttgtacaaatatctgtacatccatagacgattggaatgaaatcatagaataaatttataaaaatagctaataaaactggataatatgttcaaattatggtacatttattgtagcggtcagaggaaatactgcggcctttttgtggaccaggattttcgaagggctgaacaaataacaaagaacttatttatttggttttattgtttctttcctgggagtgcagagaaggagggaacggataagagcagataatcataaggatataatctttataaggaaggtgagcaattggaaaactatactaagtacaagctgaaaagcagtgatgagcttgcatcagtgctgaacggcagggacaatctgtttgtaatcgcctgtaacaagtgtttcaaggaatttgagaccgttgacgaaccggattgcgaggaattcctgaaatttgctgcggagcagggaaaaaccgtcacaggcagtgcgaaattcgattttctgtgtaacaagatgcacacagaaagaaaattacaggatctgcttccggaaggtacagagaatgtagttgtgatctcctgtggtcttggtatccagactgttgcagatctggccggtaagccggtgatcgcagcaagtaatacccttaactacagaggccatcacggcatggcacttaccaaaaagagctgtgatgcatgtgcacagtgctatctgaacattaccggaggtgtctgtcctatcgtcgactgttccaagagtcttgtgaacggacagtgcggcggagcaaagaacgggaaatgtgaagtggatcctaacaaggactgcgcatgggagaagatctaccagagactggcaaaacaaggtcgtctggaagagttcctgaaccagccggtacaggtacgtgattactccaaggttaactttaaggtgatcaatgattacgtgaagtctatcagagaggacagactgaacggatactatggtggcgttcatccgtcagagcacaaggaattcagcgagcatatcgatctgaagaaattcccggatccgaagacggttgtgatctccatgtcccagcatcttggtgcacctgccaacccgatcgtggaagtaggcgacacagtaaaggttggacagaagatcggagaagctgccggatttatcagcgcaccggtacattccagtgtaagcggaaccgtagttgctgttgagccacgtatgcatggtacaagaggcagtgaggtgatggcagttgtcatcgaatccgacggaaaaaatactctgcacgaatccgtacagccacataaagccctggacgaacttacaccggatgagatcattgagattgtaaaagaagcaggaatcgttggtatgggtggtgcaggcttcccgacctgtgtcaaactgaaaccagccaaaccagttgataccattctactcaatggatgcgaatgtgagccatatttaacagcagaccacaaggttctccttgagtttgcagatgacattatttttggtctgaaagcgatcctgaagacaacaggtgccgagaagggtatcattgtcattgaggataacaagcaggatgccatcgaattaatgcaggaaaaagttgccaatatcggaaacatggaagtatttgtcgcaagaaccaaatacccgcagggcgctgagaagactctcatcaagcgcgttatgggcagaaaagttccaagcggcggtctcccggcagatgttggcgttatcgtagataatatcagtaccgtaaaagcgatctccgatgcaatccagaagggtatgcctctgatcgagcgtgttacaacaataacaggcgagaagatcaagaatcctggcaactttatcatcaagatcggtaccagcgtaaaagagctgatcgattactgcggcggatttacagatgac

SEQ ID NO: 221 - DNA, 18085 bp, Unknown
  gut microbiota DNA sequence
tgatttcggaatacggatctttttcagcttaaggcaatcatgaaacgcccaatcttcgatcttcgtcagtccctcatgtaaggtcacactggtcagcccggtattgcaaaatgtgtcatacttgctatcatatcatataaacacgatatattctatccggatttcttttttacagatatttttaggtagcaaaaaaacctgcatccgtttccagatgcaggtttcctaaataaaaaatgcggaagatgggacttgaacccacacgagcgcaatgctcacaagatccttagtcttgctcgtctgccagttccgacacttccgcatatcgcatttctttgggattttttattctctccctcgcgacaagtgatagtatagcaaagtgctttttgtatgtcaacagttttttctaaaaaaatccaaaaatattttttgtttatacaattaatacatttcgttcaataccaatctgagacagctaatttttcatcccagaatttatactacgacaccggttacgcctcagtcgtaaaaagagcagcctcttcaaaaaggccgcccttctgtctcacttctgtttttttctatatggatcagtcaaaaatgatcagtgccatgaacacaagatctgtgtcgcctgtatttgtaagaccatgtccttttccatccggtgtgatagtgatgtcgccggcctttaccgggcgtttcacaccgttatcgtcgtactcgccttcaccacttaagatatagtaggtttctgtctcgccatgatgctcatggtatcccagagaacatcctttttcgatggtaacctgtgcgtaaagtccgcattttcccttcagctcgtctccctcaagaatgtctttgatgatcacatggcctttaccgccgcacatattttctactcttctgatacccatgataaaatcccctttcgtgattgcgtaaatttgtgaaattttatgaacacaggctttctgcggcctgcgccctacttcctgtacaattataaatgatatgataaattttcgcaatccttattgttattttcacaaattaacttacaggcaaattttccccactgtttattgcttttcacacccctgccgggagcttctattcgcaattgaagcaggacacttctttgattcagttaaaaaacgaagcagctcttttccaaagacctgctccgcaatttatacctatattacagatttttaattctctcaattgcctcaagtgtattctcatagcttccgaatgcagtcagacggaaatatccctcgccatgtgcaccaaagcctgaacctggtgttcctacgatgtgtgctttctcaaggagataatcaaagaactcccaggaggtcatctgatccggtgttttcagccagatgtatggagcattttttccaccggacacagaaaatcctgctgcagaaaggccctcgaggatcgtctttgcattacgcatgtaataagcgatctgctccttcagctgtgcttttccctccggagagtaaacagcctcgcctgctctctgtacaatgtacggagcaccgttaaacttggttccgtggcgtcttgcccagagactgtgaagctctacgccatcacacaccagttccttcggaacaacagtaaatccaagacgaacgcctgtaaagccagcatttttggaaaagcttcgaagctcgatggcacaggttctcgcaccctcgcactcataaatgctgtgcgggacatcctcctcggaaatatatgcctcatatgctgcatcatagatgatcacgcagccgtttttgttggcgtagtcgacccactcctgaagagctgcctttgtgatagcaccgccggtaggattgttcgggaagcagagatagatcagatccggtacttcatctgccggtatctccggaaggaaaccattctcctctttgcagggcatgtagatcacaccgtcaaagttctcacgctctttgttataaagaccagtacgtccggccataacgttggtatctacatatacaggataaaccggatcgcagactgcaaccttattatccagtccaaagatctcctggatgtttccggaatcactttttgctccatcggaaacaaagatctcgtccgcgctgatgttgcagcctctagactgataatcattttttgcaatggcacttcttaagaattcatacccgagatccggagcatatccgtggaaggtttctgcgtgtgccatctcgtctacggatttatgaagggcatcgatgatcgccggtgcaaggggctgtgtcacatcaccgattccaagactgatcacagaatccttaaattccggattggcctccttatatgcgcttaccttctttgcgatattggaaaacagatagcttcccggaagttttaaataattctgatttactgtaaccatagtattttatctccttctctcaatttcctctgccagtgcttttctgacgctgtcaggatttgccttgcctttcaattctctcatcagctgtcctacgaaaaatcccataaccttatccttgccgcccagaagctctgccagcggtccagggtttgcatctacgatctttttcacagtttcggtgagaagtcctgtatcttctacgatcttaagaccattctcttctatatatacaaccggatcaatatcctcgtcaaacactttttcaaatactttcttggcattctgtgcgctgacctcttttttctccaccatggaaagaaggtctgccagatgcttcggggtaaagcttaccctttccggatcaaggcccttgtcctttgtcaggcggagaacctccaccataaaccagtttgccacctttttcgggtttccgagaagaactgctgtctcctcaaaaagtcctgccagatgtctggattcggtcaggatccctgcatcataaaccggaagctcatactccttctgataacgctccatcttggcttcacgaagctccggaatggaagtacgtagctcttcgatccatgcatcggaaatgtggatcggcggaagatccgggtccgggaagtaacggtaatcctttgcatcctccttggaacgcatagcatgagaagactctttgttatcgtcccatcttcttgtctcctgtacaacagctcttccttcttccagaagctcgatctgacgttctctctctccttcgatcgctctcgcaatggccttaaaggagttcaggttcttcatctctgttcttgttccgaaggtctcacttcccacctcacggacggaaaggttgacatcggcacgcatggagccctcctggagcttacagtcagaaactccaagatactgcatggtgcagcggagcttttccagatatgcgataacctcctcggagcttctcatatccggctcggatacaatctcgatcagcggtaccccgcttcggttgtaatcaaccagggagcagtcctcccactcatcatggatcagcttaccggcatcctcctccatatgcatctcatggatacgtacggtctttttgcctgcggaagtctcgatctcaacagctccgtcatagcagatcggcagatacagctgagagatctggtagttctgggggttatccgggtaaaaatagttcttacggtcaaacttacagtactgatggatatgacagtttgccgcaagacctgccttgatggcaaactctaccacttttttgttgaggaccggaagagagcccggcataccggtgcagaccgggcaggtatgtgtatttggtgcgcctccgaattctgtggagcatccgcagaagatctttgtttttgtggcaagctccacatgcacctcaagtcctatgactgtctcatactgtttcatgccttttctcccccttccattgctgttccgaaatcaccgcgttttttctcataggcgtgtgctgcgcggaacaggttgttttctttgaagcagtcaccgatcatctggatcccgatcggaaggcctgctacgtcttttccgcatggaacggtgattccgggaagtccgcacaggtttactgctaccgtataaatatcgccaagatacatggcaagaggatctttcaggctctctcccagcttcggcgccgtaaagggtgatgccggggcaagaagaacatcatatttggaaaaggcctgatcaaattcctttttgataagggcttttgtgcgaagtgctttcagatagtaagcatcgtagtaaccagagcttaacacaaaggagccaagcatgatacggcgctttacttcctcgccgaaaccttcagtccttgtcttcttgtacatatcatgaagtccctcgtactcttttgcacggaagccgtacttcacaccgtcaaagcgctccagattggagctggcctctgcgctggcaatgatgtagtaggcagggatcatatattctgttgtcttcatggagaaaaattctacgactgcacccatctcggtaaggcttttcagcgtattcataaaggcctcttttacctccgggttcagaccctcggaaagatattccttcggcacaccgaatttcattcccacgatcttatctgtcatggaagcggagaaatcaagatcctctctcttcatggaggtgctgtccttggcatcgtgtccggcaatgatctcaagaagtgcagcacagtctgcaacatcctttcctaccggcccgatctggtccagagaggatgcgtaggcaaccagtccgtaacgggatactgtaccataggtcggtttgattccggtaacaccgcagtaggaacttggctgacgaatggaaccgccagtatcggagccaagtgccaggtaagtctctcctgctgccactgccgcacaggagccgccggaggagccgcccggaacatgctccagatcccacgggtttctggtgacgccgtaagcggatgtctctgtggtacttcccatggcgaactcatccatgtttgtctttccgatgatcacaagacctgcctgttccagacggtcaataacctcggcattgtactgcggcacaaaattctcaaggatctttgatgcacaggtagttgtttttcccttaatgcagatattatccttaattgcaataggtacaccggcaagaggtcctgtataggttccatcctcaatgcccttctgtaccttttttgctcttgcataggcttcttttttgtaagtatcaagataagcgtggaccttgtcctcttttgcttcgatctgatcaaatacgtatttcacaccgtccaggacgcttatctgatgctgcttgatcttttccgcaagctgtaatgcggttaattttcccaaatccatgtcctgtctcctgtcttatccaattgttttcggaacctgatactggttttctttctgtttcggtgcattggcaagcatcgcctcatgattgtctccgtttgtcacaatatcttcacggaatacattttcgtcctcaaaaatatgggacatgggctctacggaagaagtgtcaagttcatccagcttgtctacatagtccagcatcttctgcatgtcctcttttgctttttccttttcatcctctgtcagagaaagcttcgcaaggatgcagacattttccattgtttcatcatcgattatctttgccatcttttttctccttattacggctcaagtctgttcatatcacgtgggaacagacaggtctcacgaacgttttcttctccgaggatctgcatggtaagacgttccagtccgattccaagtcctccatgaggcggcattccatgcttgaaggtatccagatactgctccataccctcttcatccataccacgggctgcgatcttatccttcagcatctgataatcatggatacgctgtccgcctgttgtcacctcaagtcctttgaacagaaggtcaaagcttaatgtaaatttctcatctgacggatcatccattgcgtagaacggacgcttcttagacggataatgtgtgacaaaaacaaaatcagcatcatattcttctttgaaatatcttccgatcagcgcttcttcctccggctccagatcatatgggttgcggatcttacgattatatttttcagctaccagctctttggccttgtcaaaacgtactgccgggatcttgtccaccttcggaagctccaccttcagaatggaaagctcatgagcatagtctttcttaagaagttctaccgcatactggagaaatccggtttccatctccatgatatcctcaaatccgttgatatagcccatctcaaaatcaaggcttgtatattcgttcagatgacgttttgtattatgcttctctgcacggaatacagggccggtctcaaatacacggtcaaaaacacctaccatcatctgtttataaaactgcgggctctgtgccagaactgccggtttatggaaataactcagcttgaacaggtttgcaccaccctctgcacctctggctccgatcttcggtgtgtggatctcggtgaaccccttctcatagaggtaatcacgaaatgcccgcaccagagcctcctggatcttgaattttgcacgctcctgcacattacgcagggcgataggacgataattcagctttgcctccagggaagtgttcagcttccatttgtcgatggccagcggaagaggctctgcaggtgaggaaaggatctccacatggctgatgcggagttctcttccgtgaggcgctctttcttcctcatgaagagttcctgtgaggcgcacacacattgcctccttcagatcatgaatggaaacatttgtcttgtcgttttcatatacggtctgaaaaagcccttctttttttcgaagtatcacaaatgccacgtcacccatattacggatgctgtgtattgcaccttccactgttgcttcctggtctttcatgctctcagaaagaagcacatcccaggcacattctctagtcttacagattccatccataaattccattccctcatcctccaattcaaagtagtttcaccgaatcaggaaatcccctgtggaattttccccgatccggtgtgatatcaggcattcagagcagatcatttctgtccgctctgctgttttttgttgttttttacacagaatcatataaaagcatcagaaccatctgggccgtctccaccatattggtcccggaatccatactgcatttctggatatagcggtatgcgtcatcctcgctcaggtgatttctttccattagaagcatctttgcatttgaaatataattctgttctttccatgaacgctgcttcggctttttcttatcttttttccagcgcctttcgatctgagagatcatcatgctcaccgtatttaccagatctccggccttcagaggcattcccacacataaaacggaggttggcgcctcactgatcactccccgggaggccataagcagcatttcaaaataatccggcatatagtccagaagatcacggtagtacatatcctgaagatgataaccgcaaagcagaacgccgccatcaagctccgagatactggcaagggcattggcacctgaattgcatactgccgccaccgtgaatccatatcggttaaggactgtgcgaatcttttttgcatcttctattttcggtaatgcaatcacgatactcgtgttcataagccgccactctctttcgtcccattatgcctcgttcatcagatccgatacagatactcctcgatctcccagtcggaaatctcctgggaataacgcagccactcttttctcttggcctgcgcatactgtttgcagaaagcttctccaaggatttccttcatccagctgctgtcctcaaacagtgtgatcgcttcccgcaggttctccggtaaattctcgataccctgttccttctgatccgactcggaaagagaacggtcagaagcttttgtaggatagatcttcttctggattccatccaggcccgctgccaggcataccgcaaaaacaaggtatgggttggatgcagcatccgggcttcgaagctcgatcctggtatcagcaccattgactctcgggatccttaccagtgaattctggttatttctcgtccatgtcagctctgtaggcgcatcaaatccaggtacaagacgcttataagaatttacaagcggattggtgatcagagtcatctcacggctgtgagccagaagacctccgataaaatagtatgcctcttcacttaatctggacggatcctccggatccgcaaaaatattttttccatttttaaacagcgaaaaatggatatgcatggctgaaccgtttacttcccgtcttggcttcggcataaatgtcgcatgaagtccatgacgtttggctacagttcttactgccatcttaaaggttataacttcgtctgccatctcacgtgcttccccgtaatgaagggcgatctcatgctgtgcaggtgctgtctcatgatgagaggattccacctcaaatcccatatcctcaagagtcagtaccatgtcacgtcttgcattttcgcctaagtccaccggacttacgtccagatatccggccttttcgtgagaaaccgttgtaggcattccgttatcatcaatatgaaacaggaaaaactcgcattccgggtcaacataacaggtataccctgcctcctctgctgcctgtgctgtttttttcagaatatatctggagctcatctcatgctctgatccgtctgcacggcgcatatcacagatcaatcttgcaacctttccctgctgaggacgccatggaagaattgaaaaagtattataatccggatacaggatcagatccggctccttttctcccacaatgcccgcaatatgagagccatatacaacgcactggttatccagggctcttggaagctctcttgctgtgatcgcaatatttttcagagttccaaacatatctgtaaactggaggcggatgaactctacgtcttcctcctctgccattgcaagaatctcttctctggtataattccccatagtattctctcctttatttcctcatcacacaaaataattaccctcaaaatcagaaaaagggtgcacttcagagagcttccgctcctgaagaacacccttgttcatggacgtaattatagcaatcggtcaattctttgtcaaccattttttaaaaggggcaaaagttcaaaagctttatcgcggaaacacgaacagtttttttgaccttttgcccctggtatctgttattttactgtaaatatgaatagctcatcagtgattcgtccactgctttcgcagcctcacgtccctcatggatcgcccatacgacaagggactgtccacgatgcatatcacctgctgtgaacacacgatctacgcttgttgcatactgctccggttttgtttccacattagttcttggtgtaagcgctacacggaaggcatctgtcacatatttctcgctgccaaggaagccggctgcaataaggaccacatctgcagggatcacttcctcactgccctcaaccggtaccatattgaatcttccggtcttttcatcctttacgctcttcagttttacgatcttggccttgcagacatttccttttttgtccttgataaactcggtaacggttgtctgatagatccgaggatcatggccgaatactgcaatagcctcttcctggccataatcagttttcaggaccttcggccactccggccatggattggaaggagttcttgctgcaggaggctgcggcatcatctcaagctgtgttacagatttcgcccccagacggatggatgttcccacgcagtcattaccggtatcaccaccgccaatgaccagaacatttttgccctttgcaagctcatatgggaattttgcaaaatctgtatccagaagactttttgttacctgcttcaggaaatccactgcaaagtaaattcccttggcatctcttcccggaaccttgatatctctcggatgagaagctccacagcaaagaaggacacggtcataatccttcagaagctgttctgcagtgatgtcaacaccaacattgatattggtaacaaatttcacgccttcctcttccatcagcttcagtctgcggtcaatgatctttttctccagcttcatgttcggaatgccgtagcggagaagtcctccgatacggtcgtttctctcaaatacggttacgctgtggccacggcggttcagctgctgtgctgctgccagtccggaaggaccacttccgatgactgcgatcgtctttcctgtgcggacaggcgggatctgcggttttacccatccttctgcataggctgtctcaatgatcgctttctcattctcctttgtgctgaccggatctccgttcaggttacaggtacatgcagcttcgcaaagtgctggacacactctggatgtaaactccggaaagctgtgtgtcttgtttaaacgaaggaatgcctgcttccagtttcctgtgtacacaagatcatttgtctccggaaccaagttgtgaagcggacagccggaagccattccgccgatcatcatacctgcctgacagaagggaacgccgcaggccatgcagcgtgctccctgaagtttctgtttttctttatttaacggaatacgaaattcgttgaaattctgaatacgttcctttggcggcaaaacctttgccgtttctcttttataatctaaaaatccagttggctttcccatttcctcatcctccttaatgtttcacgccgatgctctcatagaacgcttccatctgtgcctgctggctggtcagacctttttcttccagctttgcacttaatgtgatcattctcttgtactcatccggaatgagttttttgaagtgaggcagataggaatcaaaatcagccagcaccttcttaccgatctcagagcctgttgcttccacatgagcctcgataagatcacgaagctcttttttatcatatttattctccactttttcaatggaaatcattgctttattgaggttcttgtaaagaacgttatccacatcaaggacataagcgataccgccgctcatacctgctgcaaagttctttcctgtttttccaagaactaccacacggccgcctgtcatgtactcgcagccatgctcgccaaccccctcaacaactgcaaccgcaccggagttacgtactgcaaaacgctcaccggcaacaccgttgataaatgcagttccgctggtcgcaccatagagtgccacgtttccgacgatgatgttctcttcagccttgtatccggccttctctggaaccttaacgatcagctttccaccggaaaggccttttccgaagtagtcgttgctgtcaccggtcagtttcaatgtcagtcctttcggaataaaggcaccgaagctctgtccacctgcacctgtacagtttacagttaccgtatcctccggaagtccatccttatgatttcttgtgatctcagatccgaggatggtaccaaatgcacggtctgtattggtaacatttacatcaacagaaactttctcacccttctggattgccggtgcacatttcttgaccagaactttttcatccagagttttctcaagattgaaattgtatacagccttcggatcaaaggttactttgccctttcctgcatatgggttattcaggatggcacttaagtcaaccttacccttatgcggctcctgcacactgtcagaaactgtaagaaggtctgtacgacctaccatctcatcgatggtggcaacaccaaggcgtgccatgtactctctcagctcctgtgcaataaagcgcatgaagttctccacatactccggttttccgcggaatctcttacgcagctccgggttctgtgtagccacacctaccgggcaggtatccagattgcagactctcatcatcacgcagcccatcgttacaagtggcgctgttgcaaaaccgaattcctctgcaccgagaagtgctgcaatggcaacgtcacggccgctcatcagcttaccgtctgtctcgatacgtacacggttacgaagtccgttcatgatcagcgtctggtgtgtttctgcaagtccaagctcccatggaagtcctgcattatggatagagcttcttggcgctgctcctgtacctccgtcatatccggagatcagaacagtctgtgcaccggcctttgcaacaccagctgcaaccgtaccaacacccgcctcagaaaccagctttacggaaatatccgcatatttattggcgtttttcaggtcatagatcaattctgccagatcctcgatagaatagatatcatgatgtggcggcggagagatcaggctgactcccggtgtggaatgacgggtttttgcgatccacggatataccttctttgcaggaagatgtccgccctcacccggctttgcaccctgtgccatcttgatctggatctctcttgcggaaaccaggtaacggctggtaacgccgaaacgtccgctggctacctgtttgatcgcagagcagcggtcattgtctgttcctgctgaatccagacgttcatcactttcaccaccctcaccggtattggattttccatggagatggttcatggcaatagccagtgtctcatgtgcttcctgggaaatggaaccgtaggacatggcacctgtcttaaatcgttttacaatgtcctcaacactctcaacctggtcgatcggaataggctccttggcaaacttgaagtccagaagacctcttaagtttccatgtccctcgtcatctaccagctttgtatattccttgaacatctcatagctgccctgttttgtggactgctggagaagatgaatggtacgcgggttatatttgtgctcctcaccctggcttctcatcttatgggcacctacgctgtccagtgtaagatctgtggcaagtccaaggggatcaaatgcctcagaatgaagtttttctacattatcctcgatatcttccagtgtgattccgcctacgcggcttacagttcctgtaaagtaacgatcgatcacatcctgggaaattccgattgcctcaaagatctgagatccctgataggactggatagtggaaatacccatcttggaagcaatctttacgataccgctgatcaccgcatgattgtaatcatcaacggctgcgtaatagtccttatccagcatatgtgtatcgatcagctcatggatcgtatccagtgccagatacggattgactgcgcttgcaccatatccgagaagtgttgcgaaatgatgaacttctcttggctcaccggactccaggatcagggcaagggaagtgctcttctttgtttttacaagatgctgatgtactgcggaaaccgccagcagggacgggatcggcatatggttctcatccacgccgcggtcagaaaggaccaggatgtttgctccctcacggaaggctttgtctacctctacgaacagacggtcaatggcacgttcaagctttgtgctcttataatataatgtagaaagtgttacaaccttaaagccgtcctttttcatattcttgatcttcagcatatcggtgttggtcaggatcggattgttgatcttcagcacctggcagttctccggcttctggatcagaaggtttccgtctttacctacatatacacttgtagaagtaacgatttcctcacggatcgcatcgatcggcgggtttgttacctgtgcaaaaagctgcttgaaataatcgaacaacggataatgttccttggaaaataccgcaaggggagtatcatgtcccatggctccgatgctttctgcgccgtttaatgccatgtttcggattgaagtacggtactgctcataagtatatccgaaggctttctgaaggcgtgctctctcctccggagtgtattcgacaactctctgattcgggatcttgatatcacgaagctgtaccaaattgctgtccagccactcaccataaggctgttttttcgcatatttttctttgagctcattatcatcaatgacacgaccctgaacggtatcaaccagaagcatttttcccggatgaagacgttcttttaatacgatcttctcctcatccacaggaagaacaccaacctcggaggaaaggatcatataaccatcagatgtgatatagtatctggatggacgaagaccgtttctgtcaagaaccgctcccatcacatcaccatctgagaacagaatggacgcaggaccgtcccatggctccatcatagtcgcatagtactgataaaaatctctcttctcctgagaaatcgtatcgttgtttgcccatggctccggaatcgtgatcatcactgcaagtggaagatccattccactcataaccaggaattccagggtattgtcaagcattgcagagtcagaaccattgcggttaactacaggaaggaccttgtgaagctcatccttcagatacggagactccatgttttcctcacgtgcaagcatcttatcggcgtttccgcggattgtgttgatctcaccgttatgtacgatgaaacggttcggatgtgctctctcccagcttggattcgtgttggtactgaaacgggaatgtaccactgcaatggcagactcgtaatcctggctctgaagatcgccaaagaaggtacggagctgtcctaccaagaacatacctttgtatacgatggtacggctgttcatggaaactacgtaagtattatcattactctgttcaaattcacgacgtgcgatgtaaagcatacggtcaaaggcaagacctttttccacatcctccggttttttaacaaatgcctgcataatgcacggcatgcactctttcgctttatgaccaagaacctccgggaagaccggtactgtacgccatccaagaagttccagaccctctttttccacgatgatctcgaacatcttctttgcctgggcacgtttgatctcctgctgtgggaaaaagagctgggctacaccgtattctctctctccgccgatatcaaagccttcttttttacagaccttcttaaaaaatttatgggagatctgaagaaggataccgacaccatcaccggtttttccttctgcatccttaccagcacgatgctcaagattctctacgatcttaagagcattggcaactgtatcatgtgttttctttccttttatattaacaacggctccgataccgcagttatcatgttcaaattcagggcggtagaggccctgctgctgatttgctacttctctcatttttctcatcctttcattgcagcttcttctgccgtctttttatcaactgccgcctgcacaaatccacggaacagtggatgtgcatggtttggcctagatttaaattccggatgtccctgtgttcccacaaagaacggatgtccggcaatttcgatcatctcaacaatgtgagcatccggggatgttcctacaatggacattcccttttcgtccagttccttacgaaatgcgttgtttacctcataacgatgtctgtgacgttcctggatctctttctttccaaaaagctcataggatctggagccttccgcaagcacacacggatagcttccaagacgaagagttcctccaagatcttccacatcctcctgatccggcatcagggcaatgaccggatgtgttgtttccggtgccagctcaatactgttggcatcttcatatccaagcacatggcgggcaaattccacaatagccatctgcattcccaggcagatcccaaggtatgggatcttatgaactcttgcatactgtgccgcaaggatcattccttctgtaccacggtttccgaatcctcccggaaccaggattccatctacagaatggagagtctgatccagatttttttcattgagttcttcggagtccacccaggtgatatcaacctttgcacggcaagagatcccaccatgcttcagtgcttccacaacactcaagtatgcatcatgaagctgtgtatatttaccaaccatggcaatctttactgttttatccgggtggcggagattttctaccatattttcccaatctgtaagatctggtttgcgattctccagtcttaagctctgcagtactacgtctgcaagcttttctctctccattgcaagcggagcttcatataaatattccacatccagattctgaagcacattgcttacaggcacattacagaacagggcgatctttccacggatatcctcggtaagaggatactcacttctgcataccaggacatccggctggattcccattccctgaagttcttttacactggcctgggtgggtttggtcttcatctctccggaagcacggagatacgggatcagagttacatggataaggatcgcattgtcatgtcccacatcatgctggaactgacggatggattccaggaacggctggctctcaatatcaccgactgtaccaccaacctcgatgatcgcaattctgtcttcgtctgcggattttgctctgtaaaaacggctcttgatctcattggtaatatgcgggatcacctgaacggtacctccgccgaaatcaccatgacgctctttctgaagaacagaccagtaaatcttaccggttgtcacattggaatttttgtcaaggctttcatcaatgaaacgctcataatgtccaaggtcaaggtcagtctctgtaccgtcatccgttacaaaaacctctccatgctgaatgggattcatagttcccgggtcaatattaatgtagggatcaaatttctgcatagtcacctgataccctctggctttcagaaggcgcccaagagacgctgcggtaattccttttcccagaccggaaacaactccacctgttacaaaaacatactttactgccatcttcgatttcctcctccattttgtgtcccacaacaaaaaggcgtccggaacagatttcaaggggtgagaattcccctgtggtatccgttcctgacgcctttgtcagttatctttcatataaaatatggtttactataaactatttttttttatttgtcaataactgatttttcatatagtctgcggaatttcttcctatgaaatggttgtaaagaaaaaagcagacgcctgccagggatttccatctgatctcccgtctctgcagtcacgtctgccttttatttttatgatatcttatctgtctctgcactgtctgtcaggcaactgcatatttctgaaggaagcagttaaactcatgattctctccatgacaggttactgtaagaaccttagtcagatccatgctgaggattccaagaatagattttgcatcaattaaaattctgttatatgaaatatctacatcaaaatcacatttacttgcagccttaacaaattctttaacatcctctgtcgcattcaatctaatttttttagacataaatatcatcctctcttttatctcggcaaaaacccggccttatttcgaccgcgctattttcctgtattttccagaccagcggtcttttcttatctggtcgtcccacattatgtctcatattgtcagatttgtcaagttgatgttttttatcgtttttaagagtccatctataaaaacccggattttgcataacaaaatccgggtttttatatgtttattgtgtagttttcacatttttgtttttcaatccattattttttactgtgagattaattccacatagtttattaatcctgtttgatttctgccggtatttccatcggataattgccatcaaaacatgctttacacagcggaagtccgcctgccatgccttccagataatcgatctgcatataacccagggagtctgcgccgatcatcttacggatttcttccgtgctgtgctgtgctgcgatcagttggtcattggacggcacatcggtaccaaaataacagggatgtaaaaatggcggggagctgatacgtacatggacttcttttgctcctgcttctttcagcatgtggatcagattggcaatggtagtt

SEQ ID NO: 222 - DNA, 38184 bp, Unknown
  gut microbiota DNA sequence
acgtttgacatagactcacacctaacctccctccagttgtagattgtgctaaaatacaactgtctgggtatttttcttgcacgagtgttattatatagcataacaagtgctttcgtcaacatctttttcgatttttatgaaaaaaatgtcaaaactgtaaatcacgcacaactttgttattttgtgagctgtttttcaaggattcctgctgctgcgtccatagcctcctgagccttttccggattctttccgccggcctgtgccatgttcggacgtccgccgccgccaccgccaacgatcgctgccactgctttgatcaggtttcctgcatgagcgcctgctttctgagctgcatccgttgccattgcaagaagattaaccttgccgtcgtttactgctgcaagaaggacaacaccttcgccaagctgctctttcagtttatcacccaggtctctgagaccgttcatgtcaacgccctcaactttggctgcaaggagttttacgccgtttacttcaacgactttatccatgacatcgccaagtgcactctgggcagctttgctcttgagggattcattttcgctctgaagagcctttacctcagcctgcaggtgactgatcttttctacaacctcggctgtattggcctttaatgcttttgcagcctcatggagaagttcttcctgctttctgtagtattcgataactgctttgccggtaagtgcctcaatacggcgtacaccagctgcgataccggattcggaaacgatcttaaagagcatgatggagcttgtattctttacatgagtaccaccacagagctctttggaaaagtctcccatggatactacacgtaccttctggtcatatttctcaccaaagagagccattgctccggatttcttggcttcttccacatccatgacatctgtatgaacatcaagacctgcctggatctctttgtttacaagctcttctgttgcctggagttcttctgctgtcatagcctgaaaatgagcaaagtcaaaacgaagtctgtccggagttaccagagaacccttctgctctacgtgggaaccaagaacggttttcagtgctttctgaagaagatgtgttgcactgtggtttttctcggtatcttttcttgcttcttcgtttaccttcagggatactgtctcacctgaggaaatcataccagattccatatgtcctacgtgaccgaatttaccgccgcggagtttgatggtgtcctcaacaacaaatttaccgtttgcagtctcgatcacaccggtatcaccttcctgtccacccattgttgcatagaaaggagtctgctctacaaatacggtacccttctgtccctctgtgagagaatctacgatctctgtttctgtggtaaggacagtaaccttggaatcaaaggtaagatgatcgtagccgacgaattctgttgttacgtttacatcaatatcatcgtatacggttgcgtctgcacccatatagttggttacttcacgggcagtacgtgccttgactctctgttcctccattgctttctggaagccttcctcgtcaatgccgtagcctttttcctcaaggatctcttttgtaaggtcaagagggaatccgtacgtatcataaagcttgaatgcgttgtcaccggaaagagtcttttcacctgcttttttcatatcctcttccatgtcggaaaggatacgaagtccctgatcgatagttttgttgaactgattctcctcatttgtcagtacacggaagatgaactctttcttctcctcaagctccggatatccggctttggagctctcgatcacctgtgcacttaattttgcaaggaaagttccctcgatgccaagaagacgtccgtgacgtgctgcgcggcggatcagacggcggagaacatatccacgtccctcattggttggcatgattccatcggagatcataaatgttgcggaacggatatggtccgtgatcagacggatggaaacgtcatctgcatagtttttctcatattctttatgtgcgatctcgcatacaagattacgaagtgcacaaattgtatctacatcaaaaatagaatcaacatcctgaacaactacagcaagacgctcaagtcccataccggtatcgatgtttttctgtttcagggttgtgtagtttccgtttccatcgttctcgaactgtgtgaaaacgttgttccatacttccatgtaacggtcgcagtcgcagcctaccgtacatccgggtttgccacagccgtatttttcgccacggtcatagtagatctcagagcatggaccgcatggacctgcgccatgctcccagaagttatcctcttttccgaaacggaaaatacgttcagacggaatccctacttctttgttccagatattgaaggcttcatcatcatccaggtaaatggatgggtagagacggtctgcatcaagccctacaacctcagtaagaaactcccatgaccagtggatggcttctttcttgaagtaatcaccaaaagagaagttaccaagcatttcaaagaaagtaccgtgacgtgcggttttacctacattttcgatatctccggtacggatacatttctggcaggttgtcactcttgttcttggcggcttctcagcacctgtaaaatatggtttcagcggagccatacctgcattgatcagcagaagactcttatctccctgaggaaccagggaaaagcttttcattacaagatggcccttgctctccataaagtcaaggaacatcttacgaagttcgttcactccgtactttttcatgttgttatcctccttgtgtcaaccctacctgtcagcatttccggaatgccgtagctttatcccggaaatatcacagatatgggaaattattttacacagatctttttgaattttttcttgcctcgtttcagaacgatcccgtcccctgcaaaagcatccttctcaaccgtatggtaaatatcggtgagcttctcaccatcgatggatacaccaccctgctggatcgcacggcgaccctcggaacggcttggtaccagctctgcttttacaagaagtgtgatcaggtcgatttttccttcctcgtcaaaatcttcctctgaaagctctgttgtaggcatatgagaagtatctgcacctgagaacagtgcgcgggcaccctcctgtgctttcttggcttcctcctcaccatgtacaagctctgtcagctggtatgcaaggatctccttggctttgttcagctcgctgccttcccatttggccatctcgtcgatctcctcaagaggaaggaaggtaagaagacgcatacatttgataacgtcagcatcatctacatttctccagtactggtagaaatcgaacggagatgtcttattcggatcaagccatacagctccggactgtgtttttcccatttttttgccctcagaattgagaagcagtgtgatggtcatggcataggcatccttgccaagcttacggcggatcagctcagtaccgccaagcatattgctccactggtcatcgccaccgaactgcatgttgcagccatatttctggtacagcatgtagaagtcgtagctctgcatgatcatgtagttaaattccaggaagcttaagcctcgctccatacgctgtttgtagcactctgctgtcagcatacggtttacggaaaagtgagcgcctacctcacggagaagctctacatagttaaggttcataagccagtcagcattgtttaccataagagcttttccatcagagaaatcgatgaaacggctcatctgctgcttgaagcagtcaatattgtgctggatggtttcttttgtcagcatctgacgcatatcggtccttccggacggatcaccgatcattcctgttccgccgccgagaagggcaatcggacggtttcctgccatctgcagtctcttcatcaggcaaagagccatgaagtgacctacatgaaggctgtctgctgtagggtcaaagccaatatagaatgtggctttcccgttatttaccatctctttgatctcgtcttcgtctgtaacctgtgcgatcaggccacgtgctttcagttcttcccaaactgtcattgttctttcctcctgtatagtcatataaaaaatgcccggttcctgtccgtttaggacgagaaccgggtcccgcgttaccacctaaatttacagaaaactcgcatttcctgcctcataaagtgaatctacatcccgttatatccatatatatcaagatataaaacacttcagcacaataacgggtgccattccgtcgcagcctatctataatacgctattattataaagtttataatttacagtatcaagtcccgattcggtgcgcagctccgggatgtattcacaaaagttctaccctgcgcctctcacctgccggctgctctctgtggggttttcctcaagctactttttcccttccaagccttttactatactatatgaagtatacaaactgcttttttgtttgtcaagaaattttaatattgctttgacaacttaaagtggcagaatgttactgtttactctgttctcagtaacacgcttcgcgatgcacagaatttacgctgatcgcataaattcgcgcggtatgtttcgggttttctgtgagtgataagtggaacttttatttctgtaagccatttattccttcatctacgtaaaggtcattgccgtctgccgctgatgtggcaagctgatcacaccgttcatttaacggattatctgcatgtcccttaacccagtggaagcttacctgatgctgctccttggcctttaaaaggcgtttccagagatctacattcttcacatcttcgttttttccacgtttccagtttttctttagccaggaatcgatccagtgctgattaaaagcatctaccagatatttggaatcggaatacagatccacctggcaggggcggttcagtgcttccagtgctacgatggctgccatcagctccatccggttgtttgtggtttttttgtagcctctggacagttcacgttcatgtaactggcctttggtatcgatgtactgaagaactgctccgtagcctcccggtccatccggatttccccgggctgcaccatccgtatagatttttacctgcatatttgcttctccttaaattttcaattttatgtccatacgcctgtttgttcaaagtttactgccggagactatgttgcttatacccagtctacaaaaaatgtatggcctttgtaagtttcatatttcactttattgaaattcagattctggttccagaaatagctggtcatcatgaaatacatataattaaaatctttctgtttaaatccgctgagtgtcctggctttgccggaagtgacatgtttattgaaaatagtcattgcttctcttgcagcctgataagcaagagtacggttttcaaactgaccattgagacgtttgagaagggccccgttccgcactacagaatactgtggggttgtgctgcttccgatattctcatagatcacgcctcgtatcgtagatggaaattccttgtccgatttgatcgtacggttcaatacacagagtgctactgcttccattccgattttgccctgatcgcctgcttctgattcgcaaagtgcggccagaagtgcttcatctgaggtctttccgtttgcaattccgggatgactcttatattccttgaccatggtgtaatatctgctgtttctggtatcataaattttaacatttccgtttccgacatttacattaggtttggtagtcttcgcagtggccactccgtttgctgcgatggagtatgtaattccattcactgtcacggaggtacttactgccatgacaccgttggatttaaaataatagttcttctgatcaatcgtcttcagaccagtatacatataaccggtactggtggcaaaatagtagctgatatttttggatttgttttttacccatttggttgccatataaccggaagttttgtaaaaataacgtttctgccctttgctgttggtgagccagccggttgccataatgcctccgccttttgtgaaataacgtttccttcccttgctgcagtttacccagcctgtggtaagcttacctgttttgggattgaaatagcgcttatggcctttggaatctgtcatccagccggttgccataacacccttgccttttgtaaaatagtaggtatatttgccattgaccttcatccagccctttacctgtactccggtctttgtgttaaagtagtacttgtatccgcccagggtcagccagcctttctgcttgctcccatcactttttatgtagtatgtttttccatcgatagttttaaagcctgcagtggcagcctgtacctcttttgcagaagcagaaaagactgtgcttcccacgatcaacagcatggcaagcatcagacccttcagccatttttttgttctgaaactcttcataattttccccatttcctgttttagatataaaagctagtttgccttaaaaattacaaaaatgttacatttcgtttattatatcgtaatgaataaacactgtcaacttttttgtaactgtggacggactcctgccatatgatgaagtgtaaataaaatttgctggaggacttatcgatgagtgacttagcggctaccaattgtggatgtgattgcggatgtggttgtgattccggatgcagcacaggatgtggatgtaacaataactgtggctgtaataatggctgcggaacttccttgtttggaaacggtggaaacagctgctcctgtatcctttggatcatctgtctgatgtgttgctgtggaaacaacagtggctgtggctgtaataacaacggctgcaacgacagctgttggatcatcatccttcttctgcttttgtgcggaaatggatgcggctgcaacaattgctgctgatcttttgaaaaggcagaggttatttcctctgccttttctgctgccgtttttctgcttcctcctgtttctgttttttctctttcagacatttcagatctatctcataaaaagaatttccatcaatgacaagttcctgttttttttcagattccataatcacattcctttgaaaaatttcttctatatataatatgactagagaaggtttctgtcatatttctttctgcaaattcatagatttcaggaaaaaggatttttttatggaacaggagcctatcgcacgtactgctctggatgaaatggtggaaagtgaccaggatcagatgctgaaagccatgatcccgtaccttccttcttccgggcagcggtttttatctgtgtatacgaaagtccgggaacttcggaataccatgtcgctttttcaaagcagccgtagaacagccgatctgcaggctaccggtttttccggcaccgatcctctggaaatgctgcaggatatccgtaagtgctgtggcggagaaaatcgccgtcagatcgatcatatcaccagtcttatggctacgatccagatgcttcagatcatgaatgaagattcgtcaggaggtgagaatccatgagtgatgactggaaaaataatccccggctttccggaatggaccctcagaagctttccatgcttcagggactggcagatcagggattggggaaaaatccgtccgaacttctgccttttatcatgggcgcagcttctaaaggaaaaaatgcgggcttaaatttcaactctgatgagatctccactatcatagaagttctgaaaatggggaaaagtccggcagaggcagctaagcttgacagaattgtgaatctgatgaaaatgatacgtcattaacagctttgtgatcccggaacagcggttttctgttccgggattttctactttgtaattctttttatatttgtcggaatataatctgcaaaaatctgacatatccatagattctatcgcataattcatagaacatattccctatttttgtgatatttttttatcattttccctttcttcttatatcagtatatggtatacttgtccgtgaaatgaatgatatgcaaaataggattttatgcgtcaagtgtttggcgaatggggagttgtcgccagaacgaaaagtacgtcttacggtatgaaatccgcacccgttgcagcaatataagagaatatctcatattgtgtagggctttttcgacatacgttctattacaattggagatatctttttttatgcgcaaaaataaaagagacagtctccgaaaaacgtgatttttttaacaaatggaggttgttatttatggtagacaaagcaaaagttgaagaggcgatcaagcttcttctcgagggaatcggcgaggatgtaaacagagagggactgcagggaactccggaacgtatcgcccgcatgtgcgaggaaatttatggcggacttgataatgaagcggatgaacatcttcagaaacagtttcatgtagagaacaatgaaatggttctggaaaaggatattaccttttattccatgtgtgaacatcatcttatgcccttttacggaaaagctcatatcgcatatatcccaaatggtaaggttaccggcttaagcaagctggcccgtaccgttgatgtgtatgcaagaagaccgcagatccaggaacgtctgactgtgcagatcgcagatgcgctggaacgtgttctcgctcctaagggaatcatggttatgctggaagcggagcatacctgcatgaccatgcgtggaatcaaaaagccgggaagcaaaacggttacgactgttaccagaggtgaatttaaagaaaatatggagcttcagaaacagttccttgctatggtcaaggactgatggacagagtgaatcagatctggaatcatccgctctatcagaatgagcttaataagcttcagcttctggagactgaccgtgaattctgcagacatacaccggagcattttttggatgtggcacgccttgcctatatccgggcacttgaggaaaatgctcctatttcaaaggaactgatttactgtactgcccttcttcacgatatcggacgggccagacagtatgaagatggcactcctcatgatgaggccggtgctgctatcgcaggacagatcttaaacgagcttggattttctatggaagaaatggaagcgatcattgcggcaatacgtggtcacagagctcagacggatccgacagttcttggaaaactgctctatactgcggacaaaagctccagaaactgtttttcctgtaaagcagagccggaatgttactggtctcctgctaaaaaaaatatgacgatccaatattaggaggtttttccatgaaaatcggaaatcgtgagtttgatgtaaaaaacaaaacatatattatgggtatcctaaatgtcacaccggattctttctcagatggcggaaaatggaacgatatggatcatgccctgaaacatacagaagctatgatcgccgaaggtgctgatattcttgatatcggtggggaatccacacgtccgggacatacaccggttggcgcacaggaggagatcgagcgtattcttcctgttatcgaagcagtaaaagggcgttttgatatccccatctctgtagatacctataagggatgtgttgcggaagaagccctgaaacacggagcagatcttatcaatgacatctggggactgaaatatgatcctgaaatggctcctgtcattgccagatatcaggctccctgctgtctgatgcataacaaagataatactgaatacaataattttattgtggatatgctggcagaaacccaggaatgtgtcaatattgccaagcgtgccggtattgccgatgataagatcatccttgatcctggtgtcggatttggtaaaacatatgagatgaacctgatgaccatggataatctggagcttttccggaagctgggatatccggtgcttcttggtacctccagaaaatccatgatcggacttgcccttgatcttcctgtagatcagcgtgtagagggaactcttgccacatcggtgatcggtgttatgaagggttgtgcatttgtccgtgttcatgacatcaaagaaaataaacgcgtcatccagatgacagaagctattctgggacgttaggaggaactgatggataaaatcgaaatcagagatcttgagatttttgcaaaccatggtgtgtttccggaagaaacagctctcggacagaaatttgttgtttctgctgttatgtatacagaaacacgtccggcagggctgacagatgatctttctgcttccatcaattatggagaagtcagtcatatgatcaccgattttcttcagaaaaatacttataaacttctggaggctgctgtggagaatctggcagagacgctgctgctttcactccctcttcttaaaaagatcacccttcgtattgaaaagccctgggctccggtaggccttccgctgaaaaccgttgctgtggaaattacccgaggctggcatacggcttatattgcttttggttccaatatgggggataagaagaaatacctggacaatgcgatccagggtcttcgggatatgaaagagattgttgttgaaaaggtttccgagtatcttgtaacggagccttacggggatgtggagcaggatgagtttctcaacggagccttaagagtccggacgctgctttctccggaggagcttcttgacaggctgcatgtgttggaacaggctgcggaccggaaaaggatcattcactggggaccaaggacactggatctggatattctgttttacgataatgagatcattgatacagtggaactacatgtgcctcatattgatatggaaaacagggattttgttttgaagcctatggtggagatcgcaccgtatcttcgacatccggtgttgaatttaacaatggagcagttgttaaaaaagcttgagggaaaaactttggcggtgtgactttatttattaaataataaaaagataacaagcccgatacagatatctttactataatctgtatcgggcttgttttgtatccgtgtgaattattgactattatcgaaaaatattttatttctggtttaccaggtcgaattcgtcggtgatctctttggatggtgccttggtaatgaggctgacgatgatgtttgctgcaatggccaccaggaatgcgggaagaagttcatagattccccaggcgccgccgagcgtgctgattccgtatttccagataaataccatggaaccgccacagatcattcctgccagggctccctgccagttggaacgtctccagaataatgccagaagtaccaccgggccgaatacggctccgaagcccgcccaggcaaaggatacgatagtaaacacagagctgttcgggtcgcgtgcaataaacatggctactactgcgatgagaagaagcgtgatcttatcggctaccatgctttctttttttgtttctttatccttcaggatgcttccgagaaggtcggaagaaactgctgaggatgctgccaggagctgagaatctgcagttgacatggtggatgcaaggattcctgcaaggatgagtcctgcaaggattgctgcaattacaccatgtttactgagaagatctgcgatctgaacgataattgtttcagatgcggagccttccagaaggtcaaactctcctgctgctgtcattccaagtcctaccacaccgatcagtactgctactgccagtgagatcactacccatgtagttgctactcttctggaaagtgtaagcttctcttcgtcttcgatcgccatgaaacgaagaagaatatgcggcattccgaaatatccaagtccccatgcaagcatggaaatgatattaagcagtggatatgcctgttctgttccggttgttggatcatatgtagtaaacatagtcagatatccgggtagtgatcttgcatggtctgcaactgcttcaataccacctgctgtgctgatcccgaatacaaatacgatcacaagagcgatggacatgatgatactctggataaagtccgtggtagatgctgccaggaatcctcccagtgtggtgtatccaacgatgaccagtgcactgatgatcatagctggcagatattttacaccgaagagacttgcaaaaagtttaccacaggctgcaaatccggaagctgtatacggaataaaaaagatcacgataaaaatcgctccgatagactgcaagatctttttctcatctctgtaacgattactgaaaaaggatggcaatgtaatggaatttcctgccacatgtgtgtagcggcggattctttttgccacgatcctccagtttacgtaagttccgatcgcaaggccaatggctgtccagcctgcatctgcaataccggtaagataagcaagtcccggcaggcccatcagaagccagctgctcatgtcagaagcctctgcactcatagctgtgacaagtggtccaagctttcgtcctccaagatagaaatcagaactgtcattattgttcttggagcaaagataacctacaaagagcattgcacccagatagacgataatggctgccattatacaaatatgtgctgttgtcattgtttctctcccttccatgtttctgctttaaaatcacaaaacatgagggattttgcttatgcatccccatgctttctgcttttaaaccagttttacacatatttatagattttattatattaactttagaaagtaaagaggatttttcgtttttttacataaaaaagtattttatatgaagaaaaagggctgaaccatataaggcggcccagctctttttcaaaatctctgtttatttttcttccatacgcttctgcacatcttccactgtatatgcttctgtcagtgctttcatatcatccggtgtagtgtctggattatatgacttgatcactttcatcagatctgcacagctgtatgcattttcataaatgtcctgtgtatatccgtaaagcttattgaaagaagctttatcggatgcactccagaagccctgatacagacgcactgtattagaatcagcgtcgtcggtatttgcctccggataaccggccattgcattgtacagaatcgcaaaagcaggaccgcccatggatgcatatttaccggcaatgtaatcaattttaggatttccaaaggaatcctcagtattgatctcatcatggttttcctgggagaagcagtcaactgctccgatcttgatattggagccctgctcatcttcttttgctgtaacgatcttcatgatctcatctacattgaaggtacagagaactgcatcataatttccgtctacaaaagcatgtttcagattattgattccttttggggctgtcatatagccaggacagatggtaatgctgatatcatcttttcctgtatctacaacggttgtttcctcagatgccgcaagcttctcaacatcctcggaataagtcagcccctccttctcagccagagcttccagaacaccgatcgctctctgaagatgcatgtagtttccagcggaggaaccacctgtcagcacaatatatttgctggtgtctgcatctgcaaaatactctgccatattatagccggcttcataatctgcttttgcatccggccctacgcttccaagaaaatactggctgttttttatcttgtcataatcttcatcactgatgtttccagaaccaagaacataatacatttcctcctcatcgcaggtttctacgatcttccggatatcctgtccgtaaaaagaaatgatcccgctcacgccctgctgcttcattgcgcggatgaaatcgcactcatcctccgcagaattgatatttcctgaaaaataaaacttaaccggaaacccctgctggatgtactctctgtaatagttcatgaacatattcatttccgggctgtcctgattatatactacaacacctattgtatattggatatctccgtcttcgacagcagcagaaactttttttccgccaactgtaaaaacggcaagcagcaacagcagaatgcccagtactttaaagtttttaaaaatcatactgttttgtgcctttctttatttttccgttacataatggcaggctacttcatgtccgggctctacttctgtaagcacaggacggatcgtcctgcatttctccatacagtgttcacaacgattctggaatgggcagccatgaggaacatccagagggctgggggcctcactttcgatgctctcgatcattttgttctgatccatatgaatggaaaactgtgcttccaaaagagcctgcgtatacggatgaagagatttttttgccacgtcctctccaggaattacctccacgatattcccgaggtacatgacagcaatctgatgagcaaaggaacggatcagagccaggtcatggcagataaaaagcatgctgatgtttttctccttctggagacgtaccagaagccggatcacggactcctgtacggaaacgtcgagtgcagaggtagcctcgtcacataccaggatctctggttccagggaaagtgccctggcaatactgatacgctgacgctgtccgccactcatgttatggggataacggtctgcaaaatctccgggaagctctaccatttccagaagctctctggctttcgcttccttttcgcttcttttcagctttccgtaattaatcagaggttctgtaagaatatccacgatcttcattttcgggtcaaaggacgccaacggatcctggaagaccatctgcatgttctgacggttcagccagatttcttttttggaaagatcagagaggttttttccatggtaaaggatctctccgctggtcggtttgtcaagagaaatgaccatgcggacaaaggttgatttaccgcagccactctctcctacgattcccagagtttttcctttataaacgttcaggttcacatcgttgcaggctgttaaagttctgccgccggaagccggaaactgttttacgatatgttttgcactgagtacgatatcggattccttaaacataacgctgtccctccatttccggcactgcagccagcagtttctttgtatagtcactggtcggatgctccatgacctcatctcgtgttccctgatccacaacttttccgttctgcataacaacaagctgatcagccatataggctgctacaccaatgttatgagtaacaatgatgataccggttccgaaatcatcacggagctccatcatctggcgtacgatctgtgcctgtgtagtaacgtccagcgcactggtcggctcatctgcaagaagcagctctgggttaaaagtcatggccatggcaataccaactcgctggcgcatgccaccggaaagctggtgaggataacttttcatgatattttccgcgtccggaagacgcattttctgaagcatggaacagcctttcttccatgcttctgctttggatacatccgtatgtgtacagatatattccacatactgacttccaatcttacggatagggttcagggttccgccgcagtcctggaagatcatggaaatgcgggtaccccttaaatttctccattcatcctttgtattggaaagcagagaatgtccgtgaaactgaatatctccggtgctgacccggccacccccggcaagagcgccgaggacagcacggatcacggttgtttttccacttccactctctcctaccacactgatgatctcacccttcttcatggaaagattgaaatgctcaatggtaggtgcctgctttccgtactgaacagaaagatccttgatttcaagcataaataagcgctcctttactcggcaagagtgatatcctttgtcagccagtaataatccattggatacatcttaacacctgttacctttttgttggagaagaggtaggttgtctcataaccaaagaatacagttgcagcatcatccatgatatcctgctgaatatcgatgatgagatcttttctcttgtcctcatcaaatgtctgcgcaagctcgtcaagaagcttgtcaacctccgggttattgtatcctgcagtattgtttgcagaggagctgtaccagttctctcttaagtagttctcagggtctccagtgtttgctaccagcacgttccagatcagaaggtcatactgaccggaatctctcatgtcaagaagtgtctcataacttactgtattcaggtttacgttgataccgatctccttcagactggcctgtgctgcctgtgcgtatacaccaagctcggcacggcttgtgtagataacaaaatcaagaacaagaggatctccgtcaggagtttctacaaatccgtcaccgtcaacatctttgtatccggcctcatcaaggatcttctttgcgctgtccggatcataggaattctcatccttcagatcatcgaatccaaagtcaagtgttggaggaaccggtgctttaccagctgttgcacccccctcaagaagagtgttgcagtatgtttccttgtcaaggccacgaagaagtgcctggcgaagagccttatcgctgagtgcatgatcctcattctggttcatgaatgcataggtggaacgaagagactgaagctcctggatgtcgtaattgtcatttccctcaaactcaaccaggttctctgttttcaggttgtaagcgatatcgatctcacctgtctgaagagccatggaacgtgttgtctggtcatccacacatttcagtgtaactttatcaaggggaacttctccatcccagtagttctcattttttactacgatacaggaatccgtcgggctgaaggactctactgcgtaaggtcctgtacagattggtccttccatggcaaatgtagaatcatctacatttgtatctacgatcagaaacagcgggcctgcaaggcatccggccatgtttgcatttgctctgttcaggtggaagatcaggttctgtccgtcaacctcgatgctgtcaagatcaaagaattccggaacacggtcacttttttcagcggtacgctcgatggaggcttttaccatctccggtgtcatatcgtcaccgttggagaattttacaccctcacggatcttgaaggtccatgtctttccgtcttcgctgttctcccactcttctgcaaggcatggaacgatctcaccgttctcatcgaattttgtgaggcactcgccgatcgcataacgggatacaacccagctgaaatactgctctgtcggctccagtgtatctgcaaagcttgttactccgatggtgatctccttatcactttttttgtcaccttttgcctgagccactgttgccattgaaagggtcatcatacatgcaagtgtagcagccagcacttttttaactacattatttctcatttcatcctcctaaagataatatactgattatatggtgttggtttgttacagagttgtcttattgatcctggcgcggatccagtacatcacggatgctgtctccaagcatgttgaaaacaacaacacagatcacgatagcgataccagggtagatcataagccatggcgcctttgccatgtaggttcttccttcattcagcattagtccccactccggtgtcggcgcagttgcaccaaatcccaggaatgaaagggaagccagctccagcatcatagttccgatatctgctgccgcagttaccaccatctgggttaccatgttgggaagaatgtgtacaagaagaattttccaggtctttgttccgtttactatagctgcctctatgtaaagactcttcttgactttcaagaccatacttcgtgcaagacgggcatattttgtccaacttacagccgcaatggagataacggcattgaccaggtttggtccaagcataccggcaatggcaatggccagtacaagcccagggaaggaaatcatcatatctgcgatacgcatgatcactgcatccacaacgccgccgaaatatccggcaataactcctaaaaatgtaccgataacaaagatcaccgcaaccagacataaggtcatgatcagagaggttcttgttccgaaaataacacgggaaagaagatctcgtccaagcttatccgttccgaacggatgagcggagcttggctcctgcagtgattcggtcataactgcatccagtggatcatatggtgagagctgcggcgcaaagatcgcaattccgatcactacgagacccagaatgaagaaaagagtgaactgtttattttctttgaatgttcgtaatacctttttcaattatctatcctccttaagtcttggatcgagataagtataggacagatccacaagcaggttgatgcacatgtacaggatcgcgatccagagtacatagccctgtacaagaggatagtcacgacaggaaatcgcctttactgccatatttcccattccaggccagttgtaaatgatctctacaactgcagtacctcccagaagacttccaagggaaagtcccagcagcgttaccagcggaagcataacattaggaagaacgtgtttccagagaatgacgctttccttgattccacgcattcttgcacctgtgacataatcctggtgaagttcctccagtactgcacttcttacctgtctggtatattttgcagacatagcaagtgcaagagtcagcgccgggaggatcatggatttaaaatccgtactgcctcctgcaacattgatccagcgaagctgaacaccaaagatgctgagaaggatcaggcccagccagaagcttggaacagatactcccacaaaggtaattcctctcacaaaataatccgggaatttgttctgatatacagcggccaggattccaagcggtatggaaataatgaccatcatcagaagtgccagcaacgacatcctcagcgtcggccagaaacaggataccagtttatctgttaccggcattttgaaagaataggactgtcccatatctcctgtaacaacacccttcagccaggaaccatactgcacgagaaagggctgatcaaggccaagctcatgtcttgtctgttccagaagctctggtgtaggaagattgccacactctgtcagcatgatctccgcaggatcaccaggtgacaggtaggtcagtccaaatgtgaaaaagctgattccaaataatacaatgatgatctggagaaatctttttcctacttgtttctttgtcacgttttactcctttcctcatttgatgcgattttaacattgccgttttaattgagttagataaaagaaactattggattcttaatatgcagaatatgcatggaattttagaaaatttgcacgaaaaaagcccgtgacgaaatacgggcatacaaaataaatatgcttcctatcttccgtaagaatcattttaaaacaattgcaagcaggtctcctgacttaggatccttaccctcagacaccttcccggtctatttctcacgcactcgaccagtggtaccttgtctgaggattcccccttacagtgacgggatcgtaccggatttacaccggtttccctattaatcctctcagaacttacaacggctgatgtgaaaatcagcaaatgctgttaaattactgcaacattatatgataaaactatagtttatgtctatggaaaaatgttatatttttagaaaacttataaattttgttaaagatgcttgaattgtatatatcccccatgggggatatgacaattggatttatctgatctgctaaaaaaaacacggattttacctcgctgtttttacaaatagaatagcaaatggtaaaacccggttttcttactgtttcaatatgatttcagacagaagcgttctgaaaaggttgtttactatcaggtcagagtctccgtgatcgttgcatatgcgatcattggtccgtcttcaataatgttcagactggctgtttgataaagtacgactccgttttcagttgcaatagatgtgtaaagtaaatttccatagtaatctctcagttcacccaattcttctcccttaaagaagtactctccaggcttcttggatggataccagcatccggtatacggcgcatattcatagattacattttcaagaagcatctgacggtaatgcttcagaccatgacacgcctttccctggagatgaaaaacaaggtgacggacgtctcttttatcctgttctacttcctcccaggtccagtagctgtgtccgcctctttcgataagaatacttggaattccaagagaagaagcataattgtaggcgccacctgtggcagttgtggaacggaccacatattttacgccgatatgccgtgccatatgtaatgacttctctgctgttttttcatctacaacccctacataataaacatagggatgaagctgttcgaacccatctccactatgcaggtcgatataataatctgctatagaaaaaagtttcgtcactatagtataggcaatacgatctgcagctgttccctcaggatctccggggaaaacgcggttcaggttcttgccatcctcatagaccagactcatggtgcgatgctcaaagccgctgacattgaccagtggaacgatgatcacatttcccttcagttcttccggttgaaattcttttgcaagttccattgccgcctggatccccacatactccgcactgtgtattcctgctgtgatcagtatcgtcggtccgtctttcactccgcatatcacagttgccggcattgctatgccgtatcctgtgatcttaattttcccctgtgccttctctcctttttcaatcacccagtcatcaattttgatcattggttgtttcccttttcctttttttatatttccgcacttttgacgataagtatatcatgcctaaccgaaattgtacatattcttttaagattccggaaaaacagaaaaagctttcgtaaccgttcattctgatccgacgtacaaaagcttttttcctgaatgatatataatttatctttttaccaattctttggtgatttcttcccagctgactcctttttccaccatgagtaccatcatatgataaagaaaatctgaaatttcgtatttaatctcttctttatccggatttttggctgcaatgacgatctctgtgcattcttcaccgacttttttcaaaatcttgtcgattcccttatcaaaaagataattggtataggaaccttcctttggatgttcttttcggtcagtgatcacatcatacacattctggaacacgtgaagaggattggtatcatcgtactcctttttcatcagcggtttgaagaaacaggtacggtttcctgtatggcaggctgcgccaacctgctccactttggcaaggatcgtatcattatcacagtcaatggtaagagactttacatactgtacgtgtccggatgtcagacctttggtccagagctcattccggctgcggctccagtatgtcatttttccaagcttcaatgttgtgttaaaagccagctcattcatataggccagcatcagtacttcatccgtccggtaatcctggacaataaccggaaccattccgtcactgtttaatttaaagtccgaccatgcaatattacttttatatgtgtttaccggaattccggcttcttcgcaggtttccttaaatgtatgcagatcattttcaagactgcttacataagcaccgcaaagtccggacacagctggttctcctaaaagctccagaacgttctcaaatctgttttcatcggtatgaagaacaatggaaatctgagaaatctctgcaatttcattttcgacagtgtccaaagccagaacagtgtctgcatatgtttcgatcagatcctgattttctgtgaattctctcagatcagagatgctgatcatcatacgctcttttccaaagcgccgggatacttcttccagaagcttgatattattctctttcgaaaaattcagtacaactttggcacatcccgcatagatcagcttttttacatcttccatacgtttgatatttcccgctgcgatcaccgggatctcagatacctgacagatatcacggatttttccgatcgcacggtcatgctctgcatctgcggaagaaaagtcaaataccagaagctcatctgccccattgtcaccataaaattttgcaagtgtttctacatttccgtctccgaaaagatttctctgtccaaatcctgttaccgccttttctgaatgaagataaagacatgggatcaactgtttgttcataagtgttctccttctgtatcagaggcttcccttggtagaaagcacgtctgtgatccgggaatcgtactgtgttgctgcatcaagggctttcgcaaagcttttaaacatggcctctgccacatgatggctgtttcctccggaaagaaccttgatgtgaagattcattgctgcggaataggatactgcataaaagaattcctttaccatctctgtagccatatctcctattttttctgtagaaaactctgcatcccatccaagataaggtcttccggaaagatctactgcgcagagtacaagcacttcatccataggaaggatgcagctgccgtaacgtttgatcccttttttgtcgccaactgcctcgcggatagcgtttccaaggacgatccccgtatcttcaatggtgtgatgatcatctacattcagatcaccgtggactctcagtgtaagatcatacagtccatggcgcgtaaaaccgtccagcatatggtcaaaaaagccaatgcctgtatcaatatcggaacttcctgttccatcaatattcagctgcagacgtatctgcgtttcttttgtgtttctttcaatcagtgcttctcttgccattattcgttctccttgtcctcttcctcaaaacggactgcaatggaatttgcgtgtgcagtcagctgttccgatgtggcaaactggataatgtccttgtggatttttcggagtgcttccctggaataatatacaatactggattttttgataaaatcatctacagaaagtgcggagaaaaatttggcagttccattggtaggaagcacatggtttggtcctgcgaaataatctccaaggggttcagagctgtgctctccgataaagatcgcacctgcatttcgtaccttcatcatatcttcaaaaggattctttgtgacgatctccatatgttcagaagcaatttcattggcagcctcaatggcctcgtccatatcttctgcgatcaggatataaccaaagttctccagggatttctcaataatggcttttctggaaagtacctcaacaaaacctctgacttctttatctacctgatctgcaaattcctcatttgttgtgatcaggatcgcagatgccatctcatcatgttctgcctgagaaagaagatctgctgcaatataacgaggatttgcagtctcatctgcaagaacgaggatctcgcttgggccggcaatagaatcaatgcttacgtatccataaactgccttttttgcaagcgcaacaaaaatatttccgggtcctacgatcttgtcaacctttggaatactctcggttccatatgcaagtgctccgatggcctgtgcaccacccactttatagatttcatctgctccggcttcgttagcagcaacaagtgtgcttggatttacttttccgtcttttccaggaggtgttgtcattacaatacggtcaacaccggcaacttttgcaggaacgatattcatcagcacggaagacggatatacagcctttccaccgggaacgtaaacacctacacagttcagagcggttaccttctgaccaagcatggttccgtctgttgtgcttgtgaaccagctgttctgaagctgcttttcgtgatagctgcggatattcaccaatgcttttttgatcacatcgatcagggaaggatctaccagcttgtatgcttcctcgatctcctcaggggttacacggatcgtatcctttgtcacttcgactttatcaaattctctggtaaatgcaaataacgcggtatctccctctgcttttactttggcaaggatatttgctactgcatcctcgtattttccgtaattattagggcttctttttaagagagtttccagaatatcttttgtagattctttggtgagttttaccttacgcataataaattctgccttctttctgtattttggaggttcatctgttgttcagtttatttgatcacacttcgaagttctgtgatcagtttgcggatccgttcatcttccattttcatgctgacctgattgactaccatacgtgcagacagcgggcagacttcttccagcaccttcaggccattctcgcgaagggtgcttccggtttccacgatatccacgataacctcggaaagtcctacgatcggtgcaagctcgatggaaccgttcagcttaatgatctccacagtctgatgctttttgttatagaagtaatcctttgcaatatttggatattttgtagctacacggatcagctgattgttattcaggacttctctggcgctttcagggccgcatacgcacatgcggcatgctccaaatccaagatccataacctcatatagctttcttccttcttccagaatggtatccttacctacgataccgatatctgctgcaccatactctacataagtcggcacatccggaccttttgcaaggaaaaacttcagcttcagttcctcattggtaaagatcagctttcgggaatctttgtcacgcatctcctcacatgtaataccgatcttctcaaacatatccagtgttttgctggccagacgcccttttgtgagggcaaatgtaagatatctcatcagtcctgctcctcctttgccgggcacaatgccacttttttacctttatttcgaagcgccattgcttcctggatcgcttttttcagatttcccggatcataggtgatcacaatggtcttatcaccggacggaacagtcagcttctgtctggaaagcgcgagcatcaggttatcgaccacaatggcaaatccaatggaagaagccggttttccgaaatgcttcatcaattcgttgtagcgtccgcccttgatcaggggttcaccggttccatatgtataagcctggaaaatgatccctgtataataacggaacttactgagcattccaaaatcaaaagcaatgtatttctcacagccgtatactttcaggatctcataaatttcttccagtcgttttactgcggaaagtgcttccggattggaggtgagtttttttgctttttccagcacttctgctgaaccgaacatctgaggcagttcagcaaaagccttggaaaggttatcgcctaaattctgtcccttaagaagctcttccacaccaaaataattcttctgagagatcagctcacgaagatgctcttctatctccggctccagatctgcctctgcaagcagcgatttataataatctacctggcctacgctaacctggaattcggtaagtcctgctgccttcagacactccacggtcatagcaaggatctcagcatctgctgctgcagaatcatctcccatatgctcaacacccatctgagtattttccttcagctgacctctgtaactggaattgttgataaatgtatttccggtataacaaagtcttacaggtcccttttccggatcaaaataagttgcacatgctctggaaacggacggtgtaaagtcgggtctgagaacaagtgtgtttccctctctgtcaaaaaatttatataaatccttggatgggatcgttcctacttcattgctgaacacttcaaaatactcaaatcccggtgtttctatatcttcatatccatatcttgaaaacacctggtggagctccttctggagccgttttttgcggctgcattcctctccataaatgtcccgcacaccttcaggtgtatgaaaaatacgctgcatgttcatttcctccgtaacacgttttgagattttctgtgtttcactttaattcgctaccatgctaccacagaaaagcttaaatttgattatataggaaacctttccaaaagtcaatcccgtaattgcagatctttctggatcccttccagataaggaaccagaaatccattttttccggaaagataaaattcctcgtccagctcttcccgacgaaaactttttcgcccgccatcttccatccttttccagaattccttcagcttacgaagggtaagataataaaaaacattatctgcgctgaaatagatcagaaaaaaagcaatccccttctgcttttcaaactcatccataaatgctacctgatgaggatgaatgttcgcaaggggaaaagtttttacacagcattcttttgcatcgaagcagacagggattccctgtactgctccgatataatctacggtacttttctgttcaaaatatgccagcgtgatatgccgggaggttttatccattttaaccggagtgataggtgtcggaattttctggatgagggccagtcccttttccctgtactgctcattggtacgattgataagttcctccagagtagaaccacgaagtcctctgctgttccatgttgccataaagtctgccctttaatttagaagtttgatggatgggaaataacggatctccgcttttccgacgatctgatcaaactgtacatatgtattctgccagtatcgggaatccttggaattgttacggttgtctcccatcataaagtaacagttttccggtacttcgtatggtccgaagcttccaagaggagtttccgacacaaaggaatcatccagaggtgtctctgaatcattgatataaactttaccatctttgatctctactttatctccgggaagaccgatgatacgtttgatgaacagctgggactcatcatccggatatttgaagatcacaatgtcaaagcgttccggatctttccatttttttgagatctcgtgaccaaatacatccatattcagaccataggccagacgatagccaaagatacgatccccggtcataatggtattttccatagattctgacggaatctttgcattgatcagtactacattgttgataactaggactacaactaccacgatgatgatcatcttgacgtaatcccatatttcattccagattttcataataactctcctccaacttttcctcttttagtgttctgagaaagatttccggaagcggtgccgtaaagaccttcccggataaatatgacaggcttcctttcatagatggaaactccattcgaaaagaatgaagcagctgtcctttcagttttttatcggcttttccatatttgggatcaccaacaatcgaatggccctccgaagcaaggtgggcacgaatctgatgtgcacgtcctgtgatcagttcaaccttaagaagggtacgggttccattggtacccaacggataatactttgtttccactggcagggcattttctttctcttgtttatagatggttactttgttgctttttttatcttttgccagataacctttgatatatctttcttcttttaaaactccctccacaaggcagaggtaatatttatgaagttccctggacttgaacatccctgaaagttcctgcagaccggaaaggcttttgcctgccgctataagtccgctggtatttcggtcaaggcggttgcatacggaaggacgaaaggttctcagatcattctctgtaagagagccatttttcagaagatagccggtcagatattctaccagtgaaggggttccgtcatcagcaggctgagaaagcattcctgccggtttgttgatcaacaggatattttcatcctcgtaaatgatatccagagcataatgtgcccgtggagcagaatcatttccgctgaatttttcaaatgtttcatcacttaaaaacagttttacatgatctcctgaaaacagcttttcattcccggtggctttttttccattgagcgtgatattttttttcctcatcattttgtagaaaaagctctttggagcttcgcggagaagcttggccagatatttgtcaaaacgctgtccggcctcgttttcgttaatgataaattctttcattatataatgctcctacagacagattgccaggatcgtatgtttgatcagttcttctctggaaagatccgggtatcgttcatccggtgtgaatttaatcccgtttctcagagattctttgtgctcattcatggaatccagacgttccagatagggcttcaggtccttcaggatctttacatccactttatatccgtttttacggatgattttctgtgactgctctgcaaggtaggtgatatctgcttttggatcactggtataacccactactgtatttccgcacacggcaacagcgtccagataaccgcttttctcataaaaagtcatgtacatttcataggacatgaccaggtctcctgcatgcttgcggatctctttatagagcttttcatccataggatgacgtaacaggatcatgatcaggcttaccatggatttacagcctggcagacagcctactacggtcagaaccgtccagactgtcattcttgttccgttgacggcccacgccacaaagaaaatgagcagtggaagcgaaaataatcctgcggtgatcaggagtcttcgttttttttcgctgttaaaataaccgaaatcacctttttttgtttttctttttctggtatctttcatgtgccgaactccttgtctgtgtttttttggcttttttatgaagctctctgggacggatcagacatttcggtccaaagccgaccagatccatacgtccggtcatcttaagtccttccaggaccagttcgcgattttccggatttttatactgcatcagtgctcgctgtattgctttttcgtgtggatttttcggcacatataccttttcgcctgtcagcggatggattcctgtgtaatacatacaggtagaaagtgttgatggcgttggataaaaatcctgaacctgctccggcgtaaatccaagatcacggacgtattctgcaagcttcacggcttccttcattgtacacccgggatgggacgacatgaaatacggaacggcatattgctgcttaccagtccgcgcatttgctttttcatattccttcagaaagccctcataaacctcgtgcctgggtttgcccataaacttcaggacttcatcagaaacatgctccggtgctacccgcagctgaccgctgacgtgatatttcacaagctcattaagaaaagttttatccgggtctgccatcagataatcaaaccgaatgccggaacggacaaaaacttttttaactttggggatattcctgacctttctgagaagctgaagataatccttgtggtctaccgtcagattcttacacggagaaggaaacaggcactgccgctccttgcagactccttttgtcagctgctttttgcaggaaggataacgaaaatcagccgtagggcctcctacatcatggatatagcctttaaaatccggatcctccgtcatcttttcagcttctttcagaatggaatcgtgacttcttgtctgaaggatacggccctgatgaaaggtcagcgcacagaaattacagcttccaaagcatcctctgttgctggttagactgaatttgatctctttcagtgccggaatcccgccttctttctggtacatgggatgatatcgtcctgtataaggcagatcgtaaacatcgtccatttccatctgtgtcagaggctgagatggtggattctgtatcacatatccacggttcccataagattctgccagaggctttgctgtaaatggatccgtgtttcggtactgaatggcaaagctgtccgcgtaagcttttttatcggtctgtacctgttcaaatgacggaaggaccaccggatcgtaaaccctgctgatatcgtggcttttaaaaaccgtccctgccacatatgtgatctcctggaccggaattccgctttgcagggcttctgcgatctccaggatggaatgttcccccattccataagagatcagatccgcaccggaatcgatcagaatactgtgcttgaccttattttcccaataatcgtaatgtgccattcttcgaaggctggcttcgatcccaccaagaatgataggcgtatgtttataggtctgccggatcagattgctgtatacaacagaagccctgtccggtcttaatcccatttttcctcccggagaataggcatctgtgcttcggtgctttttggaaaccgtataatgattcaccatggaatccatgtttcctgctgtaacgagaaaacccaggcgcggttccccgaacacctggatgctctccttctttcgccagtcaggctgagggatcatgcctacacgatatcctctgctttccagaagacgtccaatgatcgcagatccaaaagacggatgatccacataggcatctcctgtcacgtagacaaaatccaactcatcccagcctcttgacttcatatcttctcttgtaactggtaaaaaatcctgcatttataattcctcgtatgtatgtgtattagtactgtctgccctgtgttcatatgctgtgatggactgcctgggcacgataaccctctgcaatgatatccagctgcctgtggaagcgttccagctgacgcaaatccttggttttgaatacccgcaggaactcatcctgtattttgctgacttcccgttcactggaaacacggtagagattttcaatattattcaaaatatcctttacaagattggactgcatctgagatgaattctgggcatccatgatctcattgcgcacagaagacatttcatgatccagcgaaatgatcgcatcggatgctttactaagacgttctgctacatgaggaggcatatcacctttgtatttatactgaagggaatgctcgatcgttgcccagaaattcattgccatggtacggatctgtatttctacctgaagccgtttcggcccatgaatagtttccactgtataataaaggatcatgtgataactccggtaaccgctctgcttgatatgcgtcagatagttcttttcacttttgacttccatatctgttctttttcggatgatcgcagcaacggtatcgatatcttcttcaaactgacaaatgatccgtactcctgccagatcttccatttctgtttccagctgttcgatcgggatatctttacgctgcattttctccaggatactggaaacactttttactcttccactgacttgttcaatgggagaataacgatcattttcgtgatactcttctatcatatgtttaaacttgactgtcagttctttgacagccagctcgtaagggcacaaaatacttcgccataactgtatttccatgttgctcgctccttatcatctgccgccagtctctttttggttttggtgacagcggcatacattttttattataacatatgttttgaaaaaaaagggattgtttatcaattttttattaaaaaattatagaattattttcctttttgtgtgatgcatccacaaatctatatatatgtataattctgtattttatgaatatttttttatcagggcataaaaataccctggagaaaccttacgtctctccagggtaaaagttcgaacatacttcgaacggaatcagtctttcagatttttgagaacctgtacaagatagttccatactctttctgtggaagcaatgctgagaacctcctcggatgtatggatatccttcatatccggtccaagggatacacagtccagtccttccatttttttatagaaaagcccgcattcaaggcctgcgtggatcgctacgacttcaggcttatgtccgtacatttcctcaaaaactgcaaccattttatctcgtaatggagattcctttctgtactcccatgccgggtatgcaccctgtacttcatagtcaccaccaagaaattctgtgagatattcaatcttatcagataatgcactgcatgcagcgtctacagagcttcttacactggaacttgcaaaaagctcgtccctatccagacggaggataccgatattgctggaggtttccaccaggcctttgatggttccgctcattttctggattccgaatggtacattctgcagataaaatacgatcttttcctgacttgtaggatgaagaacctctgctgttgcagtacccttttctgttatttcaaaagtaatgttttcgtcagaaccagtatattcttcacggagctgctcctggagctcttttgcgtaagcttttacctcagcaacggaatccgtaagaaattctgcggtgcactctcttgtaatggcattgtctttctgtccgcctgtaagagaaataagggcatattccgcttttttcttaagtccgtaaagaaaccgtcccataagtttattggcattcgctctgttcttgtcaatctcggcaccggaatgtccgcccataagtccacagactttgacctgtaccttttctccttctccttctacacgctgggcagggatatggctgataccggaaagaccgccggcacagctgatccagagacttccctccgcttcagaatccagattgataaatcttcttcccttcagcacgctgcagtccagaccgactgcaccaagaagaccaatctcctcatcaaccgtgagcagtacttcaagaggagggtgtggaatatctgtactgtcaagaagggcaaggccataagcaactgcaataccatcatcaccgccaagagttgttccgttggctgtgatataaccatcttttacagagatgttcaaaccatcttttgtaaaatcatgatctacatccggtcgtttttcacataccatgtccatgtggccctggatgatcactgtgggagaattctcatatcctggtgtgcctggcttgtagatcactacattattcagctcatcctgtacatatctgaatccatgatccttcgcgaattccacaaggaaatcactgatctgttttgtatttctggaaccatgaggaatcttgcagatttcttcaaaataatgaaaaactctctttggttcacaattttctaatactggcataaattctgcctccttctgcttcataaattcatttgtcttttataataatcatatactgtaaaaaaagcaaggacctgtttttatgaaacgaaaaataatcatatttttctatatctgcctgttgttttttctgctttttcacccaaaagaagctcttaccggagtaaaaaatggacttggattgtggttgaatatcatgattcccactctgctgccatttctgatcctgacaggagcattattaaaaactggaaatatccggaagcttctgaaaccatctgctttcttctggaaaacgtttttcgggctttcacctgctggagcctatgttctgatcctgggtctgttatgcggatatcctatgggagccaaactggcacatgatctgtacatagaccagcagatttcccgcagagaaggggaatatcttcttacgtttagctgcaatgcaagtcccgcatttatcatttcctatctttccgggatactcttgaaaaataagatatcagcagtacagatgatcctcacttttctggcggcagatctcttttgtatgctgttttttcgtttcgttgtatatcgcgggcataccgtggactctgtctgcgtaaacaagataaaaaaagagacataccaacaggactccataggagtcatcctggatgtctcgatcatggacggatttgaaaccatcacacgtctcgggggctatattctcctcttctcactgatactcgccagtatcagcttttactggccatttcatgcacaaagctgtatgctgttcacagcaccactggaactaactaccgggctgaaacagattgccagcgcaccactaccatggaaaagcagataccttgcttctatgctcctgacttcttttggtggcttttgcgtcatggctcagacaaaaagcgtattggaaaacagtttgtcactgatcccctacgctatttcaaaatgtctgaacgccagtgcgatattcctgatcctagttttctccgatatcgtctaacagatcttcgtcttcttttgttatagaagaactgtcatcatcctggaaggtattggagattgccgctgcctgagcagtctgtggtgcaagctcctgacgattatgattaacaacctcaaggcagctctgcagagcatcaataaatgctttgtatttaccaccggcatcttcaagtgtctgattcaggacagaaccgatattagccatcatatcatctgtgtatgtgatcgcactgagacgaatgctgtttgcatcctgtgttgcagaatcaagaatctcctgagcctgcttgtttgcagcatttatggtctcatttgcctgtgcatatgctttttgcatgatctcatgctgtgtaacaagttcctgagctttggcctgagcatctgcgatcagactgtcagctttagcctgagcatcctcaaggatcgcatccttattgctgatgatcttctgataacgtttgatctcatccggagttttcagacgaagttcacgtaaatactcctcaatctcttctttgttcactacgatcttggtagtggaaagaggctggaatttacagctgtccacatactcttcaatctcctgaataatctgttcaattctgctgctcataatacactctccttatttctctgtttctctttttttcaatttctcttcgactgcatccgtaatctcacgtggagcgaatttgctcagatctcctccgaaattagcaacttctttcatgatcgtggagcttaagtatgcatattccagactggttgtaagaaaaacggtgtccacatccggtgccagaacacgattagtctgggccatctgcagttcatattcaaaatccgtgacagcacgaagccctcgaacgatcacctgagcatggttttccctggcaaagttcactgacaggccctcgaatgctttcacctccacattcgggatatcttttgtcgcctttgttagtatcttaacacgttcttctacagaaaacaacggactttttgcagaattatgcaaaactcccactataacccggtcaaatgaaatgcttgcccgcttaatgatgtcaagatggccataggttgccgggtcaaagcttcccgggtatactgctgttatcatatgtctgtctctctttcatttttttaggaaaacatgcttgttggttttatattccttggaacgtaccagatgatatccaaggtcctctacataagaaaaatccgtatatagatcttcctccacaacgatcagcgtgttttcatctgcaagagtgctgtcagccagatactcaaggactggttgttccagatgctgttcgtatggtgcatccataaaaatacagtcaaatggttctccgccttccagtgaacgcagtgcctgaagcacatccatgttcagcagtttaccaccatccgtgagttttgtaaatgaaagattttcgcggatgcaagtacatgctttgggatttttttccacaaatacggcatactcggctccacggctcagagcttcaataccgatcgctccgcttccggaaaacagatccagaaaccgacaacccggtatttcaggctggagaatgttaaaaagagtttccttaatacggtctgttgttggtcgtgtctcatttccgggaatggtttttaagtttaatctacgtgcttttcctgctatgactctcatttcagatttaatctccaatccagatcaccgcgggccagtccaaggatcagaagttccgcagtggcaatatttgtagcaaccggaatgttgtactggtcgcagcgtttgacaatgctcatgatatccggctctaccgggtccatcatgacagggttataaaacaggatcaccatatccagatcctgacgctctaccatctccataaactgcttgtctccgcctatacttccggcaagaaacttgtgaacgtgaagactggttgcttcctcaattcttcttcctgttgttccggttgcatatacttcatgtttggcaaggatattcttgtatgcaatacagaagtcttcaatcagaactttcttactgttatgcgcaataattcctaaattcataattcacctctccattctgcccttgggttacatcccttttctccccttttatataggtaaaatcatataactctgtaactgattctagcataacgcccaaaaaagtgcaatttaattcgtgtaaattcatgaaaaattaatattttctgttgctgagaacggagtgtacagtaactattttctccgacgttgcttcatataccctattcttcccagctgtttcctgtagtataatcaatttcaattcccggctgtatgttataaacaaaaacatggaaagatatcttctggtctttaacggattcggcttccatttccacaccccgggctaccagttcatctcccttaaaaaacggagttacacgatacatgcagggatttcctgtactgtgcacgtaatctgcaacctcattttcaaaaggaagcattcccgtcacattgagatatctggttcctgtgataagatttttcctgtttgcattctctccagtcagctgatatccgataagatggcagcgattatacagatacctgccatctacattttcatattttacagtatgccatcctgtaggcttcaccattccgatcgctcctcgctcttcatcaggcatcagctccggtgtgatcttggattctgcataaccacagcgccccagggaatctagttcactataaaattcgtatgcaggtcctgcgcttttttcatcagaaaaagagggtatatttccattgatctccacatatggactgccgctgtattccggaatctgatccagagaaacagattctgtctgccctcctgtcttcgtctgagattgtttcagtaatcctgtcactgcatcggaagcgaattccgaaatatcttcccagaggatctgtgcattttcttctatatatgtaagaaatacctgtccgaagatccggctttgatcttttacctctttcaggctccgcggcggcatccagccattacatactgcaaggatgacacacaggataatggctgtaagtatttttcgcctgggctgtttttttcgtttatattttctcttgtatgtaggataacgcttctttttcacgggacccccttactttttttgtctgacagatattatatgtgatgcagagattattataaccgcaattccagtcaaaaagcaaccatacattcggtttttactgcggtataatttatgaacagaaatatttttatatgttaaatttcctttaactgccagtgtattattttatggttttcatatactagcaatgtaacagtaaaccaaataacaaccaaggaggaaatgaattatgccaagtaacacttcttctaacaaagcagttgttccggaagcaaagggcgcacttgaccgtttcaaatatgaggtagcaaacgagctgggtgttccgcttacagacggatacaacggaaacctgacttccaaacagaacggatccgtaggtggatatatggtcaaaaagatgatcgaagcacaggaacgccagatgtccagcggctcccagggcggccagcagtactaaatctgtacgcgcaggtagatctattactatgctgagttgatctaagctcatgcaaaaaaagatgctgtctgacagaactgaaaaactgccagacaacatctttttattttatataaaaagaaatcttatttcacaaacatatccacacattatacaaacattgacactccccacagctaaagc

SEQ ID NO: 223 - DNA, 18307 bp, Unknown
  gut microbiota DNA sequence
cgatagacggggctcgaacccgcggtctcgaccttggcaaggtcgcgcgttaccaactacgccactatcgcatatgccttatcgcttcaagtatttccctcagcgacaagacatatattagcatagattttatattctgtcaaatgttttttggaatttttttgaaattatatacaacatataaagtttattccagacatctgaaatagaacttgtatatgacaatatttggtggtttatgagttattgtctaagtggtaatagcgcaaaacatgatccggatagtattggtcaccatagtcccatggaccggcaggatcatgaaggggatcatcttcatcacgttgtgtgttgccgcttgccatctgggcaaaggcctgagcactttgggccgtccacacagtctgaccgttttcttccagataagcaaaataggaatcagctccgaaattgtatgcctgcagagccagacggatcttggaaagatcagtcggaccggtacagacggccttttccagagcatatttcagttcctggatgccacaggaaatagagtaagaaggatctgtgataccattgggctgctgaggatatctggtgttgtaggctccttctgaggactgcatgggatcggtaccctgtccggagctttcctgcatcatcacagccaggatcaggtctacatagtcggacatatcatattgtgctgcttcgctggaaacctcatcgcgataagcttcacaggctgcattgatctgatgggcttcctcctgcctgccggaaaatttggaaaaacgcagaaggatacagcccacgatcagcagaaaaagacatgtcagaaagatcttctgccttcgcacctgctgtacacggagtttgtggcgctgttttttagtaagggttggtttcttgtgttttgtattcatataagtattgtatccgttacggatagatttgaccagttaaaaaatatgatctttttgttaaaaatttctgaagactgtcctgtgaaattgcaaaatatgatctgatatgctatgatagtcgggacaaaccgtagaatgccggaagaaaggaggcaagatttcatgcgaaaaaagcttctggcagttattttatgtgcttctatgtttttccctgcatccgtatcagcagaggtactgggatatgaagcaacactggatacatatacaaaggagaaaaaaacacctcagcagtttcagatcgatgatggggcgggaaatacagtaaatgttttggcgaagagtgatacgctttatgttacagcgaaaaatacggaaatccggtccaatccgggagacagtggtacagagctgcgttctgtgatcctgggaacgaaacttgaaagagttgcagtttgtgacaatggctggagcaaggtgaccttccaaaagaaaggtgaggacaagatcatcggttatgtttcggacagcgtgctcagtgatacggagatcgtaaataaatttacggatacagttacagcggcacaggacagtgatatcctggattatcccggcaagaaagacggagaggttgtaggagaggtccttcaggatgatgagttgaaaagaacaggtacggtagatgctgatgctatctggagcaggatcgtttacacagatgacagtggttcagatcacgtcggatatattccgaccagctgtctggaaggttatcaggctacggaagtggccaaggcagagcaggaaaagaacacaaaagcaggatcccttaccaagagttcaggggaggggatttttgcggatgcagtggatggtgtaacttccacaggtggttccggaagtaccgcagctggcgtacagatcggaacgccggtatcagtatcttctgacgcgacactgaaaccactgggaacattccggatcacgcattattgtccgtgcagcatctgctgcggaccatgggcgaatggaattacttccacaggagtaacggccactaccaaccgtacgatcgcagtggatccgagtcagatcccatacggttccaaagtagtgatcaatggccaggtttatgttgcagaggactgtggaggagcaatccggaccaattgtatcgacgtatatgtggcaacacattccgaagcagagcagaagggtgtgttttatacagaagtatatttgcttcagtgatcagaaaaagactgctgtagattccattccataagggatttgcagcagtttttttgtataaaaaaactctgaccagcagaggctattctgcgatcagagtaaaaaaataatgcccagagccggaatcgaaccagcgacacgaggattttcagtcctctgctctaccaactgagctatctgggcatgtctctttcgagtactttgttactttaacacatttatgtagagaatgcaaggggaaaataaaaaaagcagatgtttttctgaaaaatctgattttcaaaaaaacatctgcaatattatggctacagatttatctggcagcaagatagattttttccatatctttcatgttcagctgtttgaacacaccgatggtacgggtgtcttcaaagctgcatttaaacgccagatcatggatctccttttctgtaagatcaagaccaagctcatgaaggctggtaggcatctggatggaacgaaaataatcttccatggcttcaatgccggcaagggcagttttgttgaagtcagtactgcagggaatgtcaaatatattgactgcaaactgggcaaagcgttccggatttgcatcataaacgtaacgtgcccagcttccccacaaagcggcaagaccagctccgtgagctacatcgtaggtgccgcccagttcatgctccagctggtgacaggcccagtcaccaccgcctgttccgcagccggtaagtccattgtgggaaaggctgccggcccacatgatctctgcccgtgcagtataattatccggctccttcatcaggatccgggagttatagatcacggtctgcatcagagattcgctgatactgtcggtgatctccatggtttcgatatttacaaagtaccgttccatagtatgcatcaggatatccacacagccgctttcggtctgatattgtggcaggttataggtgagtcgaggatttaaaatagcaaaacgtgggcggcacagatcgttgcgggcactactccgtttcagccagccatcttcattggtgatcacacaggatccgctcatttcacttccggaagctgcgatcgtcaggataacgcctacgggaagacaggcttttggggtttcggtgcggagaaaaaagttccatacatctgtatccggattggcaagtccatagccgatggccttgcaggaatcaataacgctgccaccgccaacagccaaaagaaaatcaacctgttctttgcggcaaagctcaataccctcacgtaccttagagagacggggattaggaaccacaccgccaagagtgacataggagataccagcttcatccagagaagatcggatctcatcgatcagaccggagcttactgcactgtggctgccataatggatcagtactttgctgcagttctgctcttttagaacagtgccgatcttaaggtgtgtatctttcccgaaaataacccgggtaggggtaaaatattcaaaatttctcatagagattaggctcctttttatgatcccgcaggggtatcatcttggttcatttaattggtttaaagacgttataataatagcatagaagagaaacagacgcaaataaaagctattgaaaaaagggtgtaatttttggggaatgtggtataatgacttctgtgaaggaaaagtgacctgatcacagaaacagaccaatgcgaagcgtatattatagaacagatccaaatgaagaagaaagcaggtgtctgaaatggagaatatcattatcataggagcaggtccggccgggatctcggcagcactttatgcggcaaggggaaatatgaatccactgattataaatacagggatcggttcactggaaaaagcagagaagatcgagaattattacggactggagcagccattgtccggcagagagctttttgaaagaggtcttgcccaggcaagagcacttggagtacggatcctggatgcccaggttgtgggaatgggtggttttgatacttttgaggtgaaaactaccgcaggagattttgaggcacgcagtgtgatcctggcaaccggaagcaggagagcttctgccaggattccgggagtaaaggaatttgagggaaaaggtgtcagctactgcgcagtatgtgacgcatttttttacagaggaaaagaagtggcagtgcttggaagcagtgattttgctcttcatgaagcagaagaactttctcataccgcttcccgtgtgacgatctttacagatggaaagaaaccggaattttcaagagaaaatcagcttccggttaataccatgaagatccaggcaatcgaaggggatgaacgtgtttcaggcatccgcctgaaaagtgatgtgtccatgcaggaggcaggtgccggagaagattcttttgtgccggcagagggagtctttgtagcgcttggtacagccggaagctcggagatggcccgccagatcggcgcggagctgaatgaaaaaggaaatatccggatcaatgaagagatggagactacagttccggggctgtatgcagcaggtgattgcaccggtggacttctccaggtggcaaaagctgttcatgacggtgcccaggcaggactttctgcctgtcggtatgtgcggaagcttttgaaagcggaggcataagctgaaattaaaaaaaacaaatacaggatcaaggaggaattttatcatggcaaaagtttttacaacagacaattttgaaactgaggtattaaatgcagaaaagccggtactggtagatttttgggcaacctggtgcggaccatgcagacgccaggctccggtcgtggaagaacttgcagaagccggatatgaagttggcaaggttgacgtagacaaagagccatcactggcacagcagtacaagatcatgagtatccctacactgctggtattcaaaggaggaaaagagaccgcacgttttgtgggactgacatcaaagacagagcttgaggcagcgcttcagtaaccaaaacagaaaacagaaaaaacagatacagctctgggaaccgaaatggtttccagagcattgttggcttactgaaaattttaaacaagggttaataaaatatggatgagaaaataataaaaaagaatgcagtgcctgtgatcgcggcaatgatcacagcactggccttttcttttacgggccttccaatggatggcaatacttctgcagagaaaatgagcaatgtttataatggattgggatgcatgagcttgcttgcatggatcctgcttcttattttatacgtgaaaggatgggagggctaccggaaatacagaaactggcaggcacatgttttggcagtgatcttttcagcgggaatgcttcttggaacttcttattttacaaatggaaactgggattttctgtttggcgcaaagaaacagatcctgatctcagccggatgttttataggattttatattatctgtgatatgggaatcacttatttctggaggattcctgagatggagtttttccgaaaggcctgcgggcgtatcccggccagagaggaagaggtaatgtggttccgcctggcaaagatatctatgatcattggatggacaccgtttatcctggcatttctcccaggttcgatcccggcagatggatttcggcagctggatgtatttttgggagctatgccgctggacaatcatcatccatgggtcctgacgatgatcatgggtggactgctgacacttggaaaaactatctggtgttataattttggagtatttctgatcgtcattgtgtttacttctgtggaaatctggtgttacagtgcggtagtccgctatctgtacagatggaaggctccaaaatggatactttttggtactgttctgctgtttgcatttgttcccatatttggaagctatgcgcaggcagtgatcaaagatggcttgtatacggcagtcattactttgtattttgcagtgtatatagatatttgtcattccttttccaagagaaaggcagtatatttatttcttctgggaatcagtgtctgtcttacccgaaataatggcattcatctggtcctgccttctttgatccttttgtttttcttcctggtaaagggagcgaggaaatatgcatttattgtggctgtctgtgtttttgcctgttatctgggtgtagaaaagggggcagcacctgcccttggcgtggcacctggatcccgatgtgaaatgctttcggtaccgtttcagcagactgcccgatatctgagagaatatccggatgatgtaaccgcaagtgagaagaaagcgatcaacaggatcctggattatgatgttcttgccgagaagtataatccggaactgtcggatcctgtgaaaattacattcaggttcagagataatgatgatgatcctaaattggatggatacatgaaggattattttaaagcctggtttgccatgttccgtcgtcatccgggagtatatatccaggcgacattgaataatatttacagttataatgatccgttccatatgggaagaggacagcagggcgtgtaccggttctacatagataaactgtatcagaagaaatccaggatcgatgtcagttatgttggaccaaaaaaaatccagtatatattccggctttatgatgaattatggatgcgcgcacctggcctgggacttatcctaagtgcaggaacgtatacatggcttaccctgttactgataggatatcttcttgtgaagaaacaatggaaaaaaatcctgatctttgccataccggtgctgaatatactgatatgtcttgtttctcctgtaaatgggatgatccgttatatgtggccggtaatgactattatgccgatgctgttctggtggattctgcagccggcaccaaaaatagcttcaaattaaaaaagattcatcatttcataaagacgtcttttatccagaatgcggatcgatccccgtgagatctggatagagccgtctttattcatttttttcaggctgcggctgacagcttccctggcacttccgatggagcgggcgatggcttcctgcgtgagagcaagctcatcggaaccggtatctgcagcttcatccagaagaaaggctgcgatcctctgagtcagggtcataaaaaatgtccgttcgattcctgcaatcacatctgagaaatgttcagttgtccgtttgtagatgaaattttccagatagatattgtttttcatcagccgggaaaaaggaactgccggaagcagaagcagatcacagtctgtttctgcatcgatctgtacatcaaatgtaatggcagaaagcatgcaggaggcggaaagagtgcagatatcactgtcccttaaacggtacagggtagcctcttttccctgagcggacagtagataaacacggagaactcccttcagaagaaaaagagttcccaggcactggcgctcttcagactgtatggcagcacctgccgggtaatgaagctcgcgaatgttatcaagaagaaaattccgatcttcttcagtcatatgttcccagaagggaaacgcctgaaaataattcagacagctgtttcgatccataaaaagattactcctttataaaaatatatagtactcattttaacgctgtttggatggaaatacaacaaaaacggcatttttgtggcaggagggaaatccctgtttgttactgttcactccgttctcagcaacacgcttcgcgatgcacagaatttatgctgatcgcataaattcgcgcggtatgtctctaacccctgtttttctatttacatccggtggagggaacgttataatcataaagcgaaaagaatcaacagagaaataatgaaaactgccggggaaagaaattatccgacagaagttaggagaatataaaatttgaaaatcttacttgcagcatgcaatgcaaaatatatccattccaatctggcggtatataacctgaaatcctgttccggagaatacagctccagggttgtggtcaaagagtacacgatcaatcagatcagggatgacattttaaaagatatttatctggagcagccggatgtgatctgcttttcctgctatatctggaatatttcctttgtcagggaactagtgccggatcttaagaaaattcttccacaggtggaattttgggcaggaggcccggaggtatcctacgatgcggtggaatttctgaaaaagaatcctgcgttttttggagtgatggtgggagaaggagaggaaaccttccatgaactggcaggttattatatagaaagaaaaccggaaactttgagcgagatccgtggagtggcttttcgtgatgaaaacaaagacaggaatattgtacacacgggctggcgggaattgatggatctaagtaaagttccgtttgcatacagcaatcttacagagtttaaaaaccgcattatttattatgagagcagcaggggatgccccttttcctgcagctattgcctttcttccatagataagaagcttcggttccgtgatattgagcttgtaaaaaaggaattgcagttttttattgataataaagttcctcaggtcaaatttgtggatcgtactttcaactgcaagcatgaccatgccatggagatctggaggtatattacggagcatgacaacgggatcaccaattttcactttgaaatttcagcagatcttctccgtgcggaggagctggcgctgatgaaaaccatgcgtccgggtctgatccagctggagattggtgtacagtctaccaatcctcagaccatcaaagccattcggagaaccatggattttgaaaagctgaaaaggattgtagagcagatccacagctttggaaatatccaccagcatctggatctgatcgcaggacttccctatgagggctatgatagcttccacaagtccttctgcgatgtttacacactgcatccggaacagtttcagcttggttttctgaaggtgctgaagggatcacacatgatggaaatgacaggggaatatcagattctttataaggatcgggaaccctatgaggtactttccacagcctggctgacctacgaggagattttaaggctgaaaatggtggaaagtatggtggaagtgtattataatagtgggcagttcaaaaatacccttgtatttctggagaagtattttgacgatcctttccggatgtatgaggcacttggcagattttatgagaaaaaaggatactcggagatctctcattccagaatgaggcgctatgagattcttatggagtttgccggagaacagaaagagatcccgctggaagcactttccgatgtaatgctcctcgatctgtatcttcgagagaatttaaagagcaggccatcctttgcttcagaccagaagccgtatgagcggcagatttgggattaccggaaagcaaaaaaaatcccgaaaaccgcccatatcgaggtgttccgggatggaaagaggcttctttttgattatacagacagggatcctttgaccaacaatgcacaattaacggatattacagatgaggtgaataataattatgggaatgtttgatccgaaaaaaaggaaagtgatcacagcgatcatcgcagttattctggtactggcaatggtagttccgactgtgctttcgcttatcatttattaaggcggcagttatgaaacttggaaaaaaggcactggaggcgcttcaggcagaaatagacgggcggcttatgccgggagatgagctgatcgtggcaggccctgtggctgcagaaggaactgcatggatcacaaagaattatcatgacagactgcgggatgtttttgcagaacggtttctagaggatgttgtgaagcttccggaggtttacggaataggaacagaaaaagagaataataagatctggaaaatggcggaagaatccggagccagtgcccgatatctgatgggagaaggtggatttcttgctgccctctggaaaatagcggaggcatccggggtaggtcttagcgcagatcttcggagtgtgcccatccgacaggaaaccatagagatctgtgaggtctttgatgtgaatccgtacaagctcctttccagcggaagtattcttctgggaatccgtggaggcgatgcgtttgtgcagcagctgcggcgagaggggatcatggcagcagtgatcggacagaccgattccggaaatgacaggcttctttacagcggcggaaatgccagatatctggaacggccggcagaagatgaaatcaaaaggcttggctttttgatttcatgagcaggcagcgaagcggattgcgaatgcatattttgtatatttaatgttatgtagaaaagaggaaaataataaatgggagttttgaatattgtgctccatgagccggaaattccggcaaatacaggaaatatcggcagaacctgtgtggcaacaggaaccaggctgcatctgatcgaaccgcttggtttccgcctgaatgaaaaggccatcaagcgtgcaggtatggattattgggaacatctggatgtgaccagatatctggactatgaggattttctcaaaaagaatccgggagcaaagatttattacgcaaccaccaaggcacctcagacttatacagatgtgcagtatgaggatgactgtttcattatgtttggcaaggagagtgcgggaatcccggaggatatcctggtaaacaatcaggaaacctgcgtgcggatcccgatgatcggagatatccgttccctgaatttaagcaattcagttgccattgtgctttatgaggcgctgcgacagcataatttcacgcatatgaatctggaaggtcatctgagaaattacgactggaaataagcctgcaaagagtaaataaaaacctctgatctggaaatactgtaggagatattgagagatatttcttttacagccttccggatcagaggttttttgatgttttattttgatttttccagtgtaaagataaattctgttccaacacctacggtgctgatcacattgatgttctgcttatgagcgttgatgatctcttttacaatggcaaggccaagtccggtacccttgcggtcttttccacgggaggcatcgatcttatagaaacggtcccagatcctggaaagactttcttttggaattccggttccatggtctttgactgagacaaaaaccttgccatggttgacggtggtttccagtgtgatggaagaattgtcactgctgaattttactgcattgtccaataaattgtacagtacctgctgaatctgttccatatctgcacggacaaaaagctcttttcccgcaaggaggagctccagacggatgtttcgttccgaacaggttccttcaaaggtggcggctgtggtacggatcgtttcattgatatcaaaacgccgcatatgcatcatacgctttttgacatccagttcgtttaaggtaaggagacttcgggtaagcttttccagacgggtggattcaaaagcaatgacctttagataacgttcctgcatttccggggggatggtaccgtccagcatggcttccacatagcctttgatggaggtcagaggtgatcggaaatcatgggacacattggaaatgaactgccgttgatactctccgtttttgttcagcttgtctgccatgtaattcagggagtgggaaagatatcccatctcatcttcagaatctacggggatcgtgtaggaaagatttccgttggcaaattccagggcaccctttaagatttctttcagaggtttatggaccctgtaaaaatagatcagaagaaaactgaaaaacagtgcatagatcacaataaagatcagtaccataacctctacgatattgctgcggctttcgtagaggtttttcataggatagtggattaccagataaccgatcaccagatccgtatcttttatgggaacaactgtgcttaactgtgcggtttttaatgtcccgtaaaacgtaccggaagaatagcaggtatcttcgtaatcttccggccggaagctcctgacggtgatagcaccggaatcagaggactgctggtttgtgtttatcagaacggtcccatctgtatccataacccagaaatctgcattttgaaaggctgctgctgaggaaagagccaggatgagggattcgtttttggggctttttacagcctgacgaagttcatttttggaaaccagctggctggcagtgcggtaaagggactctccggtagagcgctccagccttttttctaccaggtaggagccgccggaggaaagcagcagaaagcagattccgcccagcataaagtacaggatcagcagtttagtataaagatgcagtttcatgaatcctttacctcaaatttgtaaccgattccccagactgtggaaagagcccagtttgggttatccttgatcttttcacggagacgtttgatgtgaacgtctacggttctggtatcaccaatgtattcatagccccagatgtgatccagaagctgttctcttgtgaaaacctgattgggagaagctgccaggaaatagagaagctccaactcctttggcggcatatcaatctggtgtcccatataagttacagaatagttagttaggttgatcaccagatccggataggaaacacatttttcctttggcgcggcagacggagattttacatgaaatctgcgcagtaccgcacggacacgtgccaccagctctttggagtcaaaaggcttgatgatgtaatcatccgctccaagctccagtcccaggactttgtcaaaggtttctcccttggcggaaagcataatgatcggtacatcggaggtgtgacggatctcacggcatacctggtatccgtcaatgcccggaagcatgagatccagaaggatcagatccgggtgaaaaatatggaactgcttcagggcttcctcgccgtcatttacgatcttagtctcaaagcattcttttgtgagatagagagcaaccagctctgcaatgttgttgtcatcgtcaacaatgaggattttctgttttgtagccatggtttcagctcctttttatttcttgaattctacaatggtcacgccggcatcgccttctccgaattcgccgagacggaaggaagctacgtgcttctggcgcttcaggtaattgtggacacctttgcggagggcaccggtaccttttccgtgaacgatacggacggatttcatgtgtgcgatataggcatcatccagatatttatccagctctgcaactgcctcatctacggtttttccgagaagattgatctctgtggaaatgctggctgccttggacatacggatctttccggcaccggtgcgctgcatggacggagtggtgatcaccggttcgtccacaagctccagatcggagatatgaaccttggaacggatgatacccatctgcacaaagagatatcctttggaatccggatgactggaaactgttcccttgagattcaggctgagcacctttacggtatcgccaagagaaagatcggatggtttcagctgtttttttggcttttgcttctgctgtttggaagacattccagtttcggcctttgacatacgttttttcaggttctggcgctctttttccacggaagcggtatctacgtgatccttctggaatttatggaaaagcttcatggtctgatctgcgtattccttggtatcgcggaggatcgcatgtgcctgttcattggcttctctgagaatccgctctttacgttcatccagcttttcttctttttcctgaagggattttttcagatcttctacctgttctttataacgggcaatttcagcacgctcgttttcgatggtgacccggctctgctccagggatgtcagaacatcttcaaaagattcatcctgctcgctgatctgttcctttgctttgtcgatgatgaaatccggaagacccagcttggaagaaatggcaaatgcgttactttttcccggaacaccgatcagaaggcggtaggtcggacgtaaagtttctacatcgaattcacagcaggcattttccacacctggagtggagagggcatagatcttcagttcgctgtaatgggtggttgccatggtacggataccctgctcgtgaagatgcgacaggatcgcaatggcaagagcggcaccctctgtagggtcagtacctgcaccaagctcatcgaagaggaccagggaatcctgatctgcggatttcaggaaggaaaccacgtttgtcatatgagaggagaaggtacttaaggactgttcaatgctctgctcatctccgatatcagcataaacctcgcggaaaagtgcaagttcggaacgatcgagcgccgggatatggagacccgactgtcccatcatggtaagaagacctacggttttcagagaaacagttttaccaccggtgtttggtccggtgacaaccaggaggtcaaaatcatccccgagacggatgtcaataggaacggcttttttcttatcaatcagtggatgacgggcctggcgaagccggatccggccttctgtgttgaaaataggttcactggcgttcatgtccatggcaagtgcagcacgggcaaaaataaaatccagctgtaccatgatggaaagatctgcgtgaatagcctccagctcagcagctacctgctggcttaaggatgcaaggatcacttcgatctctttctgctctttcagctccagctcgcggatgtcgttgtttagcttgacaacagccatgggctcaatgaaaagggtggagccagtggcggactggtcgtggatcataccgggaacctggcctttatattcagcttttaccgggatacagtagcgaccgtcgcgcatggtgataacggaatcctgaagataattcctggcacttcctgcaaccagagaagaaagctgggtgtgtatccggtcgttggtggctttgatgctgcggcggatctgacgaagagtactgctggcatcgtcacttatctcatcctcagaaaggatacagcggcggatttctgtactgaggggcgtcagaggctccagtgccgtaaacattccatcaagggaatcagtcattccgtcatcacgatcacttctggaataggcctttacacgaccggtattctcgagaagactgcagacagaaagcagctctggtgcattcagagcgctgcccacagtaagacgttttaatgtgccacggatatccttgacactgccgaaggaaatgccgccttttttgaacaggcgggcaagggcatcgtgtgtttgtaactgcatggaccggatctcctcaatgtccgtggaaggggtaagcttcctgcagagatcttttcccatgggggaggaggccttgtctgtgagcagatctatgattttatagtattcaagtgctttgtatgcttttttgttcattgttgctgtagttactcctttttgttacttctgttgattctgtgtttttatgcgtaacacaggatatgcaaaaaaacacttcgtttcctattttacatgatttccatagcaaaggaaagtaaaatgtgttatgatactgaataaagcccggaagtaaatggaaaccgcgcagaaatgcagggaagcccggaccgggatgcagccagagatcgtaaagaaagactggctgtgaatgcaaagtgtgaagcagatgcgttcgtaagtatgtccgctttgaaagtaaaaagaacagaaaggcaagaaatttatgcgttttttaaatgaattacatgaaggagacagagtaaacgggatctatctctgcaaacagaaacaggcagctacaacgaagaatggcaagccttatgagaatctgatccttcaggataaaacaggtgtgatcgatggcaagatctgggatcccaattctctgggaattgatgattttgatgctcttgattacattgagatcatgggagatgtgacaagctttgcaggcgccatgcagctgaatatcaagagagcacgcaaggcaggagaaggggagtatgatccggcagattatcttcctaccagtgagaacagtgtggatgatatgcagagccagctgcgagagcttatcaacagtgtgaagaatccctatctttcccagcttctgaagaagctttttgtagaagatcaggaatttatgaagatatttgagggacattctgcagccaagaccgtacatcacggctttatcggcggactgatggagcacactcttggagtgacccgtctctgtgattacatggcaaatgcatatccggttttaaaccgtgatcttctgatcacaaccgcacttcttcatgatgtgggcaaaacgaaggagctttctgcttttccgatgaatgattatacagatgagggacagcttctgggacatattgtgatcggggcacagatggtacatgatcttgcaaaagagatcccggattttccggagaagcttgaaaatcaggtgatccactgtattcttgcacatcatggtgagctggagtacggttctcccaagaaaccggcacttgcggaggcagttgccctgaatctggcagacaatacagatgcaaggatggagacactgacagaaattttccacgcagacaaaggcaaaaaagaatggcttggtttcaaccggctttttgagtccaatttaagaagaacaggagatatttaatacatggaattccgtaaaaacgatatactcactttagatatagaggattgcggagttgacggtgaaggtatcgggaaagccgatggcttcaccgtttttgtgaaagacgccgtgatcggagaccggatcaaagccaagatcatcaaggcaaaaaagaactatggctatggccgcctgatggaggtgatcacaccgtctccataccgtgtgaagcctgcctgctccattgcccgccagtgcggaggatgccagcttcaggcattatcctacgagcagcagctgaaatttaaagagaaaaaggttcgtggacatctggagaggatcggtggatttcaggatcttgagatggaaccgatcatggggatggaagacccctatcattatcgaaacaaggcacagtttccggtaggaaaaaataaagacggaaagatcatcacaggcttttacgcaggaagaacccactccatcattgataaccgggaatgtattctgggagtgaaacagaataaagaggttttggaccgtgtgatcggacacatggaaaaatatcatgtacagccctacgatgaggccacgggaaaaggtcttgtacgtcatattatgattcgttatggcttccatacagatgagatgatggtctgtctgatcttaaacggagataagatccctgcagaaaaggctcttgtggaatcactctgtgaaattccggaaatgaccagcattaccatcaatgttaataaaaaacggaataatgtgatcctgggtgatcagctttatctcctttggggacagtcctatataacggacagcataggggatatttcctatcagatttctcccctgtcctttttccaggtcaatcccatccagaccgaaaaactgtatggaaaggctctggaatatgccggccttacgggaaatgaaactgtatgggatctgtactgcgggatcggaactatctccctgttcctggcccagaaagcaaaattcgtccgtggcgtggagatcgtaccacaggccattgacaatgcaagagagaatgcgaagctcaatggcattgagaatgtagagttttttgtcggaaaagcagaggaagtgctgccgagagagtatgagaagaatggcgtttatgcagacgttatcgtggtagacccgccacggaagggctgtgatgaggtacttctgaatacgatccttaaaatgaagccggagagggttgtgtatgtgagctgtgacagtgcgacactggcgagggatctgaaggtgctgtgtgcggaggattatgagttgatgcgggtttctactactgatatgtttccgcaaggcgttcatgttgagacagtggcaaaactttgccgtaaataagca

SEQ ID NO: 224 - DNA, 36767 bp, Unknown
  gut microbiota DNA sequence
aaaacagcaagaaattatctggagaagctgtcagaatcagactacacgggaaaaaggattctgctggttgaggataatgagttgaacagagaaattgctggtgaaattttgcagatgacaggtgcaaaagtggaaacggcagaaaatgggaaaattgcagttgaaaaagtggaagcttctccggaaggattgtatgatcttgtttttatggatatccaaatgcctgtcatgaatggttatgaggcaactgcagcaatcaggagccttccgggtgaaaagggaaaactgcctattgttgccatgactgccaatgcttttgcagaagatgtacagctggccaaaaatacaggcatgaatggacatatcgcgaaaccgctggatatgaataagctgaatgatgttctggaaagctggctgtaactgattttcatgtgatcacaaagtatattactaggaacagagtgaacagtaacagtaactcaggtgatgctgcataaatcctcaaatactccttgcaataaaaaaatacagcaattataatataaatacaaaagccggatgcggaggctgacttctgaaaacaaagaaaggaagtataaaatggcgaaaattttaatcagtccgtccaaatatttacagggtgcgggagaaatgaagaatcttggaacttatgctgcaaagagcggaaaaaaagcgttggttctgatcagtaaaggcggatataaaagaatcggtaaaacgatcgaagagagctttgctgagagtacctgtgaggtggtttttgattattttaacggagaatgctgtaacagtgagattgatcgtctggtaaagatcgtaaaagatgagcagtgtgatcttaccattggtattggtggaggaaagatctttgatacagcgaaggcagttgcatactatgcgggaacaccggtatttatctgtccgacgatcgcatctacagatgccccttgcagtgctttgtctgttatttatacagaagaaggagtttttgaaaaatatctgtttcttccggcgaatccgaatcttgttttgatggatacagatatcatcaccaaatcgccggttcgtcttactgtggctggtatgggagatgcactggcaacatattttgaggcaagggcatgcaagagaagcggagcaacttcctgtgcaggaggtaagacaacagaggctgccatggcactggctgaactttgctttaataccttgatggatgagggcgtaaaagctaagatagctctggaagcaggcgtatgcacaccggcagttgagaaagtgattgaggctaatacacttctttctggaattggttttgaaagtgcaggacttgcaggtgcacatgcgatccataacggatttactgtactggaagaatgccatcatatgtatcatggagaaaaagttgcattcggaaccatcacacagctggtactggagaatattccccaggaagatctggaagagatcatcttatggtgcattgaagtaggacttcctgttactctggcagagcttggagctgggaaggtaactgatgagcagcttatggaagttgccacaactgcatgtgcggagaatgatacacttcacaacatgccatttgaagttacaccggaaactgtatttgcagcaatcaaagcggcagatgcatatggaagatattacctggatgaggaataaacagataaaaagtaaatagctgatataaaaattgcaatctgcagaaacaagagttatcaagtattgttatcctgcaggttgcttttttttatgtatggctgtaatataacagaaagatcagtaaatattggaacagaaaacatacggaggaatatctgtggcaaaaaaacgaaaacccaaaatggagcttcgatattataagatgccggaggggagccccatccttgcattgcttggacagaagtgggttcagaattatgggaacgatatcgattatctccattttcataattatctggaaatcggattctgctatgaaggacagggatttatgatacttggagaggataaggtacagtttcatgaccgggattttacggtgatcccattcaattatccacataccacaaacagtgatattggaactatcagccgctgggagtatctttttattgatgtagaaggattcctggataaatttattaataattcagtaaaaaaagaaaaaatcgttcagcggatcaactccagatcactttttctgaatgaaaaagaaaaccgatccatggcaggtaagatccttaagatcctggatatcatgcgggatggagaggaattttatctggaagaagctaagggagttttggcatcgcttcttgtggaaatcgcaaggataaaccgggattcaggcgaagaacgttacagcgaaggcagaggaaaagtcatggatatgatatccaggttccaggattatatttctgatcattacatggaggatcttcgtattgacgaactggcagaatactgtcatatcagtgaaactcatttgcgccggatatttacgacttacatgaagatgagtccgctggaatacatcaatacgatccgtatccaggcggcctgtgattatctgaaaaaaacagatcagccaattgcagatatagcacataagtgtggttttaccaccaattccacatttaaccggaattttcgtcaggttacgggaatgacacctctggagtggagaaaacgtccggagaactatgaacagcagcttcttaagtttgacatccattcagaggaaggctggtaaaacaacaaaaccagatctgtggatctgtcacgacagaatagaaatatcagactgtatgcggatcgggcagatagaaagaggtaagaaatgtacgattacaggattgtggagcaggtctccagaaaaaagaaacatatgtcaggagctctcagaaaagtaatggtgatctttgcggcaatttttgtactgatgggtatcacgatctctcaggcattcatgcttccgggatttcttctggcgctgctatattttgtttatgacatattcagccagagagactatgaatataccatggaaaacggacaactgaccatagatgtgatctatggaaaaaaatatcgtaaaacagctcacgtgctgaatcttgaggagatggaagtgacagcacctcactatcatgaaaaagtggcaaaatataaaaagaataccggaacggagaaactgaaaaaatacgattatacctcttatgaagatgatgtgccttactataccatgatcattcaggaagatggacgtaaaataaaacttcttctggatctgacagaggaaatgctgcatacgatgaaaacacagttccctgaaagggtttattttgcataatatgtagaaatgcttgtgaaacatgtataaaaaacaatatgaaattttatgaaatagaaacaaaagtcttcttttttgacgaaaaatgtttgcataatgtcgaaaaaggaggctttttttgaaattttgacgaacgtaaaaagagaaaatcctcaaagtgcatattttttgtaaaaatatagctggataatagtgcacaatcaataaaatggttgaaattgcacattatatgaacaattctgcaaactatagaggaaatacggatgctataatttattcataagcaaacgggaaatgcttaataaaggaggaaaagtaaatgaagaaaaaattactcgcagtattaatgacaggtatcatggcaatgtcttttgctgcaactactacagcagtatatgcaaaaggtgatgacgataacaccctgactgtatgggcatgggatcagaacttcaacatcaaggctatgaatattgcaggtgagcagtatgcaaaggatcacgaaggattcaaggttgatgtagttgagacatcttccgacgactgccagaccaaacttacaacagcagcaaacgccggagattacagcacacttccggacatcgttctgatgcaggacaacagctatcagaaatatctgaagagttatccggatgcttttacagatctgaaggatatggatatcaactgggatgatttcggaaaactgaaacagtcctactccatggtagatgacacacattacggagttccgtttgataacggtgcaacaattgcctgctatcgtacagatatcctggaagaagcaggatataccattgatgatcttacagatatcacatggagcaaattcatggagatcggaaaagacgttcacgaaaaaacaggtaaatatctccttacaagtgaagcaacaggtggcgatactctgatgatgatgattcagtcctgtggagcaaacttcgtaaatgatgatggagaggcttatatcgttggcaacgatgcagcagagaaatgcgtagatctttatgtggatcttgtaaagaacaatgttgttaaattagtaaataactgggatgagtacatctccacgatcacaggcggagaggctgccggtatcgttaacggtaactggatcacagctacactgatgggaacagaggatcaaaagggtctgtggcagatcacaacaatgccgaaggtcgatggcgttgatacagctacaaattatgcaaacaatggcggatcttcctggtacattacatccaactgcaagaatgtagagcttgctgaggacttccttgcaagcacatttggttccagcacagacttctatgatgcaatccttccggaaacaggtgcaatttcctgctacctgccggctggtgagtctgaggtttacaatgagccaagcgagttcttcaataaccagccgatcttctcaacaattgtagagtactcttcacacattccggaatttacaaaaactccgtaccactatgaggcaagagagtgcatcaacacagctgttgtcaatatcgtaaatggcacagacaaagaatctgcacttcaggaagcacaggatacactggcattcaagatgacagagtaaagctgaaatattaaagaaatacaaagcaggggactgcatgcagtcccttgtcttatgtaaaggtttagatgtttgaaaggaggagttcctgtgaattccaaaaaaagtggcatgtctctggtagcgaaacagagagcggcaggctggatctttctggcaccggcaacgatcatgatcgctgtcatgagtttttatccgatgatccgtgcatttatcatttctttacagacaggtgccggagcaaacatgaggtttgcggatccgatcttcagtaactataaacgtatcatgatggataaggtattccagcagtccatcgtcaatactttcctgtatcttattattcaggtaccgatcatgctggtccttgcgatcctgcttgcacagcttctgaataacaaggatctgaaatttaaaggctttttccgtacatgtgtatttcttccatgtgcaacatctcttgtatcttattctctgatcttccgttctatgtttgcaacagacggtctgatcaacagcatcctgatcaaacttggaattttaacaactggctataacttcctgggtaactccacaagtgcaaagatcgtgatcatcatcgcactgatctggagatggacaggatataacatggtgttctatctggcaggtcttcagaatattgaatattctgtatacgaggcagcaaagatcgatggtgccaatggctggaagaccttctggaaaattaccgtaccacttctgaaaccgacaattatcatgacatttattatgtcgatcaatggtacactgcagttgtttgatgagtctgtcaacctgacaaaaggtggcccggcgaactcaaccatcacaatgtcccattatgtttataatacatgcttcatcaacgtgccaaacttcggatatgcggcagcaatgtcatttatcatatttatcatggtagcgatcctggcctttatcaatttgaaagtaggtgatacacgtgactgagaaaaagaataaatccgcaattcagagaagattgatccctacatatatttttctgatcatcgtatcatttatctctgtatttccactgtactggatgatctctgcggcaaccaatacatccacagatgtatccagaggccgtatccttccgggtacatattttatgcagaactttaaaaacctgactgcacagcagccgctgtggagagctcttggaaactctctgttttatgcagttcttactacagtgatctgccttctgatctgttctatcgcaggttatggctttgaggtatatcatgacagatggaaagacagactgttttccaccctgcttcttgcaatgatggttccgcaggttgcaacgatggttcctttatttaagatgttttcaaaagcaggactcttaaatacagcggtaggttttatccttccgatcatttccacaccatttatgatcatgatgttccgtcagaatgccagagcatttcctatcgatatcattgaggcagcacggattgacggattaagcgaggtaaggatctttttccagatgtttatcccgactatgaaatctacttatgcggcggcagcagttattacatttatgaatgcatggaattcctatctgtggccgaaggtaatcatgacagataataaggcgatgaccatgccgatgttgatcgccaatctgatcacaggatatgtaacggattacggcatgctgatgtgcggcgtattattctgttccattccgaccatgatcgtattcttcgtattacagaaacagttcgcagagggtattactggagctgtaaaataattttaaaacaaaaaggatgctgctgaaatctttaggtatattgtataatatgctttaactgaattatgcaggatccttttcttgaccagagcagttgtctggtataaagcttcgtagcaaagcggatgcttttgtccgcttgatgcgaatcaaatcataaggagataaaaaaatggcagagcagatcagatatgaccattatctgcacggcggcgattacaaccctgagcagtggctggacagaccggatattctgaaaaaagatatcgaatatttcaaaaaagcccatatcaataccgtttccatgggaatgttttcctgggcagtgctggagccggaagagggaagatataactttgactggctggaagaagtgatcgataatctgtataaagaaggaatttatacgatactttccacaccatccggagcaagaccgaaatggatggcagataaatatgaagaagttcttcgcatggatccggatcgcacaagaagatttttcggtggaagacataatcactgttatacttctccagtatacagggaaaaagtctacaatattaataagaagctttctgaacgtttcggaaaacatcccgcagtgcttttgtggcatatttccaatgaatatggcggagaatgtcactgtcctctgtgccgggaaaaattccgggaatggctgaaagaaaaatacgggaccatcgaaaatttaaattccagctggtgcacaacattttggagccatacctataacagctttgatcagatcgaaagtccttcgccaaagggggaaaatgctcttcatgcacttaccttggactggaaacgttttgttacagacaggactgtggattttatgaagcatgagatttctgcgatccgtgcaggtggttccgagcttccggcaactgccaatctgatgtatgactacaacggactggactataaaaaatttaaggatgttatggatattgcatcctgggataattatccaagctggcataaaaaagacaattataccacagcgttggacggagccatgcagcatgatcttatgcgaagcatcaagaaagcaccgtttcttctgatggaatcctgtccctctgcgaccaactggaagcctatcaacaagctgaaaaaaccaggaatacatctggctgcctctctgcaggcagttgctcatggttcagacagtgttctgtatttccagcttcgtcagagccagggagcctctgagaaattccatggtgcggtgatcgatcactacggtggggatgatactcgtattttccgcgaagtgacagaggtaggagaagcgttggagcagatccgggaaactgctggaagcgtgacgaagtctccggtggctgttctctatgaccgggaaaatgactgggcgctgaaggatgcgcagggacctcgaaacgaggatatgcattatcaggaaaatgtactgaaacagtatcgtgctctccgaagaaaaggctataatacagatatcataaatatggaacatgagctgtcccggtaccgtttggtaacggcaccgatggcctacatgttttatcatggatatgccgaaaagcttcgcgcttttgcaaaaaacggtggtactttggtaatttcctactggtccggacttgtagatgaaacagataaatgctatctggagggaacccctcatggactgatggaagcagctggtatccgtacggaagagatcgatgcactttatgactgggaagaaaacgtaggtatcccggaaacaggaaatcatctcagaattacagaaagctatacctgcaaaaatctctgtgagcttgcaaaggtttccgatgcggaagtactgctgcgttatggaagggatttctatcaggggtatccggtactgactcacaagaaatacggaaagggccatgtttattatgtggcggcagatatggaagcagccttttatgaggactttctgggaaaggcagcggaggaagcaggtgtgaagatgccgcttacatttatatcggaaggtatttctgtgacaaccagagaaaatgaggatacggaatatctgtttatccagaatttcggagaaaagacagaaacagtttctgtctcgggggattacgaagttctctacggatcaacagatgaaaatattgctccgcttgccaccaggatcttaaagcggaaaaaataatcaaagtaaaaaaatcacagcaaaagtataaagtatatttgttttcggacggtatactttttactgctgtctgggaaagagaaggtaaaatggcaggtacaccaaaagaagagataaaaagaatagcggatcagtttgcatttaccggagaactggtttcctgcggcccctgcggaagcgggcatatcaacgaaacctatatgcttagatatcggatcggagagatggggtccattaaggtgatccttcagaagatcaatcgggagatctttcagaaaccggaagaactgatggagaacattgccggagtcaccgggcatctgaaaaagaaagttcttcagaagggaggagatccggaacgggaggttctgaacctgattccgacaaaggacgggaaggcattcctgacagatgaaaacggagaatgctggagagcttatatttttattaccgatgcagtaagctatgatctggcggaaaaaccggaggatttttatgaaagtgcagttgcatttggaaaattccaggaaatgctggcggattacccggcagagactctgcatgaaacgataaaggatttccatgatacaaagaaacgttttcagactttgaaaaatgccatagagaaggacagctgccatcgtgccgcatccgtaaaagaagagatcgcatttgcgtttcagcatgagtatctggcaaatgtattcggtgagcttctggcaaaaggtgaggtgccccttcgggtaacacacaacgatacgaagctgaataacgttatgatcgacctggaaacaggaaggggaatctgtgtagtggacctggacacggttatgccgggacttgccatgaatgattttggagattccattcgtttcggggccagcactgcattggaggatgagaaagatttaagcaaagtttcctgtgatatggagctctatgaaatctatgtaacaggctttctggaaagctgtggagataagctcagtgcaaaagagatcgagatgcttcccatgggagctaaggtgatgacttatgaatgcggcattcgctttcttaccgattatctggaaggagatcattattttaagatcgaccgggaagaacataatctggaccgctgccgcacacagtttaagctggtggcagatatggaacagaaatgggatactatgcagacgatcgtgaaaaaatatcagaaataaaaaacaggggtttttacaatggaggtaaagcgatgagcgaaacaaaaggaagagtgactattccgacagatctggatgtgattccggagacactgaaaatgctggacgagtggggtgcagatgccatccgtgactgtgacggaacggaatttccggcagagttgaagaaaaccggcgcaaagatttatgcaacttattataccaccagaaaggataatgcctgggcaaaggcccatccggaagaaatccagcagatgtatatcatgacatcctttcacacggcagtgtcggatactctggaaatccatctgatggatcatctgtatccggatatgctggcggtgaatacaagagatgatatcagaagatggtgggaagtcattgaccggactacaggggaagctgtcagtacagaggaatggtcatacgatgaaaaaaacggaaatgttgtgatcaggccggcgaaagagtttcatgagtatacggtaagttttcttgcatatatcatgtgggatccggtacatatgtacaatgcagttgtcaatgactggaaggatgtagagcctcagatcacttttgatgtgcgtcagcccgcaacacgtgcacattccatggatcgcctccgcagatttctggattcccatgattatgtgaatgtagtacgatttactaccttttttcaccagttcacactgatctttgatgagatggcacgggaaaaatatgtagactggttcggatattccgcttcggtgagtccctatatcctggaacagtttgagcaggaagtgggatataagttccgcccggagtttatcattgatcagggatatatgaacaacacttatcggatcccgtcgaaagaatttaaagatttccaggctttccagagacgggaagtggcgaagcttgcaaaggaaatggtagacattgtccatgaatacggaaaagaggccatgatgttcatgggtgatcactggatcggtatggagccctttatggatgagtttgcttccatcgggcttgatgcggtagtgggaagcgtcggaaacggagcgaccctacgtttgttcagtgatattaaacatgtaaaatatacagagggaagatttctgccgtactttttcccggacaccttccatgagggcggggatcctgtaaaagaggcaaaagtaaactgggtgactgcaagaagagctatccttcgaagcccgatccagagaattggatacggcggttatctgaagttggctctggaatttccggattttgtacagtatatcaaggaagtctgccaggaattccgtgtgctctacgacaatatccagggaaccacaccgtactgcgtaaaacgtgtggctgttttaaattgctggggaaaaatgcgctcctggggcaaccatatggtacatcatgccatctattacaagcagaattattcctatttcggaattatcgaggcattaagtggtgcgccttttgatgtgtcctttatcagctttgatgatatccgtcaggataaagatctgctgaatgattttgatgtgatcatcaatgtaggtgatgcggacactgcacagtccggtggtgagaactgggcagatccgaagattcttacagctgtgcggaaatttgtctataatggaggcggattcattggagtgggcgagccagcggctcatcagtggcagggaaaattcttccagctggatgatattcttggtgtagaggaagaaagaggatttaatcttaatacagataaatacaactgggaagagcataaagatcattttatcctggaggatacagacgaaactgtggatttcggtgaggggaaaaagaatatcttcgcacttccggatacaaagattcttatccagaaagatcaggaagtccagatggcagtaaaaaccttcggaaaaggcagaggtgtttacatcagcggacttccgtacagcttctgcaacagtcgtatcctttatcgtgcggtgctctggtcagccgcagcagaaaatgagcttttctgctggttttcttccaattataatgtggaagtacatgcttatgtgaaaaataaaaaatattgtgtggtaaacaacacctatgagccacaggatactacggtttacacaggggatggaaagagctttaaccttcatctggaagctaatgagattcgttggtatcagatctgagaaagcaggatacaggtttactgataaagaaaagctgtgaaattgtctgagggcgttgacagagaaaaaaacttataatataataaatccattccaaaagtaggaaaacaaagctgttacaatagagaaaatctattataacagctttttattattgttgacaaacaattttacttataaagaggagagctttatgaacaaaaagatcaaaaccctgttttgcagaaaaagagtgctttttctccgaaaaataaaagcagaaaaagcagtattgtgataaaatagaagaaaaatatttcaaagacaaactaaaatgatcagaagaaaagaggtagatagattatgacaaaagcagaaaaaaagacactgaagctttcggcagagaagcctcagtatattacagtaaatgatattacttacgcacaggtggattcctggttcggacattgcaggcgggatctgaaactggatataatctacccggaaacaaaagatggaaaaatctatccctgcatcctctggatctgcggaggcgcatggctgatgatggataaatccgcacataatctttatctgagcagattggcatccagtggctttgtagtggcaagtgtggagtatcgtacttctaatcagggcccgtatcccatgccgctgcaggatgtaaaggcagctatccgttatctgaaagcccatgcagaccggttccgcatcaacaaagatcagataggagttatgggagagtctgccggaggatatcttacctgtatggctgcgctggacaatgatccggctctggatgtgggagagtatctggaagaatccagtaaggtacaggctgcctgcccatggtatccgcctacggatctttccgcatttccgtgtgaatctgcagaaaaatgtgcttcttccgcagaatcccttctgcttggatttaattccatgttaaataaagaaaaggcataccagagcagtccggtttccaaggttacgaaggatgcaccgccatttctgatcatccatggcaattgcgatcaggtcgttccttatgttcagtcggaaactttatacggacttctggagaaaaaagactgtgatgttactttgctgacactggatggtgcagaccatgcagatatccagtttttccaggatgaggtatggaaccggatcgcagagtttttccatgaaaaactgaaataaataaaagacaggagcacagatcatccagcagttgttgtaaatatgtgatcttgaaaagactaaaatagaaaagagaaacacaaatgataacattaaacgattatctgtattccggagatactcttctccggatactgaagaaatacattcgggatcttaggatagaggcgaaggaaaaacacaatgagatcgatctggtacactgtaattttttgatccagatccaggagcttctggagcataatgatttcctcactgcccagtctcagaagatccgggaattttataaatatatggcaggggaatatccgtttctggcgtttaccttcaagggaagaatcaaatccctgatccgtgcggaggaaaaatttaacggatatgtagtagaatttatttatgactactataaagaatatggggaatatccttccgtatcccagatcaaggaacggttaagctgtttccgcgattttattgcttacaggatcgttatcgccatgcccagatgtcatttgaaaaatggtgagaatgtcagagaagaagagcttcgttatctttatgagatcgccaatatacttccgggatttctggaagaaagaggatttaccgcagagccggccagaggagtgcaggaaagtacatcgccactgctcagcaaggaagcaaagccttactatagggattacatctgtaacaacagtgaggatgattatcagtctctgcacattacattttatgataacagttcccgaagctatatggaagtacagctgcggactaaagacatggatgatgttgcggagattggttccgccaaccatttaagctatgagaaaaaacaggaaagtgaacgcaggagaagggacgcgattccccagggggaatgtatctattttgatgaggcttatgagcggggtatgcgacttcttggactggatcttgctgcgctggacgttaatatgtttggtgcggtaaacaacagcctgatcaatgatggctgcggactgttccgcggaaggatgatccttccttatgagcatctttctcgttttcagaatgatatcgttgactgagggaggatgacatgaaagacttgacaaaagggaagccttccacattgatcctgtcctttgcgcttcctgtatttctgggaaatctcttgcagctgacgtacagcctggcagatacccggatcgtgggaagctttcttaaagaagatgcgctggcggcagtaggggccaccagtcctttaagcgggctgatcatcggttttctgatgggccttgcaaatggatttgccattgtcaccgcacagaaattcggtgccggaaaccgggaagaagtacgaaaatcttttgcgctgtctcttgtaatgggcagcgtgatttctctgatcctgactgttttgggacttttgtttctgcatccgatcctgaggttcctgaatgttccggatcatttgacgggaactgccaggcagtatatctttattattatcgcaggtatgctggcaacgtttctttatgatacctgcgcggcatctctgcgtgcacttggggatacggtgacgcctcttgtgatcctggcggtgtctgtaactttaaatatcgcaggagatctgttttttattctggtagtaaaagcaggagttcagggagcggccgttgccacggtactttcacagacgctggcatttctgatatgctggttttacatgatccgcaggtatgagatcctacggctgaaaaaagaggattttttcggtctcgaaagaaatatgatgaaaaatatgctgagtgccggactttctatgggacttgtaagctctcttgtaaatcttggtacactggcacttcagacctccatcaatcggctgggaagagatatcattgtggcacatacagcagctcgtaagatcacagagatgtttatgatcatgtttggcgtgttcggccagaccatggcgatcttctgcggccagaacgcaggtgcagggaggatggaccgggtacgccatggaatcggtcttgcagttctgtatacctgtatctggtccgtgatgactgtgatcttcagttttaccattggaaaacagctgatctatctggtcacaggaagccataatgaaacggtgatccgcaatgccgccaattatcttaaatttgatacgatcttttatttcgtaacggctgtgatcagtgtcctcagaaatgctatgcagggccttggagaaacggtgatccctctggtttccagtgcgctggagatgatcggaaaagtagtgatcgcggtgactctggtgccacttctcggatataccggcgtgatcgtagcagaaccgatagtctgggtcattatggtgatcccgctgatcgtgaagatacttaagatgcctgaattaaagaaaacagtctgagagattcgaagatccgatgagaaagattcgcgtgaaaaataaaaagcacattgtatggaatgagccgccaccggaaagtatgacttttggggtggttcaaccatagcaatgtgctttttttaattttacatagttgctgtcgcttcttttacgttttccttttcaggaaagatatgtctgaaaataaaacgtacgatcggacctgcatagatcagctgccagaagaatgccatcgggaagttgaatgcggttgtctgaagccatacagctacgaactgatttcctgcatccttaaagagaatggttgcggcaagactcattaatgggcacatgaaagcaacggaaggaacggagatcgcaaggatcttgctgaagggatgacagcttttgaaatctaccatgcgcattgcacaaccaaaagcaagcttggatacaataaagaagtcaaggataaatgcgatcggtcccatgatcaccagttcatgaaaagcgtcaaggaacacgcggtttgtcatactccctgtgttcagggaaatgttgtagcaaatcatggcgtaaaccatgaaaaataccatgataagggtaaagataacttcctgaaatttgttttttggcataaaaaatcctcctttaaaatgattaagtgataatgtaaaacctcagagcatgtgttgttcgttaatcattcaggagaatgtgcgtttccaatatatgacaggattttgtcataaaccatattcggttttttgaccagatcaaactgcgaagcagttatttggctgtaaacaggcagcagagcggtttacgaatatccgcttgataccggcgattatgatatcataagcagcaaagccttgtcaataagtaaaattcgcaacatcctgcggaatgttctgaaaaaacatagaaatatcagaagagtaattgagaaaaaaatggcaataactcctcttgaccgttaaagttagatatagtaaacttgtaaacggttagcggattctaactaatgcgtaaaatttgtggcgggccgtatcccctgacaaaatgcggcctgaacaggagttacggacagggcgaaaagaccagacaggaggataaatatcaaatggattatttagagattgagaaggtcattggaagagagattattgattcaagaggaaatccgaccgtagaggcagaggtttatctggcagatggaacggtcggaagaggagcagcaccaagcggagcgtccacaggagaattcgaagcacttgagctgagagatcaggataaaagccgttttggaggaaaaggtgtttcgaaggccattgaaaatatcaatacagtaattaatgatgcgctggcaggaatggatgcatctgatatttatgcagtggatgctgccatgctcaaagcagatggaacaaaggacaaatcaaaactgggcgcaaatgccattcttgcggtttctattgcgtgcgcacgtgcggctgcgatttctcttgacatccccctttacagatttcttggtggggtgaacggaaacagacttccggttccgatgatgaatatcctaaacggtggtgcacatgctgcgaataccgttgatgttcaggaattcatgatcatgccggcaggagcaccaagctttaaagagggacttcgctggtgtacggaggtattccacgctcttgctgcacttctgaaagaaaaaggccttgcaacaagcgttggagatgaaggtggttttgcaccagaccttggaagcgatgaggaagccattgagtacatccttgaagcagtgaaaaaagcaggatatgagcctggaaaggattttgtacttgccatggatgctgcatccagtgagtggaaaggaaacaaaaagggggagtatgttcttccgaaatgcggaaagaaatttacatctgcggagcttgttgatcactggaaaaatctgatcgaaaaatatccgatctactctattgaggatggccttgatgaggaagactgggaaggctggcagatcatgacaaaagaacttggaggaaaagtacagcttgtaggtgatgacctgtttgttacaaatacagagcgtcttgagaaaggtatcagccttggctgcggaaattctattctgatcaaactgaatcagatcggttctgtatctgagactctggaagccatcaaaatggcacataaagctggctatacagcgatttcttcccatcgttccggagagacagaggatacaaccattgcagatcttgcagtggcactgaatacctgccagatcaagacaggagctccttccagaagcgaacgtgtggcaaaatataatcagcttctccgtattgaggaagagcttggtgatgcagcagtatatccgggattccgggcattcaatatcaagagataagatcataactaacacatttctcaaaaaggtacgctttggcgtgcctttttttggcgaaaataaggttgccagatttctcaaaatagtatattatgatttacagccgtgtgaaaaaataaaattgaatattggagatgctatgaaagaatacgtaaatacttttatgcgttacaggtttcttctgggagagcttgtaaaaaaaggaatcaaactgaagtacagacgttcctatcttggtatcatctggtctcttcttgagccgttgcttaccatgatcgtactgacgatcgtattcggtaccctgtttggaaacaaggatcggacatttcctgtatatatcctgacaggacgtcttttgtacacattctattccagtgccacaaaagcggcattgaaatcagtaagagcgaattcggcaatgatcaagaaagtttatgtgccaaaatatctctatccgctgtcaagtgtactttttaactatgtgatcttcctgatctcactgatcgtgctggttccggtaggagcagtacttggtgtggagccgacactttatatgctccagatcccgatcgcgctgatcctggtatttctgttgtcttatggttgtggaatgatccttgctacgattggcgtttttttcagagatatggaatatctgtggtcagtagcactgatgctgatcatgtatacctgtgcgatcttttattatccgtccagactgctgaaaagtggtttttcatggatcctgaaatataatccgctgtactgtaccatcgatgtttttcgttcgggaatgttcggagagccgatgaatcttcattatgcggcatacgcactggtattcagccttgtgacgattgccatcggaatgttctgtttcaagaagaaacaggatgaatttatcctttatatttaacaggagaaaaatatggaaaaacctgcagtagttgtagataacgtaagtatgaagtttaatctcagtaaagaaaaggtagacagcctgaaggattacgtgattaaatttttaaaaaaagaaattaaatataatgaattctgggctcttcagaatgttgattttgaggtgaaaaaaggtgaccgtgtaggaatcctgggacttaacggagcaggaaaaagtactctgctcaaagtaattgccggtgtattcaagcctaccgaaggcaaggtggtccgaaacggacgtctggtccctcttctggaactgggagccggttttgattcgcagtatacaggacgtgagaatatttttctgtatggtgcgatgctcggatattccaagaagtttctggaatcgaaatttgatgagatcgttgagttttctgaactgaaggaatttatcgatgtccctattaagaattattcttcaggtatgaaggcaagacttggattctccattgccacactggtatcaccggatatcctgatccttgatgaagtcctttctgtaggagatgccaaattccggaaaaagagtgaaaagaaagtcttaagtatgtttgataagggagttacggtactgtttgtatcccattctctggaacaggtacagcgcctgtgcaataaagcaatgatacttgaaaaaggaaaactgatcgcatatggagatattgatgagatctcggccaaatatgcggagatgatcagataaagaacagaaggcggcccaggcagtcgcataaataaaaagaaccggacagtgaacggtttgaatagcagatagccagacgatttgcggaaatgatgcaaatgtctggctattgtgttattatattacgaagaaaacagggaggaaaaaagatgactttacagcagatccttgaaaaggtaaaaaaaggccagctctctgtggaacatgcagaggaccttctgaaaaaagagggatatgaagaaatggattatgcgaagctggatactacccgaaaagcgcggaccggttttgcggaggtagtttactgtgcgagaaaagcagacgaacatcttttgaatatctatcagaagctttatgaggaagatggagaagtctttggaacaagggcgtcagaacatcagtatgaactggtaaaaaaggttcttcctgatgtggtttatgacccggtttccggaattttgaagattgaaaaagcgaaggagcatatcggaaaggtggcagtgtgtacagccggaacagcagatatttctgttgcggaggaagctgcccagacagcagagtatttcggcacacatgtggagaggatctatgatgtgggagtcagtggtatgcacagacttttttccaggctggataccatacaggaggctaactgtgtggttgcggtagcaggaatggagggtgcgctggcaagtgttatgggtggtcttgtgaaacgtccggtgatcgcggtacctacttctgtgggatatggcgccagctttcatggattgtcagcgcttctgacaatgatcaattcctgtgccaacggaattgcagtagtgaatattgacaacggatttggggcaggatatctggcaacccagatcaatcgccttgcggagggaaaataaatgagaaacaaattatatctggagtgtacctccgggatcagcggggatatgacagttgcggctcttctggatctgggtgcagatcagaaaaaactggtgagaactcttaaaagtctgccggtaaaaggtttcgacataaagatcagccgtgtgatgaaatcagggatcgatgcctgtgattttgatgtactactggatcatgatcatgagaatcatgatcatgatatgaaatatctgtatgggcatgatggagattctcacagccaggatcatgaggaacatcattatcaatatagtcatgaagccctggaagcccatgagcatccccattctcatgaacatcatgtacaggaaacccatggaaacagtcatatatatacagaaacgatgcattcccaccacggacaccatcaccatgaacaccgtggccttaacgagatcatggagattatcgaccatgcagatatgacagatcgtgcaaaatcctatggaaaaagaatttttaagattcttgccgaggcagaagcaaaagcccataatgtactggtgaatcaggtccatttccatgaagtgggtgcagtggattccattgtggatattctttctgttgcaatctgtatggatgatctggatgtggaggaagtgatcgttccaagactttgtgagggtagcggaacgattcgttgtcagcacggaatccttccggtgccggtaccggcggtaagtaatattgtaagtgttcatcagctgaagctgcatatcacatcggtgcagggtgaactgataacgcctacaggagcagctattgtggcggcattccttacatcagaaaaactgcctgaagattttacggtggagaagatcggtatcggagcaggcaagcgccagtatgagtgcccgggaattctccgtgccatgctgatccgggaatccggggagaaggcttcaggcaatgatgcttgtacggaaatagacaccattataaagctggaatctaacattgatgactgtacaggagaaacgcttggctatgttatggagcttctgtatgaggcaggagccagagaggccaattacatgcctgtatttatgaagaaaaaccgtccggcatggctgcttaccgttctatgtaaaaaagaacaggtttcagcgatggagcagatcattttcagagaaacgacaaccattgggatccgtcgccaggagatggagagaaccattctgaaaagagagaaaagaacggttacaaccccgctgggaaatgtagaagtgaaggtctgcacttttggcggacaggaatattattatccggaatacgaaagcgtaaaaaaactttgtgaaaaaacagggatttcttataaagaagtatatcatatggctgtgcggggataagatcgggttggttgccttgtataatgcacttacatattgacaccttttcgaaaaaactatataaatgtatatagaaagattattgccgaacagaacagctggcaatgatacagtaaggcagaggcaggagaaggatttatggcggtaacaatacagcagattgcagaacaggcaggggtttccaggggaaccgtggacagagcgttgaaccacagaggacggatcaatccggaggtggcagagaggatctgccgtctggcggacgagatgggatatgtacagaaagaacggaagcattccagaacagctaaagatgaaagactgaagatcggagtggtgacacagcttgccagatcttcttttatgcaggaagtaaaccgtggtattgagaaggcagccgtggaactgaaagaaaaagggatccagctgattctgaaagagggtctttccgttgatgaagaggaacagctgcaggccattgaggaactggaacaggaaggaatccggggacttgcgatcatgccggtagacagtgagactgtccgggagaaactgaatgctttgatcgaagagaagaatatcccagtagtaacctttaactctgatattgtaggaacaagaagaatctgttttgtgggaatggataaccgtaaaagtggacgtactgcggctggactccttggaatgctgacaagaggaaatggaaagatcctgatcatcaccggatattttagcaatcatgttgacaatcagcgagtggatggctttgtggaggaagccaagcgggcttttccacatctggagatcgccggtgttcacggaagctttgatgaagcagctgaggtggagcacattatagaaaatgccatgatgagtacttcagggatcagcgggatcctggtggtatccggaggccaggcaggagtgggtaaggcatttgaaaagctgagacttgaccgcaggccctacgttgtgatctacgatcagactccgaagaatgaacgggcactgaagaatgattatgtggattttctgatcgaccagaatggatatgtccaggggtatgaaccgccaaggatcctggcggatatcctgacaaaaggacaggagccggagagagaatatctctttacagatatcaagatcaaaacaaaatataacctttgaacatgtattgggcaaagtatcatataaaatagtctgcaggatgaaaactgcaggcttttttatattacaggaaatctgtaagatactacgatatgaaatatagattccaagaaaacgactgtctggatacatttgattgcgtgccaatagcgtgctaaaaaaacaacacgcaaatgcacatgcagataatagctactttgaacaaaacaaaactacaaaaattgtatagaataactgaaaaaaagaaaaatgaaaagaagtacttgcccaaattgtaaaacggtgctatattaacatcataagaaacacgcaagaaagcacgctaaataaaagaaaaagcacgcaaagtaaaaaagcacataaaaaagaagtgaaaaataaaccatcaaacaaacggaggtaagatcatgaagtatatcgaatttgatgaatccagaccaatggacctggtactccttggaagagttgccattgatttcaaccctgcttacaacgatcaggtgaaagaagagttcaaacccctgaagaaagtacatatgtttgagaaatttgtaggaggatctcctgcaaacatcgctgtaggtgttaccaaacatggcctgaaagcaggattcatcggaaaggtttctgacgatcagttcggtgagtatgtagtggattatttcaatgagagaggaatcgatacctcacagatcacaaagtgcacaaacggagagaaactgggacttacctttaccgagatgctttctccgaaggaaagcagcatcctcatgtatcgtaaccgcatcgcagacctgcagcttcatgtagatgatatccatgaggactacatcaaaaacgcaaaagcgatcctcatttcaggaacagctcttgcagagagtccgtccagggaagcagccatcaaagcagttatgcttgcaaagaaagtaaatacaaagatcatctttgatatcgattacagagaatacaactggaagaacgcagatgagatttccatctactattccatcgtagccaaggaagccgacatcattatgggctccagagaagagttcgatcttacagagaagctgatcaaagaaggcatgaccgatgaggagagtgcagcttactggcagtcaaagaatgcaaagatcgttgtgatcaaacatggtatgaaaggttccacagcatacaccatcgacggacagaaattcagcatcaagccattcccggttgaggcaagaaaaggcttcggcggcggtgacggatacggctccggattcctgtatggactgtatcagggatgggagatcatcgactgtctggagttcggttccgcagaggcatccatgatggttaagagcaacaactgctccgattcccttccgggaccggatgaagttcacgcattcattaaagatgaaaaagaaaaattcggcgaaatgatcgcaagagtataaagaaaaggagtggaaaaaatggcaaacacagtaagaatgacaactgcacaggcaattgtaaaatttctggataatcagtatgtttccatggacggagtggagacaaaattcgtagaaggatttttcacgatcttcggacacggtattgctgtaggacttggtgaggcactggatacaaatccgggccagttaaaggttcttcagggaagaaacgagcagggcatgtgccacgttgcaaccgcttttgcaaaacagagcaaccgtaagaaaatcatcgcatgcgcttcttccatcggacctggagccgcaaacatggtaaccgcatgtgcgacagctacagtaaacaacattccgcttcttgtattcccggcagatacttttgcatctcgccagcctgacccggttctccagcagctggagcagagcagcagccttgccatcagtacgaacgatgcatttaaaccagtctgcaaatactgggataggatcacaagaccggagatggtcatgaccgctctgatcaatgcaatgagagttcttacagatccggctgaaacaggtgcatgctgcatcgcactttgccaggatgttgagggtgagtcctttgacttcccggagtacttctttaagaagagagtgcacaggatcacaagaccggttgcagtagaggaagagcttgaggatgtggcagaggtcatcgcaggagcgaagaaaccgcttatcgttgttggtggtggtgtccgttactcagaagccggagaagctgttgagaaattctgcgaggaattcaagatcccattcggcgagacacaggccggaaagagtgcctgccagtccggcaatccgtactgtcttggcggtatcggtgtaacaggaacctacgcttccaacattatcggtaaagacgcagacgtggtaatttctatcggttccagaatgtctgactttacaacaagctccaagcatctgttccagaatgaggatgttcagtttgtaagtatcaacaactgcagattccacgcatacaagatggatgcagtaaaagcagtgggtgatgcaaaagctaccgtagaagcactagcagaaaagcttcgtgcaagaggatataaatctgcatacacagatgagatcgagaaagcaaaagctgcatgggataaagagatggagcgccttggaagcattgagtacacaggagatgattttgagccgctgatcaaggcaagagatcctcgtacgattccggaatatgtaaagcttacaaacggaaagatcacacagacagcagcacttgcagccatcaacagaactatcgacaaagatgcaaccatcatcacagcaggcggttcccttccaagctgtatgcagcgtatgtggagaacagacaaacgtggcggatatcatgcagagtacggatattcctgtatgggatatgaggttgccgctaccctcggtgtgaaatttgctgagccggataatgaagtatactgcgtagttggagattccagcttccagatgcttcacagtgagatcatgactatcatgcaggagagacagaaagtcaatatcatggtattcgataactgcggattcggctgcatcaacaaccttgagatgaaccacggaatcggaagccttgcaacagagttccgttatacagacggcaagaaaccgaccggagacctgatccctgtagattatgcaaagatcggcgaaggctatggtctgaagacttatacctgccgcaccatccaggaactggtagatgctctggaagatgccaaaaagcaggagattgcatgcctctttgatctgaaggttatcccgaagaccatgacagacggatatgagtcctggtgggatgtaggaatcgcaacaacatctgagaaagaaagtgtaagaaaggcctgcgagggagttatgaaaggccgtgaagaggcaagactgtactaatctgggaggtaagaaaatgagtaaagtatttggttatcctgaatatgacgaaaaaggtgaaaagattcttacaacatacgataatgagtacaaggccatgatgatggacatccgtgtttaccgtatgaaggcaggggagacaagaacatttttaagagagggtgaggagacagcagttctcctcctctccggaaatatcacctataaatggaacggaaacgaagcagcagcaaccagaaaagatgtgttcacagagggaccttggtgcgttcatggatgtacaggaactgagatcgcagttgtggcaaatgcggagtcacagatccttgtccagtgcacaaagaatgagaaagatttcggtgcaaggctttacaaaccggaagacgctccatggggatattccagcgtaggaaaattcggaaacgtggcaaagagaagagtaaacacgatttttgatcacgacatttcaccggagtccaatatggtacttggcgaggttctcaatgacagaggaaattggtccggatacctgccgcacagacatccgcagcctgagacatactttttcaaatttgatcatccggaaggatttggagcaagctttgtcggtgatcaggtatttaagagtacagacgagagcttttccgcaattccaggaggagagcttcatccgcaggcagttgcacctggatatcagatgtatacatgctggatgattcgccacattgacggaaatccgtggctgcagacagaccgctgcgaggatgagagatatacctggcttcatgacgccgagttttaaggattcggagatactgatactggatcgtaaataacaggcagcaggaatatgagaatgctgttgttcgtgaggagcggacagcagtagacctgctgctattatgaaaaaaattgtactgactgaagggagattttgacaatggcaagagaatttattgtacctggagaaattatttccggttccggagcactggacatggcagaaggagcactgaaactccttggtaaaaaagctctgatcgtaaccgataaagtaatgatcgacctgggaaactgtgcaaaagttgagaaggcgctgacaaatcagggcattgaatacagcatttattctgacatctgtggtgagccaacagataccatgatcgaaaaaggcttacagatctataaagatgagaactgtgacttcctggtagctctgggaggcggaagccccattgactctatgaaagccatcggctcactggtagtaaacggtggaagcatttccgactacatgggaaaagtgatcgatgtaaagatgccgccaatggcggcgatccctactacagcaggaacgggatctgaggcaacacagttcacgatcatcacggataccaaaaaagacatcaagatgcttcttaaaggcaaagttctcatgccggatcttgccattatcgacccgcagtttactatgactgcacctccaaagatcacagcagcaacaggtcttgatgcactttgccactgtgtggaagcttatacatccagaaaagcacagacactttccgatacttttgcagtatctgcagtaaagaggatctttaaatatcttccggttgcatataaagacggaaagaatgaagaagctcgtgtacagatgtctgtcgctgctcttgaggcaggaatcgcatttaacaatgcatctgttaccattatccatggaatgagccgtccgatcggagcactgttccatgtagcacacggactttccaatgccatgcttctgaaggagtgccttacctttgcgcttcccggagcatacgacagattcggagcgttgggacgtgatattggtgtggcggatgcagctgattctgatcaggaagcggctgagaaattcctgaaagcagtagagtcacttgtaaatgaactggatactccgactctggagcagttcggtatcaataaagaagagttcttcaacgtcatcgacaaaatggcacatgatgccatggacagtggaagtcctcagaataccatgcgtgatgtaacagaagaggaagtaaaagaaatctacagaaaactctggtaaaatgtaaatgtaaaccctgcattgccagataggaaaagactccggaccggagaaaaaggctccggagtcttttttcccgtggcaaatatagctgcaaaagaaaaggaggcatatccttcatgagaaaaaagtatatctgtattctggtggcagtcataggagtttgcagcctttccggatgcgggtcttctgcaaggaaaacagaagaagagcaggtaacgatcggtgttgttacaaaatctaaaagcagtgaatattggttgtctgtctgcgacggaatggaagatgcggcagaaaaatatcatgcagatgtggtgattctgtctccggattccgaaacagaagaagaggttcagaaaaatatgatccgggatcttctgaaaaccgatatccaggcgatggcagtttctcctatagattcctatgaatgcgaagattatttaaatttcgcaagagaaaaggggatttctgtatatgcctgtgatactcccatagaggattcagaaatcccttatattggaattgacaatgaaaaactaggctatgagctgggcgagcagcttgcaaaggctctggatcataaaggaaagattggcgtgatcgccggtgattttaagcaggctggacaccggatgcgtgttgccggatttgaaaaatatatggaaaaagagcctgggatcaccattgaaatggttcggaacggatacagcaatatgcgggtttcccagaaggatgtggatgagatcctggtgaagtatccggatcttaacggaatcatggccacaagtgcagtgacggccctgggactttcagaggcaactgaaggacgggagatttctattgtttccgtagatgctcaggaagatgccttgaaagcggttcaggatgggcgtatcgtggcgcttggcgcgcagtccggttatcagatcggttatgaaaccatccggtatattgtgaaggatctggagggagagggaacaggagaagatgagattctggattcccaggtgcttaccgaagaaaatattgatacatatatgaaggatgacggacattctcatccctgatacaagcaggtttccatccgctgcttattattttttacaatccggcagaggcattgactgattcggtaaaaagtcaggctggtatccaaaaataaaacacaaaacataaaaataggacaaaagaaggatgtagagatatcagaatcagaaaaactttggtacagatttaacagtcaggtaaaaataataccgaaaaaactaaaatttctcatactatgataatcccgtattttcgataaaatagaatcatcaaaaggaaagcgaaaataaaaaacgaaaagaaatgaaagggcgggataataagatggagaagaaaaaactttcggtatcaacagggctgtgttatgctggaggagatgtaggatgtaatatcgtgttcggaatgatcggaacactgctgacgctgttttacacagattatgtagggataagcgcagcaacagtaggactggtaatgttactttccagatgctttgatggattttccgatctggtcatgggtgtcattgtagagaggaccaattccaaatggggaaaatcaagaccctggcttctgtggatgagcattccgtttgcgctgtcagcagtactgcttttcacagtgccgcgtacaacagggatgcttcagtttctgtatctctttgtaacctataacttctgtacgaccatatgctatacagcgatcaatcttccatatggaagcctttcttcaatgatgatccgcgaatcatcagagagagataaactcagtgtattgagaatgggactgtcacctatcggaaagatcgttgcagcaacctgtacactgccgcttgtaaagcttcttggaaatgatcaggctgcatggatcaaggttatgagtgtatgggcagtgcttgcacttgcacttctgcttctctgcttcttcaaatgtgaggaaaaggttcagatcgaagcaagaaagaaagatgagaagcttccgattccgacaatgctgaaggcactttttgcaaatcagtatttctgggcagtaatgcttctgtggacagtacagagtgtatcctttacgatcacaggaaccattcttccgtactactgcaaatatattttcaacaatgatacatggatgtacagcgcactgttccttacagaaaccctggttctggtagtgggaatcttcatctgctcaccgttgatcaagaaattcggaaaaagaaatatcgcatttgtcggcggatttgttgcacttggcggccagattctgtttttcctgaatccatacagcttcggcttcatggttatgagctgtgtcacacgtgccatcggacttgctccactgaacgcagttgtattcagtatggttggtgatgtagtagagttcggacagtggaaaaaccatatccgtcaggaaagtctgatctttgcaggcggttccatcggaacaaaagttggcgcaggtcttgcctccgcagtgatcacaggtcttttaagcagttccggatatgtaagctcatctgcaggaataactgcacagccggaaacagcactggagatgatcgtttctctttataaatttggaccgatcctcattgcagcagtgatcattgtaacgcttttcggatataagcttgacaaaatgtatccggcgatcatgcaggagcttaccgagcgcgaggcacacggacagttataaacattttattgtaaaacatatattcaaccgcaaacaggaaatcaggcaggggtaggatactcctgctgtttcctgcgtttatgggcatatagcatagagaggcgtatatccgctttacggaagggaggagttctatgttaaaaagtatccgggcaaagatattactggcgatcctgacagtaaccatgtttactgcctgttctcttacgggggtattttattttcgggcagcagggatgatcgaagaaaattattccgggatcctgtatggacggatgcagcagactataaaagatctggacgaatccctgaaagagatttattatgtgaatacgagaactgcctgggatacagatatacggaataatgcgaaggactacagctgtacaggaaatgaaaacagcctggaaaatatggccgggcttctccgggaacacagtcgggaatataaagatatcaactccctttactttgtctttccagacaaaaaaatggctgtgacttctgaggaatttccggtaaacaagcaggggatttcaggagaacatatcgaggaattggaaaaaatacaggaactggattcctttccggttcttgtggaatctccgatccatgaaggcagcagctttctttctgtgatccagaaggtagaggatgataacggagagattctggggtatgttgtcgcagatatcagggaacgggcaatttattacgaatatctggaagctgtcaatgatgaaaagatcaccagaatagttctggtagacagaaatgatgaaatcgtgacatccggagactacagtgacattggaaaaacatttccggagattacagagcagaatgttccgaaaatggaaggctatgcagaaaaaaacggtgtgatctcttttttcagcagaggtagcttttcagactgcggcttatatctggaggtaccgaaaaaagaagttttaagcggactttcccggatgcggctctttctgatcggaatatttggtgcagtttttgtggcagctgtgctgctggcactgtggctctccagagtagtctgcggaccgctcagatccatgactggcacggttgagaaggttggtgagggagatctgagcctccgtacagaagtgactactgctgatgagatcggaaccctcggaaaagaattcaaccacatgctggattatatcgaagctctgatcgcccaggtgatcgaagaggaacagcagaaaaaagatgcagagctggaagcactgcagtatcagatcacaccgcattttatgtataatacattgaactccatcaaatttgcggcatttctgaaaggggaaaaagagctggcagggcttattggagatttcgtggagcttctgcaggccagtatcaacaaaaagggaagcttcctttctgttgccgatgagatccatatactgaaaaattatatccatctgcaggattttcgctatcagggaagctttcaggtgaaatatgagatctctgaggaagcataccggtgctatattccaagactgatccttcagccgcttgtagagaatgctcttcttcacggaatcgacatcaaacggcaaacaggaaaaatctggatcagcggaaacgtaagtgaaggaaagctgatcctcatagtaaaggataacggcagaggaatgacaaaagagcagatccgagatctttttaacagtcatgcaaaaaaaacaaacggactttccgcagtggggattcctaatgtaaaagaacgcctggagctttattacgggacacagggaggaatggaatacgtaagcagtggaaacggtacagaggtcacggtatttctgcctgcgatctatgatatgcctgaagaagggagaaaaaattaatgtacagaacactggtggcagatgatgattttcttgtaaggagctatctcaaaaccctggattcctgggaaaaagcaggatatgagatcgtggatgatgcagaagacggggaggaagcttatggattcctccagaaagaaaaaatcgatgttcttgtgacggatcttaccatgcctgtgatggatggaattgagctgatcagaaagatccgtgaggaaaacagggatatctatattatcgtgctcagctgtcatgatgattttgaatatgtaaaagaggccatgcgtcttggggcggatgaatatgtattaaagaacagtctggacgaggatagtctttatgatactctggaaaaatcagcccggctgatcgagaagcgcagagaaaaaagtcaggaacaggcacggacgagaaaactgatccatctgggaagtcacgctctgaagtattatttttttaacggactgatctcggggatgctgaaaaatcaggcacgtgaggaaaagcgtgtggaagccggaatcgccgggaaatattttaacagtgctgtgatctgtatgtttatggagaactgggcagagagggaaagacaatggacgccgctggaagtggaacagtattcccatcatttccgtcacagactgctggaacgtacggaggagcttcttgggacagaaagtgaatttacggaagtggtctatcttggcgcagggattttttgctgttttcttgatctttccggagactgcaggacatcggctatgcagcagagactgactgaggcagcagcgatctgctaccggcactgtcaggaggatctttgtgattttggtatcagtgtcagcagtgtctgcatgggagaggatgggatccgccaggcttatcagcaggccagagaaatgatgaagctgcatttttatgagaaaaaagagatcctttattttgaaggacggaagaaagcggacagtgttttaccggaaagtgctgagaagctggaagggcagatttccaggctgaaggcagggaaagaccgaaagaaagcggaggagctttggacacaggttctcgctgactgtcaggatcgttataccgacggaagacttctggtacagtggcttaagaaattgaatcagacagccggaattgagaaagagcccatctggtatggagatatcgaaagctttgagaaattcagggaaaagggcagtgcctgtatttcacagctttttgtaggggaagaggatgctgttccggaggggacctctgctgctgtgaaaaaagctctggagtttatccgggaacattatgaagcgccgatcagccttcaggatgcagcagatgcggcggaggtgaatcctgcttatctcagttatcttttcaaacaggagatgaagatcggtttttccaattatgtgcaggagcttcggatcgactgtgcaaagaagcttctttcagagacgaactgtaaagttaaggatgtggcgttgcgttccgggtttggagattatcattatttttccaagatatttaagaagtttacgggcttaagtcctgcggaatacagaaaagaatccggattatcatagaaagaggtgctgagtatgggagttactataaggcagatcgcggaagctgccggtgtttccagaggtactgttgacagagcgttaaataacaggggcaggatccgtccggaggttgctgagaggatccgtgccatcgctgaggagatggggtataagccgaatcaactgggccgtgctctatccatgagcagaaataatattaagatcggcgtgatcctgcagggtgcggaaacaccttttatgaaagaagttctgaagggaatccaggaggcgtgcgctgaggtggataatcttggtggtacagtcctggtccataagatcgagcatcagaatgcggaggatgttattctcgccatggagaagatgcggatggaagaggttcgtggtattgccatggttcctttggatgaggaacgtgtgaaaagggaaattgaccggtttgtggaggaatttcggatcccggtggtgacgtttacttcggatgtggaggatacgaaacggctttgctttgtagggcagaacggtgtgcagtgtggccgtgcggctgcggggcttatgggggagctgaccggtggaaaaggaaaggttgctgtgatttccggctatagtaccaatacttctttgagcagcagggtggttggattccgtgaggaaattgcgcggaagtatcctgggattgagatcattgggccggagtattgctttgaggagaatggccgggccagggagattacggaagggatatttaaggatgttccggatcttgacgggatatatcttacttctcatggtgaggagggggtgtgtgaggcaatcgccggagcggggaaagctggtcgggtgaagatggttgccaatgattttatggggcggaattatgagctgatgaggggaggatttattcatttcctgatcgggcaggatgccaggatacaggggtatgagccggtgatgattttgttccggctgctgtttaatggggaagcgccggagagggcgaagatttttacggaaatatatataaggaatgagtatacgattccggaggggagacactgaagtggggtgtctccttttttgtgcggagggacgccgcggaaggggatgctgtctggtctgcggcttcgtcgggggctggcttctaggacggcggaaatctgctaaaagcgtttttcaaaagtccgaactcgcggcctgctgccgctcagacagcggacttttgaaaaacaacgcagattcccgccgtccaagaatcagctcccctcctgcagaagcagagccatccagcatccccttccccggctggtgcttccggtgagaaatagtgtcgtttgacggttggttgtgggtcgtcagcgttgcgttggacgactgcaatggctgagtttgtgtttgattggggggacggctgaggcgctgcgctgtcagcctggattgcggatgtgcctagaattgcggatgtgatgggagaatagcctttgatgccagcgcagatggactgtgtggatgtgcctagaatagcctttgatgcca

SEQ ID NO: 225 - DNA, 11063 bp, Unknown
  gut microbiota DNA sequence
gatgggaatatgacaattgtaatattgtatagaaataagtggatttttgataaaattcgtgtaataatgatgttactatcagaaatgagagtgacgatggctttggaatatcgtaaaattgtaaataagaatgaattttcagaaaggggttggatttatgggtcttatcagagcggctgtgggtgcagcgggtggtacgttggcggatcagtggaaggagtttttttactgtgaggctatggataaagaagtgatggttgtgaaggggacgaagaggtcttcttccaggtcttccaataagcatgggagtgataatattatttccagcggcagcgggatcgctgtggcggatggtcagtgtatgatgatcgtggagcagggaaaggttgttgaggtttgtgcggatccgggagagtatacgtatgatgcttctacggagccgagtattttttcaggtagtctgggtgacggaatcaggaagacctttgatacgatcgggaagaggtttgcttttggcggtgatacgggtaaggatcagagggtgtattattttaataccaaggagcttgtggataacaagtttggtactgctaatccgatcccgttccgggttgtggattccaggatcgggctggatgtggatgtggctgtgaggtgtcatggtgtttattcctacaggatcgcggatccccttcttttttatacgaatgtgtgtggaaatgtggagcgggagtataccagagaggagctggacggacagctgaaggcggagtttatcagtgcgctgcagcctgctttcggaaggctttcggagctggagttgcgtccgaatcagatcgtgactcataatacggagctggagaatgccatgaatgaggtgctttctgccaagtgggaggagcttcgtgggcttaaggtggtcagtgtggcacttggttctgtgacattgccggatgaggatgccgagatgatcaagcaggctcagcgtacggctatgatgcgtgatcctgctatggctgcggctactctgaccggggcccaggcggatgctatgaaggctgcggcttctaattcagcaggggctatgactggttttatgggcatgggtatggctgctaatgcaggtggtctgaatgcgcagcagttgtttgagatgggccagaagcaacaggcgcagcagcagagtgtacagcagcaggcagcgcggccggtttcgccggcagggaacggagcaggggctgcggctggttcctggacctgcagttgtggtgcggtttcttcggggaaattctgtccggagtgtggtgcatcgcgtccggtggaggacagctggacctgttcctgcggtacggtgaataaaggcaagttctgtatgaactgcggagcgaagaagccggagaagaagatgcagtatcgctgcagcaggtgcggatgggaaccggcagatccggagaatccaccgaaattctgcccggagtgcggtgatccgttcggaccggaggatgcagtatagatcagaaagagagatggtcaggagcaaaatgcagggtaactcctgccggttgttggatacagaatgatgaagtgaggtgaatatatggcgaagatgcaggagtttaagtgtccgtgctgtggtggctccatagagtttgacagttctgtgcagaagatgaagtgtccgttttgtgatacggagtttgatgtcgggacgttatcggaatatgcccagactgtggaggaagaacagcctgaggatatgagttggtcggatgaggccggcagtgagtggcaggacggggagagtgaggggctgcgtacctatgtgtgcaagtcctgtggcggtgagatcgtgggagatgccaatacggcagcaacggcctgcccgttttgcggaagtccggtggtaatgaccgggcagctgtccggtgcactgaagccggattatgtgatcccgtttaagctggataagaaagcggcaaaggagaggctgaaaaagcatcttaccggtaagaggcttctgccgaaagcgtttaagtcggagaatcatatcagcgaggttaagggcatctacgttccgttttggctgtatgacacagacgcagacgcagatatccgttaccgtgcaacaaagacccggttctggagcgatagtgattatgattatacggagactagctattatgcagtacacagaagtggttctcttggttttgatcatgtaccggtggatggctctgccagcatggaaaatgatctgatggagtctatagagccttttgatttcaaagaagcggtggattttcagactgcgtatctggctggatattttgcagataaatatgatgtgacagccagcgagtgtgaggaacgtgccaatgagcgtatccgccgcagcacagaggctgcattccgggatacggtgagaggatacgccagtgtggtaccggagaataccagtatccggcttcataacgggacaacgaaatatgcgttatatcccgtatggatcctgcagacgaagtggaagggtgataattacatatttgccatgaatggtcagacagggaaatttgtgggaaatctgcctacagacaagaacgcttttgcacgatggttcttgggaacaacgggggtcgtgggtgtgatcacttatattatcctgtatctgatctgggctttgtagggaggtggatgccatgaaaaaaagaatatctgtatttttgatatcgatccttttgtgtctggcatgtgcttttccggtatgggcaggcaccgtaagccggctggatgaccaggcgggacttctggatgcagagcagcaggagagcctgagcagtactctggatgagatcagtgagcgggatcaggtagatgttgtggtcgttaccgttaacagtcttgagggaaaaacagcccaggcgtatgcggaggattattttattgaccatggatatggacagggggaaaatggtgacggtattttattcctgttggatatgggagaccgtaactgggccattgcaacacacggatatgcgatagaagtgtttacggatgccggacagtcctacatcatggatcaggtgaagccttatttaagtgacggtgattataacgaagcgtttcataagtttgccacggaatgcgatgattttatcacgcaggcagatgaggcagagccatacgatgtggaaaaccttccggatgagccttttgcggttgggataaacctgctgatcgctcttgctgtggggcttgtggcaggattactggtgaccggaaatatgagaagaaagctgaaaactgtgcgaaaacaggatcgggcggcttcttatgtgcggcagggcagtatgaatgtgaccagaagtaatgatttttacctctacagtacggtatcaaaatccgcaaaaccgaaaaatgaggataataacggtggttccagcacccatacctcatcttccggtgataccttcggtggttccagcgggaaattctgagaatatcatcaggaaaaacagaatatgataaaaaaagaaagactgctgtaccggaatggtagggcagtttttcttttttctgtgtgcgaaagtatgtctctgtggcggcagaaacagggaattgccgtttattttttgcattccggaaataactttatctatttaataggttgaaatccgtcgaaaagtgcgttatgataataacaattatccacaccagtgcgttaaaattttacagcacaggggaaatcggaggagtgaataaaatggagtacaagattgccctgattccgggagacggaatcggtccggagattgttgccgaggccaaaaaagttttagacagagtatgtgagaaatacagtcataaattttcatacacagaggttcttttaggaggggcatccattgatgctcacggagtacctcttacagaggaagccattgcccaggcaaaagcttctgatgcagtactgatgggttccattggcggtgatgccaagacatccccgtggtacaagctggagccgtccaaacgtccggaggcaggtcttcttgcaatccgtaaggcgctgaacctgtttgcaaatcttcgtccggcttatctttacaatgagcttcgtgatgcctgcccgctccgtgatgagatcatcggagatggttttgacatgatcatcgtaagagagcttacaggaggtctttatttcggagcaagaaagactactgaggagaacggagtccgcacagcggtagatactctttcttataatgagaatgagatccgccgtattgccattaaggcatttgagatcgcacgtaagagaagaaataaggttacaagtgtagataaagccaatgttcttgattcttccagactctggagaagtgtagtggaggatgtggcaaaggattatccggatgtaacactggagcatatgctggttgataactgtgcaatgcagctggtacgtgatccgaagcagtttgatgttatccttacagaaaacatgtttggagatatcctctctgatgaggcaagtatggtgaccggttccatcggaatgctttcctccgcaagcttaaatgagacaaagcttggtctctatgagccgagccatggttctgcaccggatatcgcaggccagaacaaggcaaaccccatcgcaaccattctttccgctgctatgatgctgagatattctctggatcttgataaagaagcagatgctgtggaagcagcagtacagaaggttcttacagatggttacagaacaggagatatcatgtctgacggatgcaagcttgtcggaaccagagagatgggcgatctgatcgcagatgccattgcataaataaagcgggacagagagaagaaaacgaaacagaacagaaaaaaccggtacctggaagaggaagtctataaacagataccggatcctatcgtaaagaataaaaaggagagaccttaaaaatgaaaagtgataccgtaagaaaaggcacacagcaggcaccacatcgttccctgttcaatgcccttggaatgacaaaggaagaaatggacaaaccactggtaggaatcgtaagctcttataacgagatcgtaccgggacatatgaaccttgacaaaattgtaaatgctgtaaagctcggcgttgcaatggctggcggcacaccggttgtatttccggcgatcgcagtatgtgacggaatcgcaatgggacacgttggaatgaaatattcccttgtaacacgtgacctgatcgcagattccacagaggccatggcactggctcatcagttcgatgccctggtcatggttcccaactgtgacaaaaacgtacctggccttctgatggcagcggcaaggatcaacgttcctactgtattcgtaagcggcggtccgatgcttgccggtcatgtaaaaggacataaaaccagtctttccagcatgtttgaggcagtaggatcctatgcagcaggaactatcacagcagatgatctggaagaattcgagaacaaaacctgcccgacctgtggatcatgttccggtatgtacactgcgaacagcatgaactgcctgacagaggttctcggtatgggactgaaaggaaacggtaccatcccggcagtatactctgaacgtatccgtcttgcaaagcatgcaggaatgcaggtaatggaaatgtacagaaggaacatccgcccaagagacattatgacaaaagaggcagttttaaatgcacttacagtagatatggcacttggatgctccacaaacagtatgcttcatcttccggctatcgcacatgagatcggaatggattttgatatcagcttcgcaaatgagatcagtgagaagaccccgaacctttgccaccttgcaccggcaggcccgacctacatggaagatcttaatgaggccggtggtgtctatgcggtcatgaatgagctgaacaagctgggacttctccatacagagtgtatgacagtaaccggaaaaacagtaggtgagaatatcaaaaactgtgtaaacctgaatccggaggttatccgcccgatcgacaatccgtatacaaagacaggcggacttgctgtactgaaaggaaaccttgcaccggatggtggtgttgtaaaacgttctgcagttgtaccggagatgctggtgcatgagggtcctgcacgtgtatttgacagcgaggatgacgcaattgttgccatcaagagtggtaagatcgtagagggagatgttgtggttatccgctacgagggaccaaagggtggccctggaatgagagagatgctgaaccctacatctgccatcgtgggaatgggacttggttcttccgtagccctgatcaccgacggacgtttcagcggtgcatccagaggagccgctatcggacacgtatcaccggaggcagcagtaggcggcccgatcgcactggttgaggaaggcgatatcatcagcatcaatattccggagctgaaactggagatcaaggtttcagatgaagagatgcaggctagaagagaaaaatggcagccaagagagccgaaggtgacaactggatatctggcaagatacgcttccatggtaacatccggaaaccgtggtgcgatcctggaagtaccgaaagcaaaataaggaggaacgaaagatatgcagcttacaggtgcagagatcatcgtagaatgtctgaaggaacagggcgttgataccgtatttggatatccgggcggcgcgatcctgaatgtttacgatgccttatatgaatacaaagatgagatcacacatgtactgacctcccacgagcagggtgcatcccatgctgctgacggttatgcaagagcgaccggaaaggtgggtgtctgcctggcaacatccggtccaggagcaactaacctggtaacagggatcgcgactgcatacatggattccgtaccgatggtagccattactgcaaacgtaggaagaccactcctgggaagagattctttccaggaggttgatatcgcaggtatcgtaatgcctgtaacaaaatacagtttcatcgtaaagaatatcgaagatcttgcagatacgttaagaagagcattttatattgcaaaaagcggaagacccggcccggtgcttgtggatgtcccgaaggatatcacaggaatgaaatatgaatatgagccatgtcatccggctacggttaaccgtgagatcaaaagtatccgtaaagaagatattgatcaggcactggaaatgatcagagaggcagagaaaccgtttatttttgttggcggcggatgtgtgatctccggtgctgaccaggaagtacgtgagctggctcgcaggatccaggctcctgtctgcgatactctgatgggcaagggtaccttcccgggagaagatcctctctatacaggtatggtaggtatgcacggaaccaagacttccgatcttggcgtaacagagtgcgatcttcttattgttctcggtgcacgcttcagtgaccgtgtaacaggaaataccaaaacttttgcacataatgcaaaaatccttcagatcgatgtggatgctgcggagatcaataaaaatatcaaagtggatgccagtgtgatcggtgatgtgaaggaagtgctgaaacgccttctggaggaaattccgaagaaagaacatccggagtggatcgcacatatccaggaattgaaatcaaaatatccgctgaattatgatcacacacagcttacaggtccgtatattatagagaagctttatgagttgaccaacggtgatgcgatcatctccacagatgttggacagcatcagatgtgggcggcgcagtattataaatacaaagagccgagaactcttcttacttccggcggccttggaaccatgggctacggccttggcgctgcaattggcgcgaagatgggcagaccggaaaaaacagttgtaaatatagcaggtgacggatgcttccgtatgaatatgaatgagctggcaacagctgcacgctgtggcagacagctgatccagattgttatgaacaatcatgtactgggaatggtgcgtcagtggcagacgcttttctatggaaagaggtactcttccacagtactggatgacgccgttgattttgtgaaattatcagaggcgctgggtgcaaaagccattcgtgtgacaaagatggaggatgtggagcctgcacttaagatggcactggcagcagagggacctgtcgttctggattgctggatcgatcaggatctgagtgtgttcccgatggtaccggctggtgcgaaccttgatgatgtatttgacgaggaggatatgaagaaacatgagtagagtgtataatttttctgccggaccggcagtgcttccagaggaagtactcaaagaagtagcggatgagatgatggattataacggcacaggaatgtctgttatggaaatgagccacagaagtgcagcttttcaggagatcattgatactgcagagaaagatcttcgcgagcttatgaacattccggataactacaaggtacttttccttcagggaggagcatcccagcagtttgccatgatcccgatgaacctcatgaaaaacaaggtcgcagattatatcgtaacaggacagtgggcaaaaaaagcttatcaggaagctcagaaatacggaaaagcaaacaagatcgcatcttctgaagataaaaccttcagctatatcccggactgcagtgatctgccgatcagcccagatgcagactacgtatacatctgtgagaacaacaccatttacggcacaaaattcaaaaaacttccaaacacaaaaggtaagactctggtagcagatgtatcctcctgcttcctgtctgagccggtggatgtaagcaaatatggtattatctatggcggtgttcagaagaacatcggaccggcaggcatggttatcgtgatcatccgtgaggacctgatcacagaggatgttcttccgggaaccccaactatgcttacttataagacacatgcagacgcaggctctctttacaatacgccgaatgcttactgcatctatgtatgcggaaaagtatttaaatggctgaagaagatgggcggtctggaagtgatgaaacagcgcaatgaggaaaaagcaaaaatcctttatgattacctggattccagcaagctgttcaaaggaactgtagttccggaagacagatctcttatgaatgtaccgttcgtaaccggtgacaaggaaatggatgccaagtttgttaaagaggcaactgaagcaggacttgtaaacctgaaaggacaccgtactgttggcggaatgcgtgccagcatctacaatgccatgccaaaggccggcgtagaggcactggttgcattcatgaaaaaattcgaggaggagaatgcataatgttccagtatcattgcctgaatcctatcgctgaaaaaggtctgaaactttttggcgataattataaaaaaacagagaccgctgaccagtgtgatgcaatccttgtaagaagtgcaaaaatgcacgacatggagctgccgaagagcgtttgtgcagttgcacgtgcaggtgcaggcgtcaataatattccggttaaggagtatgcagagaagggtgttgttgtattcaacacgcctggagctaacgcaaacggcgtaaaagagctggtacttgcaggtatgctccttgcatccagagatatcgtaggaggtatcgagtgggttgcacaggagaaagataaagagcacatcggcaagcttgccgagaagcagaaaaaacagttcgcaggatgcgagatcagcggcaaaaagcttggtatcatcggtcttggagccatcggagccatggtggcaaacgcagcatgcggtcttggcatggaagtatatggctatgacccatatctttctattgatgcggcatggaacctgtccagaaccatcaagcacagcaagagcctggatgagatctacagccagtgcgattatatcaccattcatgtgccgcttcttgacagcactaagaagatgatcaacaaagaagctttcgataagatgaaggacggcgtagttcttctgaattttgcaagagatcttcttgttgatgaggatgcgctgatcgaggctgttgagagtggcaaggttaagaagtatgtaactgactttgcaaatgagacagttgcaggacgcgagggtattctggtaactccgcatcttggtgcgtctacagaggaatctgaagagaactgtgcagagatggctgtaaaagagatccgtgattaccttgagaatggtaatatcaaaaattctgttaattatccgaactgtgatatgggtacctgtgtggctgtcggaagaatctctcttgcgcacagcaacacaccgaatatgatcagtcaggttaccaaaatccttggatccgagggattgaatattgcggatatgacgaataagagtaaaggggagtttgcttatactcttattgatcttgagagtgcggcgtctgctaaggcgttggatgaactcaaggagatcgagggaatgtatagggtgcgtgttgttaagtaaagtaacaagaggttagaaatacttttttttaaatactgtgtggcgtttgcttttttggcgaatggcgtgcagtattttttttgaggaaaaaaggaaaaccgcaaaggggccgcaaagccgcggcccctctgcacacccctcgggctttttttaggagtgcttggttgtggaggacgggagttttgttgacttgtgtctgtatgcgacggtgctaggaacgaaaggttgagccgatggaggagaacggcctgaaggggttgttgagagtgaaaaagtcttgaggccgttataggtatgtgacggtattggatgtggaaggttgagccgagagtgagggttggagggggttggcaggtctcgatgtgcggggcacatctgcggagtttttggaatattatagaagtgaatttgaatggtaaatatatcaaatgggaatatattaaatgggaatatattaaatgggaatatattaaatgggaatatat

SEQ ID NO: 226 - DNA, 4891 bp, Unknown
  gut microbiota DNA sequence
ccgacgaagccgcagaccagccagcatccccttccccggcgtcccttcatccacatacaaatacaaaaaaagacaccacgtcacaaaaaaacgcagtgcctctctcatattcaagttattgcgaaaaaagcatcaagcagaagcctgatcagccttctcaacctcagcaatcgcctgcttcctcataggaatacggcaattcttattattaccaaactcaacaataacatcttcctcagtcatatcaataacaacaccataaaaaccactggtagtaacaacactgtcaccaacctccatgctgttcaacatagtctgagttctcttctgctccttcttctgcggacggatcatcataaaatacataattccaaacagaactacgatccagacaataccaagacccgcgctaagtccgccagctgccgctgtagatgatgcgatcatttcaaattcctcctgctaaaaacaaataatctgcggtacccccgccgttactgacctctaaaagtgtcacttcgtactatcatacacaaaaaccaaaaaaccttcaagagttttcttataaaatcaaagtaatttacacaaattttataaataaaacttaccggttcccgttgatcctgccttcctcaaagccttccagacgcatcttcttataagccgcaaaattccctgcatccagcgcatctctgatctcttccatcatatgattatagaaatacagattatgcagaacacaaagcctcatgccaagcatctccttcgccttcagaagatgacggatatacgctctgctgtaatgacgacaggccgggcactggcactcctcatcgatcggtttggaatccagctcatactttgcattaaaaagattcatcttgccatggttggtatacacgtgaccatgacggccgttacggctgggatatacacagtcaaaaaagtcaataccacgctcaaccccctccaggatattggccggagtaccaacccccataagatacgtcggcttgttctgcggcaaatgcggaaccacctcatccaggatccggtacatctcctcatgactttcaccaactgcaaggccgcccactgcatagccgtccagatccatctccgcgatagcctgggcatgctcaatacggatatcttcataaacagccccctggttaatgccaaaaagaagctggttcttgttaatggtatccggcagactgttcaaacgagccatctcatccttgcatcttttaagccaacgtgttgtacgcgctaccgatttctgtacataatccctgtctgccacactgcttgggcactcatcaaaggccattgcaatggtagaggccaaatttgactggatctgcatgctctgctccggtcccataaaaatcttatgaccatcgatatgagagttaaaatacacgccctcttccttgatcttacgaagcttcgccagcgaaaacacctggaatccgccggaatcggtaaggatcggtctgtcccagttcataaattcatgaagacctcccagctgctttaccaccttgtcgccagggcgcacatgaagatgataggtattggacagctctacctgtgtaccgatctcatgaagatccacagtggaaactgcacctttaattgctgcaattgttcctacattcataaaaacaggagtctggatcgttccgtggaccgtcttaaactcgccccttttcgctcttccttctgttgtgatcagtttatattctgccatttcatttcccttctaaaaacattttaaagttgtctctgcccggcatctgcgttacaggtacgccataaccagctgtcgatgcaaatatctttcaaaacttttagtcaatatcataacacatttttttctttacggctactgattgttaaacttttacattgccattttttaaacgatatcgtataatatagaatattcgcttaaaaatcctttataataagaagaaacaactcccatctgacagaaatgtcagagtcgggcaacccctatatagatacaacgaggaggaaatcaattttttatgaagaaacacacacttggaattgacattggttccaccactgttaagattgcgatcttagacgaaaacgatacgcttgtcttctccgactatgagagacattttgcaaatatccaggaaacccttgcagatcttcttcagaaagctgaggatcagcttggtgaactgacactctgtccggtcattacaggttccggcggactgacacttgccaatcatctggaagtaccttttgtacaggaggttatcgccgtatccacttccctgcagaagctggcaccaaagacagatgttgctatcgagcttggaggcgaggatgccaaaatcatctatttcgaaaacggaaatgtagagcagcgtatgaatggcatctgtgccggcggtaccggttccttcattgaccagatggcatctctgctccagaccgatgcaccaggtcttaatgaatacgccaaacattacaaggcactttatcccattgcggcacgctgcggtgttttcgcaaaaacagatatccagccactgatcaacgacggagcaactaaggaagacctttctgcctccattttccaggcagttgtcaaccagaccatttccggtcttgcctgcggtaaaccgatccgcggacacgttgccttccttggcgggcctcttcacttcctttctgagctgaagactgcttttatccgaaccctgaagctggatgatgaacatattatcgcaccagacaactctcatctgttcgcagccatcggctccgccctgaatgcaaagcaggatgttaccgtttccctgaccgaactgaaggaacgcatgcggaccaccatcaagctggattttgaggtagaacgtatggagccgctttttgccacagaggacgactaccaggctttccatgaccgtcagagtgcctacagggtaaaaaccggagatctttccacctataagggaaaatgcttcctggggatcgacgccggctctaccacaacaaaaaccgcgctggtaagcgaagacggaactcttctttattctttctacagcagtaacaacggaaacccgctgaaaaccaccatcaactccatcaaggagatttacagccttcttccggaagatgcagaaattgctttttcctgctccaccggttacggcgaagccctgatcaaagcggcacttcttcttgacgaaggtgaagtcgaaaccgtttcccattattacgcagctgctttctttgatcctgaagtagactgcatcctggatatcggcggtcaggatatgaaatgtatcaagatccgtaaccagactgttgacagtgtacagctcaacgaagcatgttcctcaggctgcggttcctttatcgaaacctttgcaaaatctctgaactacacagtacaggactttgcaaaagcagctctttttgcaaaacatcccattgatcttggaacacgctgtactgtatttatgaattccaaagttaagcaggcccagaaggaaggcgctgaggtttccgatatctccgctggtcttgcctactccgttatcaaaaacgccctctacaaggttatcaaggtttccgatgcttccgagcttggcaagcatatcgttgtacagggtggtaccttctataatgacgcagttctccgcagctttgagaagattgccaactgccaggccatccgtccagatatcgccgggatcatgggtgccttcggtgctgctctgatcgcaagggagcgctatcaggagggtaaaaaaacctccatgctttccatcgatcagatcaacagcctccagtacaccacctccatggcaaactgccgcggatgtaccaacaactgtcgtctgaccatcaacaaattctccggcggccgtaaatacatcagcggaaaccgctgtgagcgcggacttggaaaggaaaagaacaaggatcatatcccgaaccttttcgattacaaatataaaaggattttttcctatgaacctctttccgcagataaggctacccgtggacaggttggtatcccacgtgttctgaacatgtttgagaattacccgttctggtataccttcttcacagagctaaaataccaggtggtgctttctcctacttccacacgtaagatctacgagctgggtattgagtccatcccaagtgaatccgaatgctacccggccaagcttgctcacggacatgtcacatggctgatccgtaacggtgtgaagtttatcttctacccatgcatcccttacgaacgcaacgagttcccggatgcggtcaaccattataactgcccgatcgttacttcctatgcggaaaatatcaaaaacaatgtggacgagctcagtgatccgtccatcaccttccgcaacccgttcctggcatttacttccgaggatatcctgacaaaccgccttgtggaagaattccaggatattcctgccgccgaggtcaaagctgctgcccacaaggcctgggaagaacttgcagccgtacatacggatattcagaaaaagggtgaggaaaccctgcagtacctgaaagaaaccggccgccgcggaatcgttcttgcaggccgtccataccatattgacccggagatccaccacggtatcccggatatgatcaacagctacggaatcgccgtatttaccgaagactccgttgcacaccttggacatctggagcgtcccatccgtgtcaacgaccagtggatgtatcactcccgcctctactctgccgcaaattttgtaaaaacaagagaggatctggatctgatccagctgaattccttcggatgcggacttgatgccgttaccaccgatgaggtttatgagat

SEQ ID NO: 227 - DNA, 16691 bp, Unknown
  gut microbiota DNA sequence
gaggaacggatccaggctcttgaaggcgtcgaaagcgctaccattacttttgcaacaaaacagcttcgcttagaggctgcagatccagacgctctgcttccgcagatccgcaagatctgcacatccattgagtctgaagttaaagttgttccgagaaatccagctccggcagcttccactgacacaacaactaagacctatcttctggagaatctaggctgcgctcactgcgcttccaaaatggaggaacagattgcaaaccttgaaggcatttccgaagcaaccatcacttttgcaacaaaacagcttcgcttaactgcaaagaatccggatcgatacctggatcagatccgcaagatctgtacatccattgaatccgaagttcttgtaaaagaaaaggatccgaagccaaaggctcagtccccaaaaacagcgactcacccaaccgcttccaagaagaaatttttctccaaggaaaacgtagatatcatctgtattatcatcggtgcagtactcttcgttgccggagagatcatggaacacaaaggcttaggcaccagtgccactcttcctgtatttgtgatcgcatacctggcacttgggggtgttatcgttgtaaaagctgccaaaaacatctctcacggacagatttttgacgaaaactttctcatgagcattgcaactcttgccgcttttgccatcaatgattccgctgaggccgtaggcgttatgctcttctaccgcatcggcgagctttttgaggaaaaagccgttgaacgaagccgcggacagatcatggatgccgtagaccttcgtccggaagtagtaaatctggtcacaggcgatgatatccaggtaattccctctgaagaggctcagatcggagacattcttctggtccgtcccggagaccgcatccctcttgatggtatcgtaattgagggaaacagccgtatcgacacttctccgatcacaggagagcctgtaccggttgctgtaaatgaaggtgatgagatcacttctggttgcgtcaacacttccggccagcttaagatccgcgtggaaaaacctctggaagaatccatggtcactcgtattctggattccgtagaaaacgcggcagcaagcaaaccgaagatcgaccgctttatcacacgttttgccagggtttatactccttgtgttgtaggaatcgcagtggcaactgccatactcccatcccttgttaccggaaactggcattactggatctacacagccattactttcctggtaatgagctgcccttgtgctcttgtacttagtatcccgctggccttcttctccgggatcggtgccggttctaaaaagggtatccttttcaagggtggcctttccatcgaaggattaagtaagctcggcgctgtgatcatggataagaccggtactatcacagagggtaacttccagcttcagaaggttgttgccaccggtaaatacacggaaaatgaactcctttccatgtgtgcaggctgtgaacagaactccacacatcctattgcgaacagcatcgttgctgccgcaaaggaacgtgagatccaatttgaaaaaccgatctccctggaagaaatttccggtcacgggatcgttgcggaaatgccggagggaaaagttctctgcggaaatcgcaagctgatggataaattcggagttacaatcggagaattaaaggaagccgcttacggctctgaagtatttatggcagtaaacggaaccttcgcaggatatatgctgatctccgataccatcaaacctgacgcaaaggaagccattgcttctctgaaaaagcttggtctccacaccgttatgctcactggagactccgaagacagtgcacaggctgtaggaaaagatgccgggatcgatgagatctatgcaaagcttcttccggaggataagctcaatgccctgaaaaaggtccgccaggcacatggaacggttatgtttgttggtgacggtatcaacgacgctcctgttcttgcaggtgctgatgtaggtgctgccatgggaagcggtgcagatgctgccattgaagccgcagatgccgtatttatgaattccaatgtagatgcgatccctcagtccattgccattgcacgaagcacaaaccgtattgcatggcagaacgtaatatttgccctggtgatcaagatcgcagttatgatccttggtcttgccggacatgccaacatgtggatggccgtatttgcagacactggcgttgccatgatctgcgtgctgaattccattcgtatcctgtataaaaaataggatccgttctgcagggcagatatcctgcagcggatccctgtgcatccatacaactcccccgtgatgcagaaaagaatttgaccggtgcgtttttttcagctacaatagaagttaacagtttggaggatgcgcaaatgaagaaaacacatatagattacccgatcaataatgatacactgtaccggcttgccgacctgttcaaggttttcggtgatcctaccaggatccgtatcctgtacgtactttctgtggaagagctctgtgttcaggatattgccgatcgtctttccatgacccagagtgccatttcccatcagctccgggtactgaagcagatgtcactggtcaaatttcgaagagatggaaaaaccatttactactccctggcagacagccatgtggcaaccatcatgaatcagggtctggaacacgttacagaagaataactcataaaacacaatgcaaaaagccaatctgcttcctaatggaagaacagattggcttttttctctgccttactcatgcatcatttgtatttatccctcgccctgtggtgaagcaccatcgctccgtatgcaggcatcttcacctgaagaatccctgcatctgcaatatattcttccggcatttccgtataaccctctccggaagaaagcatcaggcgctgaaaagccgttgcttctttccggcttacaccggttttccaggctgttacccttatgtctctctcctgatcctgattattaaggatcactatgatctgttcagaatcagaaaaacgaccatagctcaagccctgatgatcgttccacagaaattccagggaaccctttgcaagaatcggatatgccttgtgtatgcagatcatacgtttatgaaagtccagcatctcctggtcttcttttccccagggataagttctgcggttatccggatctgtaaagccgcagacgccggcctcatccccgtaatataccgtaggcgaaccaggccacgtcatctggatcacaacagcctctctcatgatggcaggattgatgcctgcagatgctgcctctgcgcctgcgtaggaaagccttcctactctgtgattggtccttgtcagaaatctggaatggtcatggtttgaaagctcattcatggctccataaagcgctcccatatgcaaagactgcatatgatgcttcatcgccccgataaaggcctcactgttgccataaaggtcctcccggtactcatcactgtgcttctccattccggtcagaaaccaggttacaggctccataaaagcgtcatagttcataaccgtatcccactcatcgccgcgaagccagctttccggatttccgtagtgttctgcaaggatcactgcatcaggattggcttcttttactgtcctccggaattctttccagaagtgatggttaaaatcattactgtggcccagatctgcagctacatccagtctccagccgtctacgttatacggcggcgaaacccattttctgcccacatcaaggatcgtccggcaaagctcctcagattcttcgtagttcagctttggcagggtatcatgggtccaccagccgtcgtaggttggattatagggccagcggttctgatcctggaagcagaagaaagaacgataagggctgtccgccgaaacataggcccccttttcgtagccttcctgattttcgtagatccgttccctgtccatccatttattaaaggatccgcaatggttaaataccccatccaggatcactttcatccctcttctgtgaatttcctccacaagctcctgaaaaagcttattactggcctccaaattccgtttatcggtcacacggcggatatacttaagggcatgactgttgtcactgtctccgggacttaacagaccatcacagtccgctacgatccttccgatatgcggatcgatatgatcgtaatcctgacagtcatacttatggttgctgggagagacaaagaccggattcagatagatcacatctactccaagctcctgaagataatccagcttatccataactccctgaagatcaccgccataaaattcccggacacccatcacagccggaaccttttcccagttatccacttttacggaagtgtccccgatatagaaatattcccctgtttccacatcattggaaggatctccgttacagaaacgatccacataaatctgatacatcacagcacccttcagccactcaggcacatgatatccgggatagatctcaaattctgtcctttcctcatgtctggtgcttacaccatttgtatcataataacaggtaacaagtcctgaatgaatctcaaagtaatatcgtacaagattttttcccattacgatctgtgcagtataataatcaaagcttccggaagttttttcccacttcatttccagatattctccgtcatgcacaagacagacgttgtccacattatttctctgggtacgaaaacggatcgtaactgtatcaccttcccgcggctccacaggtgtacggtaatattccgtcccgtcactgaacattgcgtctttatttaataccggactcatattgagtatataccgcatcttctttgcagtctccatgctttcatataacattctatcttcctcattccgtttttagtaccatgtttcaaatatattatcttaattttttccatcccgcaagcatatatatctgttttctccgtaattcgccttttatttttgggcagtaaaaaagacagctggttaggctgccttttttggagaaggtatttcttcttatggggtgtagcaaaaactatataatgtattggggggtttttacggtatttatagtaccatgtgtccaccaaaaagtgtgcacaaagttcacaaaattcaatatatttttttgtgcattttattcgtttgtttttgcaacctcttctttttctgttgtaaaaagtgcttcaaactcttcacgatgtatcttttccttctcgagaagaagggccgcacagctgtgaagaacgccgatattctcacggatgatgctctctgcattctcatggcactcacggatgatacgggaaatctccccatcgatctctcttgccacttcctcactgtagcctctggtatgtgccagatcacggccgataaatacctcatcgtcatcgttgccgtaagcgatcagaccgattttttcagacataccgtatttcattaccatagagcgtgcagtctctgtggcacgtttgatatcattggaagcacctgtggtgatatctccgaagatgatctcctcagccacacgtccgccaagaagcgtggtgatatcctccagcattttgttctttgtattaaacatctcatcattatccggcagcggcatggtgtagccggcagctcccattcccgtagggataatggaaatggtgtataccggatccatatgaggaagtacatggaacaggatcgcatggcctgcttcatgataagctgtgatctttttctctttatcagagatgaccttgctcttcttttctgcaccgatcccgaccttgatgaatgctttcttgatatccttctgcatgatataaggacggccctcttttgcagcatcaatagcagcttcgttaagaaggttctccagatctgcacctgtaaatcctgcggttgtctgggcgatctggcgaagatccacatcatctcccagcggtttgtccttggcatggaccataaggatctcctctctgcccttgacatccgggcgtcccacaccgactttacggtcaaatcgtcccggacggaggatcgcaggatccagaatatccacacggttggtcgctgccattacgatgattccttcatttactccaaaaccatccatctctacaagaagctggttcagcgtctgttctctctcatcgtggccgccgcccataccggttcccctctgacgggctaccgcatcgatctcatcaataaagatgatgcacggtgcatgacgcttgccctcttcaaaaagatctcgtacacgggaagcaccgacaccaacaaacatctccacgaaatcggatcctgaaatggagaaaaacggaactccggcctctcctgcaactgccttcgcgagaagggttttacctgttccaggagggcccacaaggatcactcccttcgggatcctggcacctaccttcgtatacttctgaggggatttcaggaagtcaactacctcctccagatcctccttctcctcctgaagacctgcaacatctttgaatgttactttcttatcatcaggggatgacatccttgctctgctttttccgaagttcatcatcttcgcattgcttccgccgcctccggacatctgccggttcatcatcataaagaaaaagataaggatcgcgccggtaagcactaccggaagtaccgttccgatcatggagctgtccttgggtacattgcggatcgtcggatcgataccatgttcttcaagaagctcctccgcttcctttacatcggttacgtagactgtcttctgaccgtctgaaacaatgtttgctgttacataaccggtgggcacttctctgttctgatggatcaccgcatccgtcactttgtcttcttccagagccttttccagctggcccattgtgtagctgccctgggtagatacctggtcattgagatacagatatcctgcgatcagtgccacaataagcagaaggtacaggcctatcttacctgaatgcttgctcacttggttaaatctcctttcagtcctgaagctccactactccgatgtaaggaaggtttctgtatttctgggcataatcaagtccatatcctactacaaactcgtccggaatattgaagcagcagtaatctacctctacatctgtcacacgtctctccggtttgtcaagaagtgtacagagtttgatgcttgccggatgtctgcccttcaggatacgcagcagatagcttaaggttctgcctgaatcaatgatatcctctacgatcagaacatctttcccatccagtggctgatccagatccttgacgatctttacaacaccgctggatttcgtatcatcaccgtaactggacacagacatgaaatccagtgttaccgggcgtgtgatcctcttggcaagctcacacataaagaaaacgccgcctttcagaacgcagatcatgtgtacatcttttccgtcataatccttgttgatcatatctgcaacttcctggatacgggcatctacctcttcttcactgagtaaaaccctgattttttcgctcatgctaaagctcctccttggtaatgtaattctaacactctccctgtagtggaagtgatcttatacttctcgttcatccgtcctcccgggatccagagtatctcagatcctactgcaacaaccggaagcctgtctctcatctccgccggaatcttctcatcaataaagatccggttcagcttctttcttccgccttcactgtttacagtaagataatctccctgtcttctggtccgaacgcatggactattttttattttatcataatcaaaccatttcgtatactttttttcttcaatcttctgtttcttataagaaaaaattttcgactcaaaaactccgaaaggactttccagaattccaggtaccggaagctccatagacatttctctgagacctgccgatacttttttttcagtggaagcagcgttctctctgtctgatgcagagttctttttcagacatacccctccgtactgtcgtattacccgcagcgattccggaaggttgatataacgaccgttttcttttttttgaagcgaaagaacctggtccacatgaagagatgtaaagtccttacgttttcctgacagtatctcaaacgcctccatcaccgcatattcctgaaggataggatcctgtgcaaaaaatttttcatccagaagatagccattttctttccggtagcctgccagaagctcccttccctttttctgaagatacgaatctgcctctgccagaacccgtgcggtttctgccatatgctccaccgcttttgcattgatcttctgttccatagccggaagaatatggttacggatccggtttcttgtatagtcatctgaaagattgctgctgtctgtgatataggaaatacctctctctttcagataattgacgatctccttccgttctaaacacaaaaccggccggatgatctcaccatttaccgcctgtatcccggaaagtccccggataccggttccccttgccagatgatgcagcatagtctctgccagatcgttgcgattatgtgccagcgcaacccggaactgtccgttcttttttgactgttctccggaaaaaccaagtctctttttttcctcctgaaacgcctgttttcgcacgatccttccggtttcttcttctcccagtttccactttccggaaagctctggaaccggataatgcctggaccggaaagggattccccaatcccggcagattttttccacaaactgctcatcccggtccgcctcctggccccggatcccatgatggacatgaaccacttccatggaaaaaccgatctctttctgaagacttttcaaaatatgaagcattgctatggaatccgcccctccggaaacccctgccacaaccatatcctctgctttcagcatccgattgtctctgatatattttcttacacgtgtgatcattttttctcctgtaaccaaaaatactctattttttccacaatcctgccacaactactgtcatatcatccctggcatgataatcactgtatcccaggaccctttccagtattccccgtcccatctccctgggctctttttcccggacatccataatgatctccttcatggtttcctcttcccgttctgtaggaagcgcatccagaactccatctgtcatcatgatcagataatctccatgataaagcttccttgaggcagtatcaaaatccagctgctggaccaagcctgctgcaagattttccgaagcaatggattccacccagtgatctcttttaataaatgtggaagacgcccctgctttcagaaaatcacagatcccggtataaagatccaccgcacagatatcaacagtagaaaacatcccttcccgtcctttcaatagcagtgcggaattcaccattctggcagctgtctcctgagaaaagccggattccagaaactgttccagaagttctaccacgatctcgctttctttaaacgcttctattccggaacccatcccatcagacagacagagaaaaaacctgccatcctcttcctgacgacagatataattgtctccggaaaccttttccgcttctcttgtaagccgcgctactccgtaaagcatctgataactgacatcctccacaaaatggaccatacgaaaatctccatttacaatactgcggctgtcggcgtccggcgtcatggagcttccgcagatcctggacaggatctgtgcgatctctgtcatggaaacacactgtccgctcctggctctcagattcagaaatatctgccgtcttccttcgatcttatccatgacccagacattctttacaagtacatgctttttacgaagagcctttttcagatcttcctgaaactgcggatctgccggcatgatatcatacagctcttctgccatatgatccatgatcctcgaaatttccgtcagctgctgtgcaactgcaagccggctttcgatcatccggttatcccacacgagattctgcctttcttcacgaaatccctcattcaggacctgaaaatactgggcggaacggccacatgctcccatccattcactgcgtgctctctggatactctcttcattgccttcctccatggtacggatcatattctcactgccccgcatggtttccccggcacgctctccccagcagatctctctctgataacatctggaacatacagccgcactggtgtccgatatgatacggttcagctgtcctccgctcaaaaattccttacggtaaggcattccgtagaatgtatccgcaagcttccggaaggatgctgcataccgttccactttttccttctggggatggctttcacaaagcggcagcatttcttctttttccttcgtttttcccgaaaagacagtttttgccatgtcccggagtatcagcagtatgctgactacgagcatggcaatgatccattcctgcatattttcccctccccttataaccttcactgactgaacattataaaggaagatccctgaaatatctgtcaaagccgcacgaaaatgtcaaaaaaaatttcgtcgaaacctttgattttcagctatttttcttcctgaaacacgatctcgttgtctttcacaagtcccagcttctcacgagccgcctcttccacatattcgtcggtcttcatatgttctttctctgcttcgatctccttggtacgttccttctcactttcaatggacttctccagtgctgtagctttggaatcataataatccctgcgccgttccagagtcttactctgcagcataaggcttcccagcaacaccagtgcgatcaccatgatccccgccatgccaagataattatatccgatccgttttttttcttttcccttttttggatttttcaatctgctgctccttttttacacaatctgatctctttaccttttacgagcttatacatccaaattttacaacttcttcaaaaaaatatcaaccggtttgctgtcattttagctttaatggaacagtctttttaaaagggatccttcttttttgtcctttttcctgccaagataggtaagactgtcgatttttccctccaagctaagctgcccgcttttcagatcaagatgttttacatgaagtccttcgccttttatggataactttccttcctctgtatgcagcagtatttctttttcatcgaaagagatcacctcccggattcccgttatggtgccgcctttctgccgctccagcatcagactgtgaaatgctgccggtttcttctcgtccaatccatacctccctggggatgatttctcttttattttatgaaaaatccatccggaatagaccatcacgcccaaacggcagctgtccctgcatcagatatagcggaacatgctttccacctcatccttttttaccgtttccttaacttccaggacttcaacctttacattacggcttccaaactggatctccacagtgtcaccggtctttacctgtacagaagccttggccggcttgtcattgaccagaactcttcctgcatcgcaggcttcatttgccaccgtacggcgtttgatcagtctggagactttcagatatttatcaagacgcataatttttcctcctaaaaaagcaggggaaaccaaaaaccggtttcccctgccgttatcactctgaaccaacagattatttaccgttgacaacgtcctttaaagcttttcctgctttgaacttcggagacttggaagcctcgatcgtcatggtctcaccagtctgaggatttcttccctctcttgcagctcttgtgcttacttcgaaagttccaaatccaaccagctgaatcttctcgccttttttcagttcatctgttacaacatcgataaaagatttcagaacagcttctacatctttcttggaaagattggtgtctttcgccattgctgccactaactctgttttattcatggtgtttcctcctataattgatgttctcttatttttgactttgctttatatatataccgcttttggcttataatgtcaaggtttttcgcatattacaggcggaatgtgaccattttatcatttcatggaatcaaccatttcaagaacagccttgcccattgcatcggatttatcgtctgcatctgcaagagatgttcccttaacaccataatagaatttaaccttaggctctgttccggacggtcttacgcaaacccatgcatcatcggtaagctcatagtaaagaacattggaattcggaagtcctgtcggcttcttctcacctgttgcaagatctgtgatctcatccagcttgtagtcacgtacagcagtcaccttatgtccggcaaactcagcaggcggattctgacgaagtgttgtcatgatctcctggatcttctgaagtccctcgatacccttcatggtaactgcctgaatggcatccttatagtaaccgaactcctcatacatatcgatcattgcatcccagagagtcttgccctgtgtcttatagtaagcagcagcttcgcaaagtgccatggtagcaacaatagcatccttgtctcttgcataagttccgatcaggcagccgtagctctcctcaaatccgaaaagatatgtacccttgccactgttctcaaatccgaggatctgctgtccgatgtatttgaatccggtaagtacttcgataagattcacgttgtatcccttggcaatggcatctgccaggtttgttgtaacgatagtctttacaagagctccgtcctccggaaggcttccgtttacagcctttctctggctcagctcatagtttgcaagaaggcatccggacatgttgcccgtaagatcatgatactctccgtttttgtcctttacgcggacgccaagacggtctgcatccggatctgtagcaagtacgatgtctgcatccacttccttcgcaagcttcaggccaagctcaaatgcctctgctgcctccgggttcggatagctgactgtcgggaaatccccattcgggagctcctgctccggtactacatatacattctcaaatccaagctccttaaggatccttctggccggaatattgccagttccgtgaagaggtgtgtaaacgatcttcaggttcttgccctctgcccggatcgcatccatatggatgatctgtttcttaagctctgccatgtaagcgtcatcgacagcctgtccgatcacttcgaaaagtcctgcctttactgcttcttccttatccatggtctttacggtattccagtcggagattgcctttacctcgcccatgataccggaatcatgaggtggtgtgatctgcgcgccgtcctcccagtaaaccttgtatccgttgtattccggaggattgtggctggctgttacgttgatacctgccacacagcccagatgacgtactgcaaaggaaagctccggtgtcggacgaagtgtctcaaagatataagccttgatcccgtttgctgccaggcaaagtgctgcttcctgggcaaactccggtgacatatgacgggaatcatatgcgatggcaactccctgagatttcttgtcaaccttggcaatatagttggcaagcccctgggttgctcttcttaccacataaatattcatacggttggtacctgcgccgatgataccacgcaggcctgccgtaccaaactcaagatccatataaaaacgctctttgatctcattttcgtcgtctttgatcgctttcagttcttcttttgtcgcctcatcgaagtatgggttttcaagccactgattatagatttctttataatccatgttccaaaatacctccctgtttctttatataagatacttaatattatataacaattttcagaaaaagggaagttttgtttttttcacattcagaatcattactgcctgaagcactgttttgaaaattcctcccactgttttttctgatggatcagggttctcagcttttccacattttttccagagatcacagccttgttatgtgtataataatgatttgccagtttccagtatttttccggataacagaaccggactctcaggttctgccactcagactccgagagcggccgtacggaatcatatgcagaaagcatcttctgtgcgaggtgcagatcccagctgtatttctctaggattttccgcataaagcgatacagatctgccatctgcacatcaaagctccagtgactgaaattcgtcaccgctgtgtttttcccaagtatcagcacattatgctgattatattcgccatgacagatactgccgctttgaagagactgctgccgcagatttttataatccgtggtttccagcatagctgccgcttcttctcctttttgcagaaaccattccacgcttttcagataatctttctcaaaagaattgaccgctcctttttttcggataaaacgacgtatttttttcatttcctgattatgccggatatattcttcctgcagatttcttcccgcataatccatttccacaggaagctgcatgatcttgtggatctgtgccagagtccggatgctttttaaaatatcgttttcggatctcgtgtcacattcccgtccctcaaaccagatctgtgcagtatatggaacagaatctttgtccctgcttaccagtacgccttccctgtttctgagataggcgtccacaagacagttctgttctttcattttttcaagaagctgctgctgcatggaaagctttttttccgagccatgaaattcccggagtatcaccggacctttttctgtccggcacagaagtgccccccgcaccctgccggagaatgaagctgtaagcccatactgctccagcacgctcaacccataatcatacaaaaaagttcccccctgccttattttacgttctattttatgcaggggggatttttgttattctattcggtttttatgctgtctttttctgctgtttcaagaagtttttcttttgtattaagggttggatctttcagcacacagtcaagaagtctttcgagcagtgctcccagtgccggtccggccggatgtcctgcctttataagatcctttccggaaactgccagggttttcagagatgtacattcacctctttcaaggatcccctgataagcttccgtcacaccgcttaaccgtgccagcttctcctccctcctgtaagtactctgggataaaagatctgccttctgcactttcagatacagcggaaaaagctcttctccgataagattcacagctctccgcacatcctcggcgtccggagtgggacgaagatcatgataccggatcagacgacaggtatttcggatcgttacattatcaaatttcagacggcgcaggatctttcctgccagcttttcgcctgccggtccgtgagtcttaaagtggtctcttccattctcatctgtcttttttacaaccggcttggcaatgtcatgaagaagcatggtgatacgaagaagcctgtcattctcgatctccgtaaggcttttcaggatgtgctcgcctacgctgcagcagtgatggggggtattctgcgctgtttccatacaggcatcaaattccggaagaaattcccgggtaaggcctgtctcccaggctgtccggaggtaatccggatgatcggataccagaagctttacaagctctgtctggatacgctctgcactgacatgctccaggttccccgacatccgcgccagtgccgctttcgtattctcctccacagtaaaaccaagctgtgcggaaaaacgcactgcacggagcatccgaagagcatcctctgtaaaacgttccaccggatccccgacacaacggatgatcttcctattgatatcctccattccgccaaacagatccaccagtccatgccccggatgataagccatggcgttaatggtaaaatctcttcgtttcagatcttcctcaagactcctggtaaaggtcacggcatccgggtgacggccatcatgatattctccgtccacacggtaggttgtcacctcaaagccctctttgcccatcattacagttactgttccatgctggatccccgtatctacagttctgtgaaaaagctccttcacctgctctggaagtgcggaggtagtgatatcccagtccccaggcacccggtccaggatggaatcccggacacagccgccaacaacatatgcctcatagccggcttcattgagaatatgcaggatctgttctgctttttgtggtatgttaatcgtcataataactcctcttgatgatcgctgctgtccggtaaagcggacattcgcaatccgcttcgctacttgctcatgaacgcagtcgcttcgcgatctgcgttcaaaacacgtttacattttgctgtattgtctccatgtcagcagccgaataatattctgatatgttttccttaacgctattataacatagattcataaaaacagcggagcatattttgccccgccgttgtttctgcaatatggttcctgttcactccgttctcagtaacac

SEQ ID NO: 228 - DNA, 5372 bp, Unknown
  gut microbiota DNA sequence
ctttatcgacgtatcccgcttatcctccagttcatcctccgtgatcaccagcttcatggcccaggccgggatatccacatcctccggctcctgccccataaatgcaaatgcagtccggtatggtggcatctttgccggaaaaatgccgtaaccgtctgtaaaatatacaaggcctttcagattttcaaactctcgtttctccatcagctcttccacataagcaaaagccgggcgaaaatctgtgcccccatcgccgtaaagctccagactatccatataatcctgcagttcttctctgccggtgatcttcacatctgaatgcaccttctcgtcacactggataatgtgtatatttaccttctggaaaaaattcccgctgtcgcttaagatcccataggtttcctccagaaatctctgtaccagttctcctgagcaggacatggaggtatcgatcacaatgacaaattccgaaacttttttcatttctctggtttccaggggttcgatcagcggcatattcccgtaaagggaaagcccgtaggtataaaaattataatcaaagctgtccggatctacagtcagttcttcccgaaatactgcaaacttccgcagaaattctcgataatcatatcgttcccggttctctattttcagctggtccagaaaatctccgtcctgctcccctgactctctggaaaaagttccaaggtctgtttcgatcccatcgctgatatctccccattttttgctcatcaggggattgggtttccggtcgggctgctggtttgcccagtatttatggtcgtccacgtagaactctttttcaagctgtgccagttctttttccttcagaaattcttctttcagaatcttgtagattctctctgcattcagcgtcttcttttccttttccagaagacggtaggtttccctccggagaagacttctagaatatcggactgagcggtggtagatcccgtcgatcatatgctccactgcaatatcgcagcttaaattccacaaacgcttctctattcccggcttcccaaagtgccggaaaatgcagtgaaataccatatggagatatcctcgattcacaagaatcctgttttctttataaagcccgccaagctgtgccggatggaagtatatcacagccccgtctgttccaaacggactgaccgaaccatccatctgataaataaagctgctcagcgccacatccagaaaacgcatgccaagatacagctcgtctctcgccgcccggaggatgctgctgccgatatcctggagacgctgggctgcttcctgggaattggatccctgaccgggcaggaagttatttttattgttttcagttgtttctatatcactcataactgaaacttctttctccgtctcgctggccgcccatcattttctgtctccccggcagccttctgctcttccttcagcatccggctgcgttcattcatcagaaatgcggaaatctccatatccttcttcccggacgccacatcaatactatgttccaggccctctctgttccagagtttttcccgagaaagcagctccagaccatttaagcttccgctttccaccagaaattccccgatatccttaagatttccccggatataatcctcatactgcttcttcgccttttcactgagctgccacggataacgaagccgcccaaagctcatatcaaccagaacctccaacttatccattaccactgccatatcaaacaggctgtcatactctgcgaaatccagttctttgctgtagaagcattgccggtaattggtccctgagccatgatactccgtaaacaaaattctcgcaggcgtattctccaccgcctcatcataatgctccggaaaaaccatatgcgcacgttttccacctgtctcgccattttcatacagaaaatccacatcgatcttctgccataattccccaagaatctccttcgcacaggatttgattccctttttctgatggatcacaagctccttcagcccactgcatcccgtaaacgccccggttcccacctgcatcagcgtatccgaaaattccagccgttccagttttttgcatccataaaaaatatatcttccgatttccttcagcgtatccgggaaaacgatctcctgcacttcctctccggcaagaagtctctcttctccgaacgaaattacatcttcgctctcccaggtttctgcatcttcttctccatccttatgtgcagaaaacgcatacggcgccgcactgactaccggaagaccattgatctcttccggcagcaccacccggctgtctgttccgtaacaacggataatttctattgtattctttttgactctgtaatgtattttcataattctccatcataccaagaaacagatatccgaaatccatttcccgtttttattcttcaggaatcatctcatctactgctgatcccgatcttctatagcacatctgcatctcattgtagtctcattatccatttcatgcaagaaattttcccatgtccctatagcaatcctctaaaataatgcatcttaatccagcccatcagaatgtgaaatcctgcgtcagatatctttgccgtgcgtaaattctttctgatacataaaacagcccgtcagacatacgatgatctttaattcatctgatatctgacaggctgtatgcaacacaaaataaacatctgcattatactctgtttcacacccatgagcacaactttatttacttcttataagtactgactaaactccactttctccttattcggtccttcgatagtaaagaacttcacaccattctcccagaacggcaggaaatggacttcatcattggtagtattcagtccggctgctgttaccagctcgtgaactttctccacatccttcacatcaatggcaacatggtcgatggcaccggattccatttttgcagctttgttctcgtacgtctcgatcacaagatttccaagcttcaggaaagcaaccttctcattggcagcctcgttcactgtctgaaaagcgatctcaaatcccagtgcttcataaaatttaatggttgtctcaatgtcattggtcggcacacctacatgctgaattccgttcatctgatcttttaaattcatttcaaaaccccatcctttcataaatctgacatgctcataaacacaatcgcttcgcaatttagatataactctgctacaggtttatgaatacgattcctctgcaattctgcgttccacctgtgcaagttccggcattgccgggatcgcacctttttcctccacgcatagactggccactgcattaccgaaacgggcaaattccttcagttcctcctgtgtcagctcgtccggctgtttctccgatgtgctgaccttatacaggaatcctccccagaaggaatcaccggctccgttcgtatctgcaatctgtttcactgaaaagcccggcaccatacagcctccatctttgctgtaaatataagctccttcaccgccaagagtaactgccacgactttcacgccctgctcatacagtgtcttcgctgcttcccggacatccttatgatctgtcagaagctcggtttcctcatctgaaatcttcatgagatccacatagggtaccagacttctcatatattttttggcagttttttcatccggccacagagatgcacggtaattgggatcgtaagaaatcacgctgcccttgtttttcgctctttttaccgcataaaacgtggtatctcttgcaggctgatccgtcagggacaatgatccaacatgaaaaatatgggtatgatccagcacatccacgtccacttcttccttctggatcttcgtatccgctcccggttttcttgcaaaagagaaagtcctctctccgttctccctgacttccacaaaagccagggtagtaaaataattttcgtccagaagcatacccttggtatccacgctttctttctcaagaacagatttcaggaactttccgtgcatgtcttttcctgctttaccgataaatgcagtatgagctcccagtctgctggctgcaactgtaacattggctggtgcaccgcccggatttctggcatacagcatctgtccgtcctcattaatatcccgggaagtaaaatcgatcaggatctcaccaaaagttgtgatatcatagatggatcttttcacagcatctcctgtgtccacaagaaggttctgatcaagcagctgaaaaaggatcttctcacattctttctcattatctgtatgtatatgaagctctcccccatcaaactcaggcatacttaagaccccaagcatagactttgcatttacaacataacggccgtaacataattctacatcacatgggatggattctgcaatacttaccaactttcttgcattctgcattgtgcctaaaattacttttactatcatttttgtccactctcctatgcaaacaggctgatcacaacagcacaaaccaggcctgttactcctacgatagtttccatcattgtccaggatttcagggttgttttttcatcaatctccagaagagaacctaccagccagaatccggaatcatttacatggctgaatgcggttgcaccgccgttgatggcacagaccattgctgccagataaaccggtgacaggtctgcaactccgggcatagcagccataattcctgctgccattgtcatagccacaactgccgcaccaacagatgcgcggatcagagctgcaataagaaatgcgaccagtacaagcggaagtccacttttttccagggcaggtcctataatgtttcccataccgcagtcctgaagaacccagcggatgatacctccaccagtgatgaccagaaggatctgtccggtaggcttcagagaacgatccaggattttcttaagctgctctccattgtagccctgcttctttccgagaaaatacatggcaagcaatactgctatgatcagtgccacaaaaggtgttcccagaaactgcagaaccggccggaccacatcaagtcccggaatatattcagaaactgtattgcacaggatcaataccagcggaacaagaatgatacataatactgtagaaaacttcggcagcctggcttcttcttcctcacgtacctcctggatattggaaggcaaccctgtattgatctttttgccgataaatttggaccataaaattcctgcaaagatcagagataaaatacctaccggcacacctaccgcgatcattactccgagatccgcattcagcatatttgccactagaacagatcctgctgatggcggaatgaatgcaaaaccggtgg

SEQ ID NO: 229 - DNA, 36428 bp, Unknown
  gut microbiota DNA sequence
ataaatccggagtttttgaaacccgcaaaacctgtatctaaacaaaaaattgtctgtttttagacacaaaaaaagctgctgacgggaatcgaacccgtgacctccgccttaccaaggcgacgctctaccgactgagccacagcagcttgtttcgcgacgtttgtgccgctcacagttgtttatattatcagatgattgtcatattgtcaatacattatttttatttttttaaaaattcatattttcatgattatagcacaaaaaatcctgtgtgctgtcgctcgcagacacagcacgcaggattctctttttactcttctgtctttgtctcttctgcttctgtctcttcttccgcttcggcctccgattcatcatctgcaggtgtttcctcttctgcttctgttggtgcctcttcagcatcctctgcctctttggaaacttctacagtctcagatgcagtcttgtcccagtcctggaagacttctttctcttctttttcttccttcttctcgtcatccttgaaatcatcaagatcttcgaaatcatcctcaaagtcttcttcgcatacggatcgtctggatacaagtgctgcgatagctcctgctgcggcagcggtaagcgctcctactgcaacaagtccccaatatttattgatctttgccataatttggtctcctttcttattctgctccttatgaatattattttaatacttttatattcaaaaggaaagaggtatttactcttctcaaaaatagcttttaattttcccacggatcctctgcagtgcattatcaatggatttcggtgtttttccaaggatccgggcaatatccatatatccatttccatccagatacaactgcagtaccctgttttccagagggctcaggctctttttcatttcattttcgagagccgccacattttcccggtcgatcaggatcgattccggattatcatgctccacacaggaatctctgaagttttcctccgcctctccgtcgcttaaagacacataagtgttcagtggctgatgtttctggcggtttgaacttttaattgcagtatatatctgtctgtcaatacatatatttgcaaaagactgaaaagacgactccctgtctggctggtaatcacggactgccttaaacagtccgatcatcccctcctgtatcagatcatctgtgtccccacctatcagaaacatggcacgggctttttttctgaccagacctttatacttttccatcagataatctgcaattgcagattcccctgcacgaagtctttcgataagagcttcatccgtcatctcattatatcggcacattttttctccgaacagctatggctgtatttgatgtatttattttgacagtctctgtctcacgatctcaaaagcaagcacccctgctgctacagaagcgttaagggaatcgatatcccccttcatcgggatcgcggtagtaaaatcacatttctcttttacaaggcggcttacaccatttccctcatttccgatcacaaggccaataggtcctgtcagattctgacggtacatcacctctccgtccatatctgcacatacgaaccagatgcctttttctttcagttcatcaatagtctgtcccagattagcaaccttggcaaccggtgtataattcagtgcgcctgccgacgtcttggcaaccgtagcagtcagtcctactgctctgtgtttgggaatgatcacaccatgagcacctgcgagatttgcggtacggatgatagctcccagattatgaggatcctcaatattatcaagaagaatgataaacggaggctctcccttatcttctgcttttttcaggatgtcttccactgtagaataatcataagccgcaacctgtgcgatcacaccctgatgtgcacctgtctcgctcatggaatccaatcgttcctttggaacaaattttacaatggtatcatgttttctggcttctcttgcgatggtgcggaccggtccgtcctgacagccatccagaataaacagtttatcaacacatttaccggaacgaaatgcctcaaggaccgcatttcttccttctatcatttcagtcaatttaaacttcctccttctcaagtcctgcatggaccagctccagtatccttgaaaaatcctctttcaggtaaagatatcccatcagcgcctcaaaccctgtggcacgccggtaatccgccatggtggcatgtttggccatagtagcggaatgcgcattccttcctcttcggtatacacttttttcttcttctgtcaaaagtggttcgaggatctccatcatacccgactgcgcagatgcttttacaaggctgctagcttttttgtggagacgatttaccggacaattcgcttttttcacaagaatagtacggatcaccagctcataaacaccatccccgatataggccagcgtcagcggcgaataagtccgaaggtctgcgtctttcagatcaaacagctctttcagtttctttaagctctctgccatttcacaccttctcttgtatctttaaggatgataccttttttcaggagctcatctcggatctcatctgctctcttgaaatcctttgcctttcttgcagcctggcgttcctggatcagatcctcgatctctttgtcaagaatctcttcttttttctcgattttcagtcccagcacatcactgagcttaaaaagttcctcataaagaccaccggcaaactcccttgagctgttctcgtctacgtttgtgttggcaaattttacaagctcaaaaattgccgcaagtgcatctgcagtattaaaatcatcatccatggcagcttcaaatttggtaacaaaaccttctgcctctttgagaagcgcaagctcttcctctgtaatattctctgccgccccattgtctttacggtcgctgagcttgcctgccgcctcaaggatacgctccagagagttctttgctgcctccatcagatctgcgctgaagttcagcggacttctgtaatgtgcgttcagcataaagaaacggagaacctgaagatcatactgttcaccgatctgacgaacggtacggaaatttccgagagatttggacatcttgcggttgtcgatgttcaggaaaccattatgcatccagtatcttgcaaaaatcttaccattgcagcactcactctgtgcgatctcattctcatgatgcgggaagatcagatcctcaccgcctgcatggatatcaatctcttctccgagatatttcttggacataacagagcactcaatatgccagccaggacgtccgtcgcaccacggtgacggccaggacggctcgccctccttctttggtttccaaagcacgaagtctaacggatcttccttctgatcctcaccggataccttaagagaacggaatcctgactggagatcatccagattcttatgagaaagcttgccatactctttgaatttctttacacggaaataaacggtcccgtcagctgccggatatgcatatcctttatcaataagagtctggatcatgtcgatcatgccctggatctcctgtgtagcctggggtgcagttgtagcaggttttacattcatatctgccatatccttcttgcactctttgatataacgggtagagatttcctctgcggaaacgccctcttcaatggccttcttgatgatcttgtcatctacatcggtaaagttggatacataatttacttcatatcctttatattccatatatctgcgcaccgtatcaaaaatgatcatagggcgggcatttccgatatggatcagattgtataccgtaggtccgcagacatacatttttacttttccttcttccagaggtacaaattcctcttttctgcgtgtcagtgtgttaaaaatcttcatgttactcttcctccaatttcccgattctgtacagggagcagatcgcctgtgaggagattccctctccctgtcctgtaaatccaaggccttcctctgtggtcgccttgatattcagctgtgatattttaatcccaagtgcttctgcgatattttctctcatcgtcggaatatgtggtgccatcttcggtttctgagcgatgatggtggcatcgatatttccgatcacatagtcattctccttcagtaatccggcaacatgcaccagaagtttcacactggagattcccttatacgcagggtctgtatccggaaaatgctttccgatatctccaagagccgcagctcccagaagtgcatccatgatcgcatggatcagaacatccgcatccgaatggcccaaaagacctttttcccagggaatatcaacaccaccaaggatcagtttcctgccctctgtcagtttatgtacatcatatcccattcctactctcatcaaaccgttcatcactgcctttcctgaaatttatgtcaagtcaaaagaaccttttatgagctgttcctgctcagtatgtgagcatcttccgaagtctcagaaggctcagccttcttcttgtatacggtgcaagtctgagactctcctcgatcgcttttcccggcagtccgatatcccggactctgctcacgcagccgacgatactcatcatctcctgcatatctgtaactgcaggaagaagatctatgatcttaaggatttccggaagtgcaccggaaagtgtttctgtgcttacatcgtccagaagttccggagtgttttctttttcaagtgctccaagaatcccttttctgccgaaggtcttctgcaggagttctctgtctccgtctgtaaaggcatgcactctgcaggctcctcttcggatagcatctgcaagctttttatattccagaaggaccaacatggttgctgcagaaaccttctccccgtgaagagcatccaggtgaccattgaccacttccatatcccagaggtggaccatatggtgctccgccccggatgccggtctggagtttcctgtcatctgcatggccagtccggaaaggatcagcgcatacatcagcttctcacatgcatctttctctcctgctgcaatttctttcagattatccttaacagtccggatcgcttttgtttccaggtctgccaccgctgtacaatagtattcatccataagaatacttgctatcttccagtctgccagcgcaatgtattttcccagaatatccgacaccccggctgctgtaagccttgcaggcgccttagcaaaaatatccgtatccgcaaaaacaaaaagtggcgcagatgcctgaaatactttttttacaccattccaggtcatgtctgctactgtggaagtaaatccgtctgaactggctgcggtgggcacagagacaaaagggatccggtactgatgggcgacaaaacggctgagatcatggatcgtccccgctccaactgcaagaacaagatcgatgtcctcttccatataattctccacgatctccacggcacgctcatctgcctcaagaccttcagcatccaggatcagtacctgacaccggtcgtagatatcctccatcagttcctctgtagctttgtaactgttcgtgtcacagatcagaagcggggaaatacattctttcagatcaccgtctgacatttccttttccagtttcccgatagctcctgattcaattacaatttctctaacgtctatgtggtgctccctcccgcagctgcaaggtcgggcaaaatcgtccgcatcgactcgcatgtacttatgtcctcctgacttcttttaatgattcacagcgtatttctctgtccgctgaatgatacaatattacagtttggtattatacaggatttttttttattacgcaatgatagagttcaacttgtttcatcatatagcaaaaatcctttattttcaaggatttccggtgtttctacgccaaacaatgtttcgtctggttgcgtctattttcttttgtttgtcacaaaatttgtcacaaaaattgtcataataaaaagccacgcccaataaagggaatggctctgattattacattacattttcaagctttttcatttcattctgtaaacgtgtaaatttttgccctaaatgttctgctgacaaaaaagctcaaaagcaatataacgaccggaaacgcaaaaagaatcctactattacagagatttgattaagggaaagaaagtttctccttgccctaatgactataactcttctattcaaactcaaaagcagtatgaagaatggttaaaacaaaaacatcaagaattgacaaaaaagccaaagaaacacccggtacattaatttgcaccgggtatttttatatgttccattctgttctaagttgtgttatactgactgcgttgtccaaccgagacccggcaacggggggaggtgaacacatggaaatagtcatatcttttttggtggctgttgcggcaggtgtgacttgccatctcatttgcaaatggttagacagtcataacaaggacaacgaatagcctggtggatgctcaaccactgaaataaaaagagaagaaccctcgcatgtattggtggtacatacgggggttcgttctttgttcacatggaacatcatcatatcttttttgcctactggcattatagcatatgccgatcatgaaatcaatatgcttcgtctttgtaaatccgtgatttttccaccgtttgtcctaaaaatgtcacaaaatcatatttctaaatcaactcgcacatccagaaatgctttaaaatcaacactttccagacttcacggtataaatatattgctttcttttttattacgcaatgacgtgctttgacttgtttcatcttataccaagaatcctttgttttcaaggatttccagtgtttctacgcaaaacaatatttcgtctgatcgcgtctattatcttttatctactctgagctgaaagctaattatatttcttgcatatctgtttatttttatacatattagcatctgcagcatccaataacatctgcattgtacacgacatatcatcggaggataatgcccatccgcatgcaaagtcgattggtatttgattttcataactatttaatctgtctttttctctgttcaaggattttaatatttccttaattttcgcctcgcttgtatgataaatgactgctataaactcatctcctccatatcttccaacaaaatccttttctggaataacactgcgcaaaagctttgcgaaatttattattaactgatctcctgcggaatgtcccattgtatcatttacagtttttaaattatttaaatcaaacattatgcaagctgtaggatctgtaattatatcttttttattaagaagatcattacaggcatttttatttggcagcccagtatgggcatctatgaatgctttctgttccagcagtctgttttgcattgccatctgcattgcccttagagtctgcataataaccaatatcaccagactcaacatatcaagtgccgacaaaagctctatagtacgaatctttacagcgatcttttctgaatagctttctgcggaagagacagtttcatctgccatcgaaaaatatatttcactcatattaacaatgtctgtattttcgtatcccttgtttcttgctgcttcaatttctgttttcaatttatcccagtaatcactctggatttgcaatttttcctggtattcttcgtcattgagttttaccagatcataatgtccatcctgatatctcaatccaagaagaatatcatccaaatatttaattaattcttcattttggtttcctgtaatttctaattttacttcacgctgtgtagctccacgtaccagacctgcataatttattacgcgtgctgtcccctgcagcctactaatctgaatcatcataaaaataataagaactactaatatcaatataaggaaactctgtataatacctattatatttttacttttcttgtttgtctgcatttcacaatttatcccaaaccttaaataatattcatttactttcctacagaaaatcaaatgacagacttttggtcagtgaactttcattaagaatattaatctttgaagatggaatgacagttgcagcagttttcttgttgctttataacttccgctaacatcaacagcagattatcaatccactcatgtcattgatgtttggatcataaactgtctgtgtacaaatatcgggaagatcctctcctgttgataaatcattcctcaaaaaaagcactgccaaccagacagtgcacctcattttatgcaactggctgccattttacaggccctgtagctttgcgtcccagactttcatctggtttgccgatttccttattatagcttttacacgtatacaaaaaactggttttattatactatagtgctctactatatacaagaaaaacattaccgttttaacgtccaaaaataaaaaaagaacagccgatatatacatcgaactgttctcccacttccgaagtccacgcagcattgacattaccgttctatatattttgtgatgacagatattaaaatcctcatatcaaccggcttcgccacatggtcatccattccggcattcaaagcagcctgtacatcctctgcaaatgcatttgctgtcattgcaataatagggatctcctttccgtccggacgctccgacagatttctgatagcttttgtcgtttcatagccattcatttctggcatcatgatatccatcaaaatcagatcaaaggtccccggagctgtattgcaaaactgtgccagggcagattttccatcggcagtcctagttacgatcatcccttgttcttccagcaaagctgctgctatctctgcatttaaatcattgtcctctgccaaaaggacatgcagaccatgtaaatccatatctttccttaacttttcttccttttcagacagtatctgttctgctataagcaggggaatttctaccgtaaatgttgagccaataccctttctgctgctgacctcaatttttccacccataagatctacatactgtttggcaatggccattcccagtccggctcccttatagctggttcttgccccaccattttcctgactgaactcatcaaatattctggtctggaactcctcactcataccaattccggtatctgatatacgatagcgtacaattatatgattctcatcattacccggagcgttttctgcagcgaatgaaatggtgcctccgtcttttgtaaatttgactgcattactgataatgttgagcaatacttccctgattctgagttcatctgccatcacataaggagtttttagtttttctcttgaaacatacaaattaaggtcacgattttccatatatccctttgcgatcgacaaaacagtatttatcatatccctgagatctgtcggtaccggtttatattccagtttaccactttcaatgcggctgatatccaacacatcgttgatcagtgtcatcagatattctgaactctgcctgatctttttcagacaattctccacctctttgtccggtttcctcttcatggcaatatctgtaaatccaacaattgcattcattggtgtcctgagatcatgagacatatggttcaggaatgtcgtttttgcaatattcgccgcatttgcattctgtgcttctttcagggcttccatctgtttttttctactcacggaaagagaataaaccagaagaagcagtacaaaaataatcacaaacgaaactccgataactaagcctgcatgctcagcaaggatatccttcaaggtcatttccttttctgaaacagaattctgtgcaaggacaacaccatttaaaacattggatgactgctcaattgctttattgataatggtagctgctcttctgttttctctcgtcgtgaacattcctaattcctgccgttttgccatctctgcaaatgacagactttgggtcagtggactttcattaagaatattgatctttgaggatggaacgacagttgctcccacttttccatttgctacagcctccaggcattcttcctgtgtatcatattgtttgatttctgcatctggaaaaagaagggacaccatcaatccagaatacagtgaggtctctgtcactgcgaccgtagagagactgctgctatattcttttcccttgtaaataacaaccggcgtaatatcaaagattgcatccgtcaaaaccacttgaaactgttcctgtgtataaaaatcctgaatgataggaccggcaatatctattttgccagattgcaatgcctcatacatctctactcccgtggaacatggaactgccttgatcgtgatttcatatttttcctgaacagtatccagaacagttccaagaattcctgtgagtttcccattttcttcaccacaaaaaggaagattatcctttagatatcccacgcggatcgtattttcatgtgcatccagccattgtttttcttccttgttgagtgcatagtttatgaccgcttttccttcataacgggcatacagcttgctgctgtagtccgtttctgtattgttgatttcttccatggcagaatttaattcctttaacagatctggtctggattttgatacaccgaaataacagtcacttgcaccgatattggcaatggcaataaaatcgctgttgacagacagcactgggatcacaagtgcatccagttcatctgcatccagtttttctatcatttcatcatagcctttacaaacaaccacctctgcctggatctgattgctgtccagccatttttccagaagttctttctgatagcttccatctgctacaccaatacgacagccattcatctgctttggatcaccatccataagatctgtatgatcttcccgggtatagatccaatatctttctgttcctgcggcataggttgagtaatctatagattctgctctttccggtgtgtaactgacatttccaagtatatctatttctccatctgccagcatatccagacactctttaaatgagccatagacatattcatacttccagccggttatataagaaattttctggagatactcatagccggctccctgcttatgttccccataaccgccttcctgaaaattggcatatggaaaatagccaactctcacggttttattttcttcctctattaccggagttgtattcccatcactttttgtttccgacgcataaacaaaaaacggtacaaaaagcagcatgacaaatgcaaaaatgctcaaacatactctattattcttactcttttttcttatctgtttttctatctttctgttcattcatttcctctttatcatccagtaaagcggacattcgcaatccgctttcgctacttgttcataaacgcagtctgtttgcgttcatgctgttgtccttcccagtctgtaagttttcctgttttttcaatacagaaagaatgaccactccattcagtataacacgaaattattagttttcttactgccttaaaacttccgctaacatcgacagcagtttatcaatctggatcggctttgcaatatgaccattcattccggctgcaacagcatcccgcttatcttcttcaaatgcatttgccgtcattgcaacaatcggtatgcatgccttatccttatccggcaagtgcctgattgcctgtgttgctttataaccgtccattcggggcatctggatatccatgaggatcatatcatatgttcccaccggcatttttgttatcttatttacacactgaatgccatcctccacacgttctgttttaaggccggcacgctcaagtattgcttctgcaatctctgcattcagatcattgtcctctgccaaaaggatattcctgccttcaaggattttactggctgttccagagcctttatcgtgtttttttacataatagctttcatccgctatcctgtgttttaatgttacagtaaaggtgctgccctttccaggctcactctctatatctattgttccgccgagcagatcaacatatctctttacgattgacattcccaatccgcttcctgtgattttgctctttgtagtgtttcgctcacgcgtgaatgcatcgaaaatctttgtcagataatcctggctcataccgattccggtatcgctcaccctggtccttaccatcatgtacccgggctcatcacatactaattcgtctacgtttatcataacagaaccaccggatggggtatattttatggcattgctcaggatattgacaaatatttcttttaccttggtagtatctgtcagtatatgttcatgctctacatttattgtgtaatgaagtgcaatattctttttctttgcttcatcaccaaatatttcaaataaagtctgccggatatcttcaatccggccatagttctcatcaatttccatctttccgctctcaatccgagccatatcaagtacattatttatgattgacagaagaagatttccagactgctgcaatttttccaaatgatctgaagtttcaggcagatccttttcttttagttcttcctccataagctgtgcataacccagaattgcattcataggagtacggatgtcatgtgacatattgttaagaaaacgagtctttgccagactggcatcctctgcttttttcaaagcgatttccagtttgtcattgagtttttttgtatcctttgccgcaagctttgcgacagcttctgctttccttgccttccgcaaaagtacgaggataataccaatgatgctgagtgccaaaaatcctaccgtagccaaaaaaacaagcagattgtcttttatgaaatcagaaaatgttactttatctgcagtactgtcatagatagcaagtgcacttgtaagcatgtcagacggcatgacctttatagttttattcagtattgataaaaggcttccctctccctttcttacagtaaagcatgcctccattgtttttgtaagtggaacactcttgaaattttgactgttatcatatatcagcgcctggcttgctcccatgaggaaacagtctgctttttcttggatgaccatatctgctgcattgtcaagcgaatcacaatctacaagcttccattcaggataactgaatgcaatatgctgttttaaggcatatttttcctttggcacagctacagtatacaccttattctcatcaaatttttcctcatcagttaccgccatcaaactgtaagtccaggctgtgtttgtaagtgcatatccgttttgttctgcaaaatatggattcctgccggcataaaaaatcatgtcaatctcacgattctgcagcgcctgaatcatttcatcataatcatcatatgcatgtatattaaattccagtgtctgatttcccagacaatctttggcataggagatatattccgccagcataccggtaatttttccagtctcttcatccatggaaaagattgccggatcattgttcaaaaatcctatctggatacctccatgctcttccacccagaccttttctttacctgtaagaatctgaatataatcaagtgtaaaatacttcttatacagatctgccttaaaaaagggactatcctgttccagttgacgcatagcatagtccagctccgtcttgatatcgctgcgttctttatttattgcaaaatatatgcctgatttgccaatcgtggtaacggatgatattccctattcagaccagatcgattcctccagagatacaaaacagtcgatctcatgatttgctaatttcttttcgacatcatcatcattattcacatttacatgttctgtatgtatgccattcttattttcccattctgtcagcatgatctcaggttctgtatccatgagcacacctacacgtttcccatccagagacttgaaatcagacattccaatatccgtatccgataaatcagcataaaggatatatttttcctcccccatcggttcatccgggaaaagcatcttttgtgcacgttcatcggtgtaagagatatcacccatgatatcgatctcaccattttcaagcttatcaaaacagtcagaccagtcacatttcacatactcaaatttccatccggtataacctgccaaagcctgcataagttcgtatccatatcctcgtcttacaccgtttttatcgacataatcaaaggtatcctcaaatgagccgacacggatgatctgtgactgcttttcatcgttatccgtctcagcagcccggcaaggtactgtcaataccatccatattcccagaaacacaaatatacctgcacatagtacggttgattttttcctacttttatccatattttttatttcctttatccaatgggttgatgatgttccaagcacctggtcaaagacagaacgtcgtgtcgcatcacttaattcgacagtcccttctttatttcttcaatcatcctctcatatacttctgttactttttccattgccttcgatatcccaggctgcgctccggttctatctctcaaaagttctgttaactcattactaacctcatacagacggtcaaaagaaagattctgacaaacccctttcagtgtgtgtgcactgcggaaagcatcttcataatttttattttccaatgcctgttttaactgtagataactctggtcttcaaggaactttaatgtaaatctctgaatcagtgcttcgctttgaaggcgtcccaagacatctttatagtttcctccgatcgcttcatagcattcctgtattgtcatgattttgtcctcctatctatatttcactgcttatttgtcactgccatatccattatatttcaccaatttatgaattacttttatcagtaaccccacatcaacaggcttagcaatatgttcatccatccctgcttcttttgctcttattctgtcctccgtgaacgcatttgctgtcattgcaatgatcggtatttcttttgcatcctctctgtccagagacctgatcatctttgtagcttcataaccattcatgaccggcatcataatatccataagaatgacatcaaattcaccaggtccactttttctgaacagctcaaccgcttcctgaccattccatgcttttgtcacgtcagccccttcattctgaagcaaaaattcagcgatttccatattcagttcattatcttctgccagaagaatatgcagtccctttatagatttttctgatatatccttctgttcttcacgtttatccgcatccagatctatcttaaatggaacccggatcacaaatgtagtccctacaccgtattcactttcgagggtaatggttccacccattttctcgaccagattctttgcgatcgccattcccaggcctgttcctggaaattttgtacggcttcctgtatgttcctgtgcaaatggttcaaaaatatgtttctggaactcctcagtcattccgattcctgcatcccggcagataaattccattgtcgtcattcctggctgttcggatggtatttccatgcagctaagataaatatgtccgttttctctgttatatttcactgcattggacaggatattcatcatcacacgtttcacataccccggacttccaataagatcacggtgcgtgatttcttttttctcccacacaatccggatattctgttctgcagccatctgatcgatcacagcaaagacttccctgtaaatacttctcagattaaatgggatctcttccagaacgatttcaccggactccagcttactcatatccagaacatcatttaccagttccagcaacagattggatgcctctttaatctttgtcctgtattccgtctgtttctccatatcatctgcataatggtctgccatatcgaccaagccgcagattccattgatcggagtccggatatcatggctcatccgctggagaaactctgtttttgcctcattggcagcctctgccttttttgcagctatcagaagttctgccttatatttttcgtcttttttctgttcctgtttccggtgtgtcagattggttctatatgcccagaaccagaatatactgaatatcagaagataaataaaaataacacctgctacatttaatggaagattatgaaacacttccgtatccggaagatacgcataaatataataatcccgctgcttcagcatgattccgtagcatctggttccttcattcttcaaatgataaatgtgctgactgtctgtatgctttttcattgcctgaacaacttcgttgtcggctgtattctgccctaacagcctctcatcattactggcaacaacgatcccatcgtctgcaacaatgatcgttccatctttctggacactataaccatttaaaagctcttgtatcgtcagggtataatttctggtaaattcaggagatgtgtagtaatagattgcaacgatacctggcacatcttttctggcacaggctgcaatgtcaatataggatccatctttcctggcaaaccgttctgaataagatctttcttcatatccggcaaaatccatgataatttctttttgcagatactccgtgatctcattagtcagagactcatccatactgtattcacagtccatctttccttctttatccagcactatgatgccatccacccagagcgtctgcaggttttctttcagaaaatcctgacttagctgaccgccgttttctgtttccatactaatatttgtactcatctgtctggcactttcaatggcacgtaaaagacttttggattccgaagattcattataatgggtgtaggttgagcactgcactttgacatagtttacgatctccaccagtcttttctctgcttccgctttttctgcgtaaaagaaataaaacagagagactacagccacacagattccgagcagacctccgaacagctggattcgttttccttttgtctttctcttaatatccaagatcatccacctccagatacttctggggatcatccagatatttttcaataattttcagggatgtgccatcctgacgcatctccgccagtgtctgatccatctgctcacagattcccctgtcatcatcttttgcaaaagcgacacctattccggtgatcataagaggctcttccaggatacggaagcttgtatcataatccttcatatactgaacgatagattcctcgtgtgcggcaactgcatctacatatcctttcccaagaaacgtatagatcagttcccgatgtccaagactgatcagatttcccaatttggggattctttcatctgtccggttcagaaagatgctttccggtttggttgtggactgaacagccagattctttccctccagatcactcagtttatagatatcactgttctcatttacagcgaccacctgacggcttgctatgtatggtcctgcccatcggtaatcgtcaaggcgcccttccatggaaaaacatcccatgatacaatcaatctctccactctctaccagttcttttttcttctcccagttgatctggacaaccttcacctgatatcccattctttcgaaagcttctgtagccagttctacatctatacccgtcggtacaccatcctcattcagataattgtatggtggataattatcgctgccaagggtaataacaggcttttctggttcttctttcgtgttatctgtgtttttacaccctgacagggtgactgctaagatgcccgcaagcagaatgcctgcaatcactcttgttcctttcattttccgtctatcccttactatccttttcattttttgtgtacactagtcaagcggatattcggttaaataacaccataaaaaagcaccgtctcacagacagtgcacctcacttcatgcaactggctgccattttacaggccctatagctttgcgtcccagactttcatctggtttgccgatcatccttattaagcttttatacgtatcctaaaaaactggttttattatactacagcgctctactttacacaagaaaaaacattaccgttttaacgcctgaaaacacaaaaaaagagattgctccaaaacagagaaaaatactttatccccacaaaaagaaatccccgctgtctgactgaaatcagacaacagggattttttatcagatcatccgatcgctgcgatcacttctacctcgcagagaacgttctttggcagtgtcttgactgcaacacaggaacgtgcaggtttatttacgaaatatttggcatatacttcattaaatgccgcaaaatcgttcatatctgcaaggaagcatactgtcttgatcgcattctcatagctggaaccggcagcttccagaactgctccgagattcttcataacacggtcagcctgctcctcgatggttgtgccaactacctctccagttgccggatccaccgggatctgaccggatgtgtaaagtgtatctccatggatgatagcctgggagtatggtccgattgctgcaggtgctttgtctgtatgtactgtcttcataatagaattcccctttcatgaacatttcggatacttctctggcggaaatatccatcaggatcttgctcagctgttttttattctaactcacagatcacccctggtcaaggtccatattcagataattataaacaataccggaaatatcccggatatgcgaaactgcgtccccaggtttacagtcttctgacatcacacagaggatatatgtagtcttttctccatatacaatagcgatatcatgctggtccgtatccgtttctccagtcttatttgcaatttccacggacacagatatcccgctggggatcttagtagtaacctgctggttcagaagcaggttcagcatagcctccgaagcttctttcgatacacattctcctttatagatccgggaaagaagctctgcgcagtcttttacggaagtggtgttcctgccaccgaggccgacgtcctttgaagaggacgggcttaagatgtgctgtacggaagtatctgcaaatttctgttccgcaagaaatccatttacagcctgtgctccgtccttaaaaacacccgatgctgtctgcagacgtaccaactcattaaaagattcattgtcactgactgtgatcatattccagagaaggtcattgacctttgtggatacggacggatctgtaacatcttttttcatttttgccgcttcgttctgaaggactgcatccatgttggcataggtctgggccatgacaaacactttgatcagactggctgagtacagtgactgactgttctgttcaaactcctgatcactggtcagatcctttacataaacgctccatgtaccctcataggttccaagaagatccgcaagccgtttctcaaggccatccattcccagatctttcgtctcgacttttccagatttatccacggaaaatccctccggagtctctccctcttcctggagcagaacgccgttttctccgccaaaataataatatccgtcaaacatctgtcctgcagcattcatttccagataatggatacctggatctgtgaccatttttccatattcatcaaaataatacagcccgttgtatgttgttttgtccaccaccagctcatccatataacgtacctgtggagaggcgctgagttttcccagattgtttaccatataacagccgtcaaaagaaacttcctcaccgctgccgtcttttgccggagccttcagatcggtgatctggaccatatgcgagtttcccgctgtaaatttaccgctttcgtcgtgataataatatccatcaaaaaccgttccgtcgatctcaaaatgatcaaaataatacactgccggagtattttctttggttccatcttcattcaggcagtaaaagccattgcttttcagaatatatttcccgttttcaccgggaattggaagtatctgggactcctccgtaacagaaccaaggcttccctgtgccgtctgctgcactgttgtcgcaaaaaccggctgtgcgagcatcactgtgctcagacaaaatgccaatgctttatatattttttttcgtctcatatacttctttcacttttcttatgatcctattttacagtttcttgtcctgatccggcatccacacattcctccagtgattttccagataaagactctataagtatatcggatttctccgttctgtcaagtaaacctcttccagaacgtctccactgcaccttctaccgtatccagcctgcagcctgtacggtcctgccattccctgggaaagatttcctggtaatcccgatcccagaagcggtcatccagaagcaatatcacgcctttatcctcttttgtgcggatcacgcgcccggcggcctgaagcaccttgttcatacccggatagcgatatgcataatcaaaaccacagtgattctttttatcgtaatactctttcaggatctcacgctgactgccgatctggggaagtccggttcctacgatcactgccccgatcagactttcccctgtcagatcaacaccctcagaaaaaatccctccaaggacacagaaccctaccagggtaccttcccgttcctgaaattcctccaaaaatccttcccgttcctgttctgtcatatccggcgtctgacacacgcagcgcacccagtctacagaaaattcttcctcataaacctgcagtacgtcttccataagacgatacgacggaaaaaacaccatataatttccctgcctctgccagacacatctggcaatatatccggcgatctttcggtattctgcacgatttctccgggtataccggctgcttacgtcgctgccgataagaatcctgcggttttcttttgggaaaggagactgcacataaatcccataggcatcacggtctgttgtcaaaagctcccggtaatagagcatgggaaacattgtagctgaaaagaaaatagcacttttcccttttttcaggtattctcccagattttctgccgggttcacacagaacagcctcagacgaaatccttcttctgcgctgttttcggtatatactacataattttcatctaccagctctgaaacatttaaaaaatcacgcactataaaataaaattccagtatttccctgcgtagttcttcttccagttctttttcctccagtatttcttccagttcacctgatatcgtgagaaatgtgatcggcagtactccgggattgggaagcacctgatacccttttcctgtttccgcaagattctcttccagttccatcatctggcgatttgctttatccagtgttctggccagttttgaaaacctctttcttatcttctttcgaagtgctaccacactctgacgggaaataccggcactgtacatctctctgccacgttctaccagattatgtgcctcatcgatcagaaaaatatgatccccggaaatattttccccgaaaaaacgtttcagatgaacattgggatcaaacacgtaattataatcacagatgatcccgtctacccagattgaaagatccagacacatttcaaaagggcacacctgccatttttctgcatgagcacggatcacttctctggaatatacctcttcagtggtccagagctcataaaccgcatcatttacccggtcaaaatgcccctttgcataaggacatttctccggtgtacattccggagtatcctgaaaacacagtttttcctttgccgtgatcgccgttaccttgaatttcagacctttttcccgcaggatatgaaatgcctcctgcgccacagttcctgtgatggtttttgcggtaagataaaaaagtgtttcaccttttccctcaccgatggcgcgcacggacggaaaaatggcagacatggtttttcccacaccggtaggcgcctgaacaaataaggtcttcccactggaaaccgtatgatacacaccactaacgatatcccgctgcccttctctgtatggaaacggaaactgcagatccttcatggatgcatttctctcttttttccagttaagagaatatgcgatccatttgtgataggcatccagaagcttctgataccagcctttaagctcctctatggaaaaatcctcacgaaatctcctggtttcctccgtctcaagatgagcgtaggtcatctgaatgtggatttcagaaatcccttctttttctccccagatcagtccgtaacacatggcctgggcacggtggacaggtattggcatgtccattgcctggacatttccgtaagtccccttgatctcatcaatataaacggctccgtcctctgtaaagatcccatctgcacggccctcgacctgaatgaccacatcgtcgtattcactttcttttttcagagaaacctctgcctgataatcgcccttcatactccgctgtatcttgcggtgaagccttccgccttttaacatggcttccttatctccggatgtcccactgctgttatccagatctccgctcctcagtataaattccacaagatttctgacagaaatccgcactcttggtttttccatattttcactcccggcagctgccggaattccagtccgacagctattctttttccatgctataccaggattataccataaaatatgatccgaaagcttcccataataaaaaggacgcatgttctgctttttttctcatgaactgcgcccttttatcaccgtttttctttattcatatttctcaacctgctgcatacttggaaagaacacggttaaaatcctcatcttctccgtaacactttactgtcagagtctttgtcagatccagactcaaaagtccgaggatcgactttgcatcaatgataatacggttataaaatacatcaatatcaaaattacatctgctggctgcactgacaaactcctgtgcacttttttcatccagtttgatctgtttctccatagctgaccgcctgcctttctgattttttcatattccagttttacacaaaagttaagtttttgtcaatactgtttatttcatatcaaacttttttcgacacaatgtacaatatctttgtctttcctttggaaatcctgttgaatttgattgtattatttttagataaatcttggattttttccaaaaaaatccgccgcaggacggtatgttacacgtactgcggcggttttaaataaatcggatattcggaatccgtttccggatttatataaatcggatattcggaatccgcttcgctacttcctcataaacaaaatccgtttccggattttgtttatatccgtgtcagaacaaaaatatcgtagattgctctgactgctttttcgaaatcacgattctctacaccgatgatgatattcagttcactggaaccctggtcgatcatttttacatttacatttgcatgggcaagagcagagaagatccttcctgcagtgcctctctgggatttcattccacgaccaacaactgcgatcagtgcaaggtcagattccatctccacaaaatcaggctgcaccagacggtggatacctgcgataacctgctgctctttctcctcaaattcgtcctgatgaacatatacagtcatggtatcgattccggatggtacatgctcaaagctgatcccctgatcttcaaatacctgaagtaccttgcgtccgaacccaatctcactgttcatcatggatttctcgatattaatagagcagaaacctttctttccggcgataccggtaatagtgaatttcggcttcttacaggtgctctctacgatcagagtacctttatcctccgggctgtttgtgttacggatattgatcggaattccctctttacgaaccgggaaaatggcatcctcatgaagaacagtagctcccatgtaggaaagctcacgaagctctctgtatgtgatcgcctcgataggctccggattgtgaacgatacgcggatctgttacaagaaaaccggaaacgtccgtccagttctcataaatatctgcatggatagcctttgcaaccagggaacctgtcacatcagaaccacctctggaaaatgtctttactgtgccatctgcacatgcgccgtaaaatcccggaataaccgcatgctgggatttgctgagttttttggaaaggagtttattggtctcctccgcttccagattaccagctttatcaaaacggatcacagaagctgcatccacaaaatcatatccaagatatgcagccatgatcttaccattgaggaactctcctctggatgccgcatactggattcctgcctgtgcacggaaatcctcatcgatcttcttgaactcctcctcaagagaaaggctcagtccgagtcccttgatgatctcataatatcgcgccttgatcgcattgatcttctcagtgatatcctcccctttggatgctgcgtcataacatccataaagcatatccgtcactttgatatcctcgtcaaatctctttcccggagctgacggaactacataacggcggctctcatcactgcggatgatatcgcccactttctggaactgctccgcatttgcaagagaacttccaccgaattttacaacttttttcatgataacacctctcacctgtaatttcgacttccagcgccgccttttcaccattcactgcaacgctttaccacagaaacctacggctattttattgaataatttgtgattttgcaagcctttccgtaacatttctgcaaaaaaagtcaaattatacaagagaaaagtatctcctgacctgtttcttatgcacagtactgcttcagaatgttctcgagagctgcagcgctgcttgtgtgacagcggcataccggaatggattttttctttgcttcttctactgcgcagtttaccattttgtgggaaacggtactagtgaacaggatcatcagatccggcaccccgatttttttcttcatggctcctttttccttggcaaaaactttcgccttgcatccgaagcctttgcagatatcctcatactgacataccattctttcattaccgcctacaattacaacgctcataattcactctcctttgatctctgaacttttatatgactgtttcaaggttattttaaactaactttacttttaaaatattgagttagcacttgctaactcatttattataataccatctcacaaaaagtttgtcaaaggtaattttaaattctgtctgattttttatatcctgtgatctcacatactgtaagtatgccgttttttacctgaaaatgaacatccattcctgcaaaaggcattccgtatatcctctccggatctttctggtaggcaggcctcggatcctctctgagcacgccttccaacgcagtaagcttatcctccggaatccttgccttccattcttccgggatctctacctgcagaaaatgctgctccaccttcgtcgcaaagccgcccagcgcttccggatggcagtctgccacaggcagatatggcttgatatcatagatgggggttccgtccatcaggtccgcaccggatacgatcagtacaggagcttctttgctttccagattgatcttttcaagcttcacacaggataagcctacaggattgggacgaaagggcgatctggtggcaaatacgcccatcctttcatttccgcccaggcgtggcggacgtactgtaggagaccagttctcacggatcgactgtgaaaactcccacagcagccagatatgcgaaaaatcttccagtccttttaccgcttccagtacccggtattccggttcaaaaacaatacaggctgtcagttcttccactcgaccgctctgacgcgggattccgaattttgtcggaaaatcacttctgatccttgcgattatcttcatatccctattctccctttcacttgccagatatacacctcatgcgcctgttacataattctgctttcaatgactgtcatgtcatttccgtcagatcctcttgtaggcaacacagtttttttgccgcttggcctgatagagaagcctgtccgcttctaccactccatctctgaccttacagcttccatatacacctcccacgctcatggaaagccggatttctttgtattccggcacatctgccattgcgatctcttcccggatatcttccagcttctgctgaaataccttttccggaatttcttcaaacatcagaagaaattcgtctcctccataacgcagtaccacgtcatctgcccgcacatgctcaaaaatcgttctaacaatggtacaaagcgccgcatctccagctacatggccatagctgtcattgatctgtttaaaattgtccacgtcgatcatagctatagcccccatcttatccagggatttcagctgttcctcaaaatatctccggtttctggcaccagtcagcggatcttcatataattcccggttgaatctgctgatcttatcgatcagagatccgcttccataagctcccagaaagatcttatccgtcattttaaagaccatttccatgacaagaggtgtcccgtctataaccacatatttggcgattacctgataaatgtcatcattgacgaactcaaatttcgtcattctgtttttgcgggcaaaaactttggcagaaatacagttctcacatcttctgcctttattccacactgcaaagcatttatgttctgcttcataagagcaatcgtctgagccaatatttaccggagctgtacggctaacatccaccagtcttacaatgtcgaaaaccgtcttcagcatttctatttccatatttacttcccgggcagtcataaatacacccttatctttatccatagtattttcctgcgtttctgaaatattatatacatccataataacatattgcacatcaattcacaattgtatttcatcgtcgtttatgctattgtatagtgtataagaagtaatatttttatcaggaggtttcatatggcacagagacgtacaaagatagaagtactcaatgagaaaatttccaaagtagattccaagattgctgcctgcaccgaaaagatagcagcgctggaggatgaaaaaactgcactggcagctcagctggatgagatccgcaaagctgagcaaaaagcaaaggaagctaccgaactgaaacgtctgctcaagctgatgcacaaaaaagacatttccgtggaagatctggaatccatgatctccaaggaagattgagacagatcctcagcaaacaaaaaaccggtttacgaagaattttttcttccaaaccggttttttttgcgatctttctatgatacgatctgtatatttctgcaatctttatattctttggaacagctttccgtcaggatcaccgctccgtcaaatgaaaagaacgtcaccgcactgatctgtccgaatttggagctgtcagacactacgtacttttccagacactgctccatggcggttcgctttaccagtgcctcattggattccggcgtggtaaaaccttctctctgagtcatcccgttggtcccgaaaaagccttttgtaaaatgataattcttcagcatctgcatggcctgacttccgatcacagcttccgtagatcccttcagttctccgccgatcagcagcacacggactcccatctgagccagagccctggcatgggaaacaccattggtgacaaaggtcgccccggagccttccagatgctccagcatatatccggtagtcgttcccgcatccagatacacaaaatcttccggacggatcagagctgctgcataggctgcgatcttctttttttcttcaatattcagctcaactttctgggctacggtaggctcataggcattgacagtatgttccagtgccaccgcaccgccaaaaaccctggttagcttccccgccttgtaaagcgccgtgatgtctctgcggaccgtagattccgatgcatccaggatatctttcagttctgttaccgtaacactgtttttttctctgagaaggccgagtatgatctcgtatctctgctccgtcagcattccttttcctccttcaaaaaagacatcccgatcgaccggaccgggatgccttctgttcactcattctgagattacaggttctcctgcatgaatttgcttactgcctcgtatgctgcatcctcatctgcaccatcgaatgtaaaggtaacctcatgtcccttctttacgccaagtcccataagtgcaagaagctttctgcactctacagtcttgccgtccttctcgatagtgatcttggactcgaaaccttttacaagcttcacaagctctccggccggacgtgcatggattccttcgttatctgttactacatacttgaattctttcatttctttatcctccagtttttattttaatttaaaaaaatttaagcaacttttttcttcagtaccccgagaagtacagctgagatcagagttcccacaaccagtgcgaccagatacatcattgcattacctacaaccgggaatacgaagattccgccatgtggtgccatcagtgtacagttgaagaacatggagattgctccggctgctgcggaaccgacgatacaggacggaagtacatggaccgggtcagatgccgcaaaaggaatcgcaccttctgtgataaatgcaagtcccataataaagttggtcggtcctgcctcacgctcttcttttgtaaatttgtctttaaacagcagggatgcgagtgcgatggcacacggaggagtcatacctcccaccataactgctgccataatgtcatagttgcctgccgcaatagctgctgtaccaaatacatatgctgctttgttgaacgggccgcccatatcaatggtcatcataccaccaagaaccaaccctaaaattactttacttgaatttcccatgcctgtcaaggcattatttaatcctgtattgataccgcccatgatcggctctacaacgaaggtcatacagagtcccataagaaggacaccaacaaccggatagatcagtacaggcgctattttttccagtgcttccggaagcttatcacaaaccttacgaagtccaaggatcagatatcctgcaaggaaacctgcaagaagtgctccgaggaaaccggattttccgtttgccgcgatcataccgcccacaagtccaactgcaagtgccggtctgtcaccgatggccattgcaataaatccggccaggatcggaagcatgaaaccaaatgcggttccaccaatgtttttcagaacagccgctaccggtgtgatggtaccaaagtttgctctctggtctgcaggaagggaactcaaatctacacttaaaccatcgatcaggaacgcaagagcgatcaggataccaccgcctacaaccaacggaagcatgtgagatacaccgttcatcagctgcatatagatcttgtggcctgctccgctgcctgcttttgcatttgaggaagagctctgactgcctgctgctgcatgatataccggaatatctccggaaatcgcacgttcaacaagctggtccgctttgctgattccatctgaaacctgacattcgatgactttctttccatcgaaacgatccatgggaaccttggcatctgcagctacaatgatgcagtctgcctcccggatttcctgatccgtaagtacattttttgctccaccggagcctcgtgtctctattttaatgaaacagtctttcgccttcgctgctttttccagtccctctgctgccatgtaggtgtgggcaatacctgtggggcaggaggtaactgccagcagtttagctctggctccttcggaacttcctgtatctgccagtctttcatcaatatcttttttctcctcatcggccttgtcgatgatctccataaattcatctacagaacctgcgttgcgtaaggattctgtaaaattatcatccatcagcattacggaaagcttgctgagtacatccagatgaatgttatcttctgtattcggtgctgcgatcaggaaaagaagggtaaccggctcatcatccagtgcctcaaattccacgccgttttttactaccatggcagcaagtcccggtttctttaccgcatcacattttccatgaggaatagcgattccctcaccgattcctgtcgtactttcttcctctcttaaatacacctgtttccgataagcttccctgtcgctgatcttttcactttttaccataagatctacggccatgtccagagcttcagatttcgtcttcggtgcagcatccagtgatatgcttcgtttgtcaagcagatctgtgattctcatcttcccttctcctttcttctttacccctctgttacctgttcatatactgcctgaacttcttcccttgtggcaagattttcagaaaatgcacttgcgcttcctgcggaaattcccatatggaatgcatattcgtgatcctgtttttccatccagcctgccataaagcctgctaccatggaatctccggctcctacgccgtttaccagtgttcctttcggtgccggtttctcaaacacctgaccgtcttccgctaccaggacagctccctctccggccattgagatcagcacatttctggctcctttttcctggagcttctttccgtaagggatcacatcctgacgggtcttaagctctacaccgaagatttctccaagctcatggttattgggcttcaccaggaacggatgatacttcaggacattcacaagaagatctctcgttgcatccacaacgatcatcacgccttttccatccagtctcgccatgatcttctcatacatatcatccggcatagatgaaggaatacttcctgccagaaaaagcacatctccctctttcagtgtgtcaagcttcttcatcagctcctgaaccttttcagcgctgatctccggtcccattccgttgatctcagttccatcaatagatttcagcttcaggttgatccttgaaacgccttccgggatcctgataaaatcagatctcactcccatctcctcaagctttcttacaatctcatctccgacgaatcctgccatgaaaccaagtgctgtattctcgattccaagattcatcagcacggtggaaacgttgattccctttccgcccggaagcatcagctcagagcttgtccggttggtaagtccgagtttaaaatcctccacggaaacgatatagtccagagacggattaaaagtaactgtgcagatcattttttctcctcccatatcttttatcctgcggtttttgaccgctttttgttgtttttcatttgttgaactcagtatacttccaaattcattcaaagtcaatcaaattacttcacaaaattcatgaacgtttttggttgagtttgcacaaaaaacgtgcatcaaccttagctttccctggttaatgcacgtttatccctgactgcattggtcactttcattcaaattccgttataaatctatgtaccattccaaattcctgtttatattacctccatcctcaggtacatttcccggaaagccggatcttcacattccatcacctttcctgaatgtgatagtttcgcaataacatttatctgatttgtttcttattcgcagtatctctgaccatcttccgatatcttctcatcagctcccttgtcactttgtcttcctcaaaccggattcctccgatctgacgcaccggcatgattcccatcagggaattggtgacaaagcattcatcataccatttaagatcctgaacatagatataggtttcttccaccgcttccgtgtcacagagatattcacggaggattcccggaagaagtccgcagctgacttttggtgtatagatcacgccttttcgcacaaagaatacattacttactgtcccttccgatatctgtttctttgtattcagaaacaaccgttcatccattcctgctgctgtagcattacgtttttccaggatacaatctccgtaattcatggttttgtgatatacaagaggtgatgtttcatttcgttttaccttgctgacatccatgataaagcctttttcataattctccggcgtataatgattggcacgaagagaatacactgcattttcctttgtaagcataagcttcagcgcacagtgttccagtccgccaaattctttctgcacctccgggcgttttttttgttcttccagatattcttcgatcctcccggctgtgatcccacgtactgccggatcacccagcttcaggaaatctgccgcccgttccagtcttttcagatgcttttccagaagtatgggggttcccttttctattcctatggtctcaaatgctcccagaccaaactgaaaacattcgtctaaggttatgttgttcatttcctttgacctccttatgaagtgtccctgtcagattctctgatctgtccacagagcctttcacttttaccgttctgtatgtttctctactgcattgcatccaggatcgctttcgccttctgcagagtctcctcatactcaaattccagatctgactctgctgtgatcccgccgccaacgccaaggtgatattttccgtctttatgaagggctgtacggatcacaatattgaaatcgcagcttccgtccagtgtcaggtagccgatagagcctgtataaagatttcgcttgccgtgttccagctcgtcaatgatctccatggcacggtatttcggcgcaccggtaatagaaccgccggggaatgcagccttcagaagatccataacattttttccgtcttccagttttccttcaatatccgataccagatgaaaaaccgtagcgtatgcttccactgtaaaaagctcggttaccttcacgcttcccggtgtacacacccggttcagatcatttcgctccaggtctacgatcataagaagttcactcttatcttttccggaatcctgaagctcccgacggagcatttcatcttcctcagatgttacgccacgttttcttgttccctttataggacgggtatttacatgacggtctttcatcttcagaaaacgttccggagatgcacagacgatctgataatctccgaaatccagatatccgccgaaaggagacggattatttttccgaagatcataaaaaacatccagaggtggtttttcgctttcaatggtcagctgctgcgtcatattggcaatatagatatcgccctctataatatagcggatcatccggtctactgcctgtttgtattcttctttctcaaagttgggatgaacctggatcctgaatttctcacggtgagaattttccgtgaccatcttgtttccggattcctttttttcccctgtttccgatcctttctgtttccccgcctctgtaaatccccggattgctttttccatcgctccgatttctgctgcagcgtctgcactgattccatttgacacaagataggttcttttttcctgacagtcttctatgataaaacagtcataaaacgtcagaactgcctccggaacagtcacaagatccttttctccggatggtactcccatctgttttcttccgtaatcataggaaaaatatcctactgcaccggatacgatgggaagtccgctgttatttttgtcttcatgggtatttaaatattcccgcatatagtcttcaaaggttgtttctgtttccggccttccgttgatagtaaagttctctccgtcctttaccagcttcagatacggacatcttccgatcacggaataatgtcccagctcattgacaagggaggaatccagaaacgctgctccgggttctctctcgtagatccgaaaaatgtccactgccgggatatatggggtcagttcttttattcttcgctgatttttgtacatatttttactcctccttctgaaaattctccgcgatcctgcaaaaattctcaagaagctcatgtccatattccgtaagaacggcttccggatggaattgcacaccatagataggcaatgctttatgggaaattcccataacagcaccatcatcagaaagcgcatccacctgatactcctccggaatgctgtcttcccgcacgatcagggaatggtatcttgtcaccttgtatttctcaggcaggcctgcaaacactcctgttccgtggttgtggatctctgttacttttccgtgcataggacacactcccttttccactactgctcccgcacagtggccaatcacctgatggcccagacagacaccaagaacaggaatccttccctgaaatctttttacggtatctacgcagagcttcgcatcccagggacgcttcggtcccggagaaaggatgattccttccgggttcagctcttccagctcctccagggtgatctcgtcgcagcgtctgaccaggatctctcttccaagctcctgaaaatatgccttgagattataaacaaatgaatcgaaattatcgatcatcacatacatgcttttttcctccatatcaagcagatatttaagactctctttatcgtctgctcacaaaaaaagggataacgacggcatgccaaaaagacatgcacagtcgttatcccttgcggtccgtaatctgtacgttctaatataaattgtactgctgattatttctgcttcttggtttcctcataatgatggatgtctgccagtacagcgtttacatcaagtccgtgtaccatacatgcctcctcaagagactcaccgatagaagacggacagccgatgcagtgcattccttcctgcataagaatgtatgcgatcttctcatcgtatgcaagcatctcgcccattgttgtttcctttgtgatttccatgatctatattctcccttctggatctgtaatcttacccggaatcccggtttcctggttttttccgcagttataatatcattataactgtatcttccataattgcaagcctaaatttattcttttcattttctgtattatacccactcaggcagcagtttccttttttcccctgctccactttttcatcacataaatataatacgggatcagagggatcagcgctgcgatccatgcggcaggatctgccagacatacacctgcaaaacttgtttttcctgcaacaaacataacgatcgcacttcttgccgccagttcaaacacaccgcccagcatgggaaccaagccatatcccagtccctgaagtccgtttcggtagaggaagatacttccaaggaacggatatgcccagaataccgtatgaaaataagtaacagaaacattaataacatccgtctgggatttgtcaataaataaccaagtcatgtactttccgaaaaagaacataataatcatagtgatcacactccagatcaggatcatgatctgggtatatttcattcctgcttttacacggtccatctttccggcgccccggttctgtcctacataggttgccatcgtcgcaccaaaagctacaaatacagttgcaatgatattctgtatttttcccgcagcggaaaatcctgccatatatacagaaccgtaaatatttaccgcaccctgcacaataatggttccgattgctgtgatggaaaactgaagtcccatgggaataccaagggccagcagataacggaagctggtaaaagaaacttcaaagttttctttcttcagatgcaggatcgggaactttttgataatatagatcaggcagcagactgcggaaattgcctgcgcgataaccgtagcataggcacagccttccactcccatcccgatttttacaataaacagaatatccaggaacacattgatcactgccgaaatgatcagaaaatacagcggagattttgaatctccaagtgcacggagaaacgctgccagtgaattatatgccgctgttacgatcaggcctgcataaataattcccatatatcccttcacagatcccatcagatcctccggtgaattcatcaaccgcagaatcggttcattcaaagcctcaaagccaatggtcatcacaatggcaaaggctgctgccagataaatggacatagctacgtaatgacgcatcttatcatattgcttcgccccgaaccactgggataccagaatggcaaagccactgctcagtccgttaagccatccggtaacaaaaaacatcagtgaaccggtgcttccgattgcagccagcgcatctactcccaggaactgacccgcaacaatggaatccgcaatattataaaactgctgaaaaatatttc

SEQ ID NO: 230 - DNA, 30890 bp, Unknown
  gut microbiota DNA sequence
cagcaatgtgctatatcaaatggcttgttgttccctgtaaatgctctaatatactttgttcacgttcaccatcacaatgtgcaatataattcatcttcttctcttccatttacaacaccgtaccctcactacaagttatatattatactgctttagttcatctatatcaatgtatccaaagcgccatctcttatgataatctcccattctccatctcatacaccacattcatagtggagactctgtgggataccaggactacagtgcggcgggtggtgtcttctttcagggacttgaggatggtggcttcgtagagctgacctttgtctacgtatttcagggaggagagccttcccctcatatctgcccgtcaaaccgggaatgagcgtgcatctcacgaatggtcagttccagccagatcaccgtaagctgtgaggtagatggcggggtggtgatcagattctcggcttcacacctttggtgtctcgcttggcgagtttgactttgttaagtacatatggtttgtcgtggtaggtaatggcatactcctgcctgctttccaaaagatacgcatggtgaatgcggtcttcgccggtaagcttcatgcctcggacgcccatggcgtttttcttggtgacggagatatcggttttcatgatacggaggaagtaacctttctcagactggaacacaacctgatccatctcgtccgctgctcctacgaatacaaggcggtcatcctctgcaagcttggtggaaacaatggtacgcttggaagcacggaactcatctccttttaccagcttgcacatgccgttctctgtaacaaagagtaccgtggcggctgctacctgactcagcggtgccacataaaggatctgctcggaagtactatcataattacccagattatctgccggaacacctttatcacggaaacgtaccagcgggatatcctctgccttcacggtgtggagcttgccggtatctgtaaagatacagatcttgtccgtattcatgcaggtaaagacatagcggctctctgcatgagcggcatccttattacgctcgtaggcattcttgtcaatgagacgcatatatccgaaacgatccatcaggaagcagacttcggtctcttccatcttcttctcctcataaacagcttcctctgcgttttcaatggaagtcttacgcttactgccgtattccttcttgatctgatccagttcacccatgatcactgctgccatggagtcataattattcaggatatcctcataagcagcaatgttcttcatggtttcctcatgctccttcatcagagcatcgatctccagaccgatcagcttgtaaagacgcatgtccaggatagctgcggcctgtttttctgtgaatttcaaggattttgccgccttttcggatgtcttggtcttgaatttaatcccttctgtgataccgtcggtcagacatttctttacctggtcacggctcttgctgccacggaggatctcgatgatcagatcaatgacatcgcaggctttgataaggccttcctggatctcccgtttctcctgttccttggcaagaagggttgtatattttctggaatttacttcaaatacaaagtccacatggtgagcaatgatctgcttcagtcccagtgtttccggtcttccgtctgcaactgccagcatgttgacaccgaaggtatcctccagtcgggtcttcttatagagcatgttggtaaggttctccacgtctgcatcgcgcttcagttccagaacgatacggattccctccttggaagactggttggaaatatccacgatatctgtggtcttcttggtctctaccagggttgcgatatcattaaggaattttccgatgtttgcaccgatcatggtgtaaggaatctctgtgatcaccagctgctggcgaccgcccttcagcttctctatttccacccgtccacggatacggagcttacctgttccggattcatagatctttacaaggtcgtccttatttactacgataccacctgtcggaaaatccgggcccttgagataacgcatcagcccacgggtgctgatatcattattcttcatgtatgccttcacagcatccaccacttcgcccaggttatgcggcgggatgctggtagccataccaacggcgattccgtctgctccgtttacaaggaggtttggaatacgcaccggaagtactaccggctccttctctgtttcatcaaagttcggcataaagtccacaacattcttatcaaggtcttccagaaaaacctcctgggtcagcttctccagacgggcctctgtgtatcgcatggctgcggctccgtctccctcgatggaaccaaagtttccatgtccgtccaccagtgtacggcccttcttaaattcctgcgccatgactacaagcgcatcataaatggagctgtcaccgtggggatgatatttacccatggtatctcctacgatacgggcacatttacggtacgggcggtcgtagcggatgccaagctcatacatatcgtaaagggtacggcgctgtaccggcttcagtccgtcacgtacatccggcagtgctctggaaatgataacgctcatggcgtaatcgatatatgatttctgcatgatctccgcataatcggtgcggatgatattgtcctgtttcgtattcatagtttattctcccaatcaaatatccagctctgcatctgttgcatgctcatagataaaggccttacgtggcggaacatcgcttcccatcaggatctctgtcacatcggaggccatgcgggcatcttcgatctccacacgcttcatcattcttgtctcagggttcagggtagtctcccagagctgctgggcgtccatctcaccgagacctttgtatctctggagtgtgaagcttcccggtttatggctcttacggtatttctcaagagccttgtcatcgtagagatattcctcctgcccctttttcggcattaccttataaagaggtggcatggcaatatacacatgtccctcatagataagctccggcataaaacggtaaaacaaggtcagaagcagagtagagatatgagcaccatccacatccgcatcggccatgatcacgatcttgtcataacgaagcttcgtgatatcaaaatcatttccgtagccttcggaaaagccgcagccaaaggcattgatcatagtcttgatctctgcgttggccagcaccttgtcgatggtagccttctctacgttgaggatcttaccgcgaatcggaaggatcgcctgatagttacggtctctggctgtcttggccgaaccgccggcggaatctccctctacgataaagatctcacacagtgacggatccttcttctcacagttggccagcttgccgttggaatcaaaagagtatttctgtttggtgagaaggtttgtcttggcacgctcctcggtcttacggatcttggccgccttttctgcacaggaaaggacgatcttcagtgtttccagatttcgatcaaaaaacagtaccagctgttctcctgctaccttgccagtggctctggatgcgtcctggttatccagcttggtcttggtctgtccctcaaagcggggtgccggatgcttgatggagactacagcggtcattccgtttcggatatctgcacctgtaaaattggggtctttatccttcagtacaccgatctcacgtgcgtaggtgttcattaccgttgtgaaggtagtcttaaatccggtcagatgagttcctccctctgcattgtagatattattgcagaatccgagaacgttctcacggaactcattggtaaactgaaaagcaacttccacctggatcccgtctgcctctcctttaaaataaaccggatcatggagaggctgtgcattcttgttaaggtcacggataaagcctacgatcccctccggctcatgatactcgatatcctcaggagtgtcccctcttcgatcctcaaaatggatggtaagctccggattcagataggcagtctcatggagacggctctttacatccgctgctccgaatcttgttttctcaaaaatctccggatccggaaggaaattcacacaggttccggtacctctggtcttccctaatttggggagcaatcctgcttccagttcaatggtagggattcctctctcatagtggtcatgatgtatatagccatcacggctgatcttaatatccagatacgtagataatgcgttcactacggaagaacctacaccatgaagtccgccgcttgtcttatatgcggaattgtcaaacttaccacctgcatgaagggttgtaaaaacaagacgctccgcagatattcccttggcatgcatatccaccgggattcctcgtccattatcctctactgtacaggaaccgtccttctcaagaactacatggatacggctgcagtaccctgcaaggtgctcatccaccgcattgtctacgatttcatatatcagatggttcagtccctttctggatacgcttccgatgtacataccggggcgctttcgcacagcctcgaggccctccaggacagagatactgcccgcatcataagtgtctttttttgccattccactgattcctttctttttatattcgaacatttgtttgtattatactcaaaatatatgtacttgtaaagtccacatgatcatcttttttctgcaatttttccaaaagatacgcgtggcagttcaaggaaccggtcttccgaaaaatcgctttcttcagccgccacagcctatctattctatcaaaagtaactgtaaacttcaagcaatttgtgtctgcctgaatacaacaggcggaaaaccctgcttttaatgaaagcatgttttccgcctgtttctgatcatttcaggaaattttttccagaagcttctcctcgcacaggggcctggaaaaataatatccctgtatcatatccacaccccatttttccagaagctttacctccttttcggtctcagcgccttctgcgatcaccttatatcccatatgctgcaggatcatgacaatgctgcgataaaaggtagccgtctgaggatcactgctgaccccggacaaaagagaacggtccatttttactgctgaaaacgggatgcgaagaactgcattcagatttgcataaccggaaccgaaatcatccaggcacatgtggatccccacttctgcaaaatcatcaatggctgtgcagaagctttcgctgtattcggttgccacgttttccgtgatctcaaactgaaaatatcccggatccaatccatacccctgtatgatcccgataagcacatggctgtatccggttttcatcaattcagaaggagaaagattgaatttcacattctggatcttcttcatgatatattcatgttcttttataaaacggcagaccttgtgaagctgaagacatcccaccgcagagatcattccctgtttttccgcgatcccgataaacacatccggcgggatcattcccagaacaggatgtttcagccggctcagtgcctccagagtaataaaatcctggttttttatagaatataccggctgataatatacttcaaacagatcctctttcacagccttctgaagaaaatgctccacttcctgctcatagcggaagccctccaggatcttgctgtccgactggatcaggaccgtatcctgacggttctgtatcagagagatcatatattcaatataagaaagaatactatcctctttttccagtttttccgcattcatgatcccacagatcgcagcatggaacgacaccttttcgttttcgataaaaaacggctttttcagaaattcttctatgccttctctggctttttcataatctgtcagcgagtccagcactgccagaaagcaattgcctgtgatacgaaagatctgcactgaatccgtgatctcccggaaccccttcgccgcccggatcagcagctgatctcccactctggtcccgtagatcctgttgatctgctttatattgcaggcatccacagcaagcagatgaaagctttcttttcgatagagcttttctccgatccatttgtcaaaatactgtttgtcaaataaacctgtcatactgtccgtatattcacccggattgttcatggtaagatagatcagccaaagtcctacagaaagtccgaaaccggtaagcagtattctttccgtggcaatctgaagaaacaggcaggctgcttcgataaaccaaaatctccatatggtgcgccgtgtttctttttttgctgtttttccataacggaacataaatgcaacgatcaccagcataaaaaagaatacatatccatagatcagaaaatgaaaacttccccggataaatctaccttcctggttaaaataaaaaagccatcccgtccgtaagtttgctgtaactgccagcagcattgcagccggcaggaccacccagcaggttttcagccatttatatttctccttttgtcttccggtgacgatccgaatgtagcagaaaagcccgtaagtaagtatgacatcacagaaataatagagagtcaggaccagcgctgaacctctgcagccttcactgctgccgcctcctgcgattaccgcactcagcatatccaacaccacgtaaacgccgctgaaaaccagaaaacatacaaaattcctgttttccgcattgttcagtcttttatgagaaaaataatgtattgcgatcatcgtcaccagaacaagggatgtaatctgaaaacagttaatatactccatttttcaaatcccccttctttttgttctcataaagcttcctgtctgcctcatatttccattctcccatggatttcagagagccatccttatttcgcagatggctgcctcccagggacaacgaaaaacgatgcctgcatcctctcccgatattccggagctcttctttcaggcgttccagccagaattcgtccggtacttccggatcatagaccagaaccgcaaattcatccccgccgatgcggtagcaggttcctttttcccggaaaacgttctccacacatctggcagagttcaccaccatctcgtctcctgcagcccgtccgtactcttcgttgatcacgcgaagctgatcgatatcgatatacataagaaggatatcccggtatctgcccatatctgcggaaatactttccaattttttctcaaaattaactctcgtctcaagtcctgtcagcccatcctctctggacagtcgttcgtaagcctgggattccagacggtaacgaacgttatctgtcatcagcatgactgcgtctgcaatgacaagcacaagaaacacaagatttcccagttcaaaaatagatccatagtaggaaatctcgaacagccagtacaggatcagtgctataataccgcttgctcccacgacgatatatgcaatgagaagcagacgtatctcacgctgtttatgcttccggtactcccggatcagaagtaccgctgatatcaggacccacacaaccagcagaatatgcgtcacaaacagcatatccttaaattcaaaggctcccaggatcaccaggactccctgtaaagcagcattcagataaaatgtaaagattccaagatccaggatcctgtattttttcatgtttccgatgttctgcaaaaaacgcagcatcggaattgccagcagcatgaacatataaaaagaaatgagacataatgcttcggggcatctgctgtagctctgtgccagtgatgagtccgtcaccagccagatactgcacatcataaggaacagtgccacatcccggaaccgactgtccggcatctgccttattctcatatagatgcagatacacagagcgatcatacttaatacgatcatgatcgttgccgcccctaaaggaatggctgcttttctgatctgataccaggctattgcacttccggttcctatgcataccggttctataacatattttcctctctgaggcgcagaatagctaaacgtcaggacttttccctctgtgtcattacccagagcggcaatgcactgcaccttggaacgcatctgcacatttttggaaaacatggcctccttatattcatacaggatctttccattcaggcgtatcaccagatcatactgggctcctgtagaaaccacggtcattcctctgctttccgctcccagactttcattgtacaggatcagcttttcgcctgtttttgccggaatttccgcaggcagggtgatctcctgtttttttccgtcttttatgtagtaccaacctttgttaagaaactgtacactgtcctgatgttggatcagcccccctgcgtgggtcgctgcaaagatcgcgccaaaaaccagcagcaccacaccaaaaagaacggcttctaccttccatatcaaatttttcttttttctgtcattcatactcttcctctttatattttttattccatttcgttttgtacctatcatatcatcaatagatttttccgtcaaaaaaaatgtcaaaaaacaggatgaaaatttttttcaaaaaaacaaaaaaagtgcttgcattttgcaagaaagtattatatactaacgaagtcggttgcggaaaacaacagaaagctaacgcaaacgacacaaatgaatatggccagttggtcaaggggttaagacgccgccctctcacggcggaaacacgggttcgattcccgtactggctattagttgaaagcagttaggatttttattctggctgctttttttgtgattgttatacttcactttttcctgttatcgctttcaagctttgttctgaacattgcatataaaaatttcgatcttcctgtttatctgttttctgtattttcacatatattatttttgcatttctttctcttctgttttataatttcccctgaaaatacttaagataaggggtgacttctcatgcatcacaaacgttcttttcgcagaaaggtgcaggcgttttttctttctctgctgcttgttctgctgacagtcgcaggagttccctctgctgcttacacagctgaggcggcttctgctgacacaacaatggctgtacactttctggatgtggggcaggggctttcgatcctggtccagtcacaggggcagaatctcctgtatgacggcggtgaccgggaacattccagtttcgtggtttcctatctgcagaagcagaatatttccatcatcgactatatgatctcctcccattatgacgaggaccatgtggctggtcttgtaggatgcctggacagcttttccgtaaaaaatgtgatcggtgcagattatgtacaggatacaaatatctatcagtcttttgaaaacagtgttgccgctcagggattaactgtgcagcatccagagcccggaacggattttgccttcggaggcgggaaatttacagttctttctcctcaatcgatcagcagcaacgataacgacaattctgttgcgatccggctggaaaacggaaataaccattttctttttaccggggatgcagaatctgccggggaggaagcgatctgcaatctggggcttgatctttcctgcgatgtgatcgttccgggacatcacggttctgccactgccaccacctgggatctgctccagcagactgttccggaatatgcagtgatcagctgcggcgccggtaattcctacggacatcctcataaggataccatggataagcttgctgatatgggaatacaggtatttcgtactgatgagcagggtacagtgatcgcagtcagcgacggaagcaatatccagtggaaccagagtccctgtaatgattattctgccggagatgaatcggataccggcacacagccttcctccgcttataaggattccggtgcgtccggctatggatcttctgcttcggctgctgcagatcctcagaccggagtgcaggctgatccggagccagtgggtgatatggtctggatctccgctaccgggagcaagtaccaccggatccctaactgtggaaatatgaatccggataatgccacagagatgacacgctcccaggctgaagctgcagggtatgaagcctgcaagaagtgttattagaaacgtccgcaggcgcgctgacgcaggacagcctatcataaatcgatatgacaggctgtccttttcttttactattttataatatcctccgccggttcagccggtacgaaaactctcttcttttcttttttctccttttttgctgcctttgcccgctcggtagcctccctgcagaattccatctgggaatttatcagcgttttgccacgtttgtcctgcttctcatacaaaccggagggctgcaggatatgtgcttttacattgtcacggaattccagatccagcacatgcatgatctcttccttgatccgctcatcttccacaggaaaaacaatctccacacgacggtcaaggttacgtggcatccagtccgcacttcccatatagatttcgtcggaaccgccattgcggaaatagaaaatacggctgtgctccaggaaattaccgacgatcgaacgcacgtggatattttcgctgatacccggaatgcccaccttcaggcagcagatgccgcggatcagaagatcgatcctgacaccacaggaagaagcataatacagcgctgcaatgatctcagggtcacacagagaattcatctttgccgcaatgtgagcctcttctccctttttcgcatgctccgcttctctttcgatcatttttacaaaacggtccttcatccagatcggtgcaacgatcaggcgattccagcgcttcggctcggaatatccggaaagcatgttgaacacagcagttgcatcctctccaaaccgttcgtcacaggtaaatataccacagtctgtataaagcttggctgtggaatcgttatagtttccggttgccagatgcacatatctgcggatcccgttttcttctcttctcacaacaagagtgatcttactgtgtgttttcaggcccaccagaccatagattacatgacagcctgccttttccagcatttttgcccagacgatattgttttcctcatcaaaacgcgctttcagctctacaagaacagaaacctgcttgccgttttctgcggcttgagcaagtgccgcaatgatgggtgaattgccgctgacgcgatacagggtctgcttgattgccagtacatccgggtcctttgccgcctgacgcacgaaattcaccaccggatcaaagctcatatacggatgatgcaggaacacatcaccctccctgatcacctgaaaaatatctttatcattctgaaatgcaggcactgctgccggtttgtatttcggttccttgaactgatcgtatccgtcaataccataaaccttcatcagcatggtcagatccagaggtccgttgataaaaaagatatcatctccatgaacctgaaactccattttcagaatatccagaagccgcggatccatcttatcttccacttccaggcggatcacctctccccattggcgctttttcagctgtttctggatctcaaccagaagatcctctgcctcatcctcgtcaataggaagatccgcattacgcatgatcctgtacggatgggcacagatcacatcatagcttaaaaacaacttgtcgatgttacgctcaatgatctgttccagaagtgttacggttgtatggccttttttctcagatggaatgatcactactctcggaagtacagaaggcacctgtacagtggcaaaatcaatctcttcttttccttttttagtatcttttttggaaagaagtgctccaatatttaacgttttattacggatcagaggaaacggtctggaagaatccattgccattggtgtcaggaccggatatacattatcttcaaaatactgatccacaaattctttctgcttctcggaaaatgcctcgtgctcaaagatcacatgaagtcctgctttttcaagtgcagggaccagagaccggtttaatgtactgtactgtacgtgaacaagatcatgggtctgccggctgatggctttcagctgttccttggctgtcattcctgcaatatctgtttttttgtaccctgcatgaacctgatccttcagggatgcaacacggaccatataaaattcatccagattggatgaggtgatactcaaaaatttcagtctctcaaacagaggtagatttttgtctctggcttcactgagcacacgatcatcaaatttgatccagctcagctctctgtttacaaaatattccggtttgtcaaattccttaaatttcatacaaaaacctcctccgttatcttcttcccttccgtctcattacaagccggattccaaacacctcttcaaaaaattcttttttatctttcagaagccccagttccagagaaacatcccttgcggaatccaccaccaggtaaagaatcctgtcttttaaggttacattaagcgcttttaccttctggtaatggcttctgtccatagcattggccaggcggagaatcgcggtcagcttcgcagtcaggagataatttcccctgttcatggatgtttcacggttgatttcttcgtagcagccgaattctctggtattataccttaccgcacttgcgatcacctgccgctcctctgtggaaagacctatgatttccgtagccatgatgatccggtaagagcattctgccacctcactcatactgatatattttccgcagtcatgaagaagaactgcaatctgcaaaagaagccgttcacgttttcccatgccgtggatcttccttgtactgtcaaaaatatccagtgccacatcggtagttcctacaatgtggttctttccactggaataccttttggcaatgttcctggatgccaccaggatatcattttcaaaattgtgtacacttttcagatatttgtttttttccgcatagtcataggcaatcccgtccagaagagaaacacccgggatccagagtgcttctgcctgaaagatttctataaagtttcggatgataaccatgttcggcacgatcagagacgcatattccggttccaactccatggattcggcaaggtcatgatcggacatgtttacaatggtctcgtatttcttcaggaattcctcctttgtgatgatattctctccggatctgtcctgaaagatcgtatctgtgagaaaatctcccatcaggatcagattggagatttccttgtccttaagataaagacgttgaaagcttatcagatcatttcggataaattcctctatcagccggtcataatgtggagttgttttctccagttctttcagacgttcgcggatacgaagacttcccatacggatactctgggtcagcaccagagcatctttatcaaagagagagatctgcagatttcctcctccgatatccaggatcgccgtccccttctgaatagcctttttgaagccggattcaatggcagcaatggatttatatcccagaaaatgctgttccgcattactcaggatctccacccggataccagttctctgatagatctgctccaggatgatcaccggattttccagctcacggagagagcttgttgcacacgcacgccagctttctaccccaaattcagccatcatgcgtttaaaatcattaagggtctcgcagagctcatccacagtctccatctctagccgtcctgcagcataagttccacggcccagctccagctggtaacggacatcattgatctcccggaagccgatccgctttgacatttcaaagatcttcatactgacttcataggagcctatatcaattgctgcaaaggttgtcaccgccatagtttttcatcctttcccccaatacacaggtaaactatttctttttttcttcctctgttcccacaatgtaatcaataaactgctgcgctgcacgtccggtcagtccgccgtgagagatctcccactggttggctttcagaagaagctcctcctccggcatggtaactccataacgggctgccagtgtgcggacgatctcctggaactgttttttgtccggtttgccaaagtagatacggacaccaaaacgatataccagggaaagcttctcctgcacggtatcggaggaatgcagatcattgtcatctgcgatctccagcttgtctgtggcacgctcacggacaagattacgccggttacttgtggcatagatcaggacattgtccggttttttctcaagaccgccctcgatcactgctttcaggtatttatattcaatctcaaattcctcaaaggaaagatcatccatataaatgataaaacgatagttacggtttttgatctgggcgatgacttcattaagatcctggaactgatgcttataggcctcaatgatacgaagtccctgatcataatactggttcaggattcccttgatactggaagatttaccggttcccgcatcaccaaagagcagacagttgttcgcctttctcccctgtacaaatgcctctgtattatcaatgagctttttcttggcgatctcatatcctaccagatcatcgatcttcacatgtgcgatccttgtgataggctggatctccacctttccctcctcatcgtggccgatacggaatgccttatggagaccaagcttgccaacaccgaaatctttatagaaggataccatatcatccataaattcttcggttgtggtggctgctgccagggttttgctcatctgacagatacggtcacggatcctggtattaaagagcttgctgttctcatccggtgtctggtaatcacagatcaccctgcagcatacagttccgaacactttatcaaagaccgtgatgtcaaaatcatacaattccttgaaaatctggaaatcattttttgccaggtcgttaatgctgcccttgatcgctcctcgtatctcgcttgccatactgaaagcgttctcatgatttaccagaaggaaggtaagatatgtatgccagatatttccggaaaaaccgtacattcctgccagctccaccagcccgttgacacttttgaaaaactggtcttctcttgccttgagtgcttcttcatctgcttcataaagattaataagttctgtcatatcgtccagtatctcaccgtttgtaaatccacggtaaaggacacattcctgaattcttgccaacataataatttaactcctctgtatcttaataatttccaagaacacggagaacattcgcctctgcctcgattcctcttaacgcattctccacagcgctttcgccaagtttccctgtgaaatccacgaaaaaacggtattcccaggattttcccggaatcggacgggattcaattttggtcatgttcagtccgttgtagataatatgggaaagcatgttgtaaagagttccgctttcatgaggcagctcaaaacagatgctgatcttcccggccttttcctcgtattccggtttcctgcttacaataataaaacgtgtagagtttgctttttctctgcagatattttctgcaaggaccttcagaccgaatacctcaccagcctcacggcttgcgatagctgccacgcctttgtcccccacctcactgacctttttggccgcgcctgcggtgttttccacttccttctttttccaggaagggttttcctccagaaatgccttgcactgggcaagcccctgaggatgagagcagacttccctgatatcccctatctgtgcatccggcatgcccagaagcacatgatccacacggatgatctgctcgcctacgatatacagcttgtactccataagaaggtcatagatatcagccacgatacctgcagtagaattctcaataggaagtaccgcataatcggccttgccatgggttacatcctccatagctgtcctccatgtttttacatggtagctttcgatatttttcccaaagtactgccgcatagccgcatagctgtaggctccctctacaccctggaacacaaccgttgcgttttcaaggggaacatgcttcacagttgtgaaattgcgctctccgtaaatcccatgctctgtcaacagctggtactgtctcttacggctgatggccatgatctgacggaaaagctcctgcacaccgaggctgttaaagtccccgtgggccttgtttttcagcgtatggatcttctggctctcacgtgccggatccagcacctgcttaccggtttttattttatattcagcgacttcctcactcaccttcattcgtttttcaaagagacgtacgatctcactgtcgatctcatcgatctcgtctctgtatctttccaaatccgtcattggtttcctccgttatgtttcctgataatttctgtaagatcccccaggaacgccagggaaccaaaagcaatgatcacatcctcttttcctgccagctgataggcctctgccactgcggcttcgatgctgtcaaagggccttacatcagaatgaaattcccgcaccgcatctgccagctcctgcggggtcagagccctggggttatccggtgccgcaatcgtcaggatggtatctgcgtatttttctgttttctggatgaccttgcggtaatccttgtcacggaacattcccatgatgtagatgatccttttccccttaaaataccgttcaatggatgcagccagcatgtctgccgctgcagggttatgagctccatcaaccacaaaatccggttctgtcccgagaagtgcaaatcttcccggccaggtggtacgtttcaatccatcctgtctctggaccagtgttgtgggatatccctgttcattcaggatttccagtgctcggagcgctgccaccgcattttccttctgataggcacctgccagggatattgtatatttttctcctttataaagaaaggtctggccggttatggatgcttctagtacctctgcgctgtcctggtctgctgcctcgtatggcacattctgttcttcgcatattcttcgtatgaccgcctctgcctccggctgctgctttacagttaccatatgactgttcggtttaatgatgccggcctttttttctgctatctcgcccagggtatttccaagaaatgccgtatgatccatactaatggataccagaatggaaagaactgtagtacttataatgttggtggcatccagatcaccgcccataccaacttccattaataccaaatcgcatttctcatcccgaaaataaagaaatgcggctgcagtttcaatttcaaatactgacggatgcggttttccctcttttacgatctcatcgatcacctccgcgatccttgtcacatatgctgcaaatttctctctgctgacaggttctccgttaacctccatcctctctctgtaggaatagaccgccggggaaatatatcttccgacccggtaacctgcacctgataaagcggaatacagatatgcgatcacagaaccctttccgttagttcccgctacatgaacatacttcagttcatcctggggatctccaagccgcctcatcagttctctcatattttccagtcccagaacaattccctttttcaattccgcagctctgatgtaggcacgactttcttcataattcatcgtctgttttctccttccgcatgtgttgatgatccattactgctttttcactttgcagtaataattttgttcattataacccacgtgtatatttttttcaaggcagggaaggctattaaagacgcttttccacgttaaatatatttaaagtccaggcggatattcgcagccccgcagaggactttcataattcagttaaactgacatttttccggaaagcgcaggatttctgctgatgagaaggagctttaaaatgcaaaagaaggatttttttctgtgcggttttacaggctggtgtctggagatcttatggacaggactgcactctcttgtcaccggacattttactatgatgggcaaaacctctcttctgatgttccctgtttacggacttgcagcactgatccgtccggcttactacaagcttgcccgctttccggttatggtacgggggatcatttacagctgcgggatttttttcgtggaatttttaagcggatctttttttcagaagcttcacatctgtccctgggattattctcatgttccgcttcagtataaaggagtgatccggctggactatgctcctctgtggttttttaccggtctctttttcgaatggcttcttcgacaaaatcctcggaaagtctcttgaaaatctcacagttatattatatgataactggaaggaatcttatttccagtaaataattggaggtacaacatgagacatttaatgagtccattggatttctcggttgaagagcttgataagcttctgaatctcgccgacgacatcgggaaaaatccaaaaaagtatgcgcatacctgtgatgataaaaggcttgcgacattgttttacgaaccaagtacacgtacacgtttaagtttcgaagcagccatgatgaatcttggaggaaaggttctcggtttttcttctgctgattccagctccgcatccaaaggcgaaagcgttgctgatacgattcgcgttgtttcctgttatgcagatatctgtgctatgcgtcatccgaaagagggtgctccgcttgtagcttctatgtcatccaatattccggtgatcaatgccggtgatggcggacaccagcatcctacccagacattaaccgatcttttaactatccgctccctgaagggcagacttgacaatattaccatcggcctctgcggtgacctgaaattcggccgtaccgttcactctctgatcgaggctctggtccgttatgaaaatgtgaaatttgttctgatctctccggaggagcttcgtattccaagctatatccgtgaggatgttctgaaacgcaacaatgtcgagtttgtcgaggaggaacgtctggaggatgcacttccggatctagatatcctgtacatgacccgtgttcagaaggaacgtttcttcaacgaagaggattatgtccgcatgaaagatttctatgttctggacaaacagaaaatggagcttgcaccgaaggatatgtatgtcctccacccactcccacgtgttaacgagatttctgttgaagtggattctgatccacgtgccgcttatttcaaacaggtccagtatggtgtgtatgtccgtatggccctgattcttacattactggaggtggaactgccatgttaaacgtaggtgctcttcgtgagggttatgttctggatcatatcaaagccggcaaggcaatgacgatctatcatgacctgaagctggataagctggactgtacggttgctatcatcaaaaatgcccgcagccagaaaatgggaaaaaaggatatcatcaaggttgaatgccccatcgaggatctggatctggatatccttggttttatcgatcataatattaccgtaaatatcatcaaggacgaaaagatcgttgcaaagaaagagctgaagctgccgaagcaggttgtgaacgtgatcaaatgcaagaatcctcgctgcattacttccatcgagcagggactggatcagatttttgttcttgcagatgaagagaatgaggtttaccggtgtaagtattgcgaggagaaatatagaggtaaacggaataaatagggattcaaggattcctgcgagaattattgacaaacggacgcgtccggctcctgcgaaggcctgaatatcgaagcgggaaccgggcgctgtgttttcatagaaaagttttttacaaaaaagcaactgatattttacagaacatatctgcaaaatacagttgcttttattatgtgcttattatcatacacagtcagaccgataagccgggttatgtcgttgggtgatcatctatctaggccttccgttgccagaaggctccagcgacctacctgaaagcacgacgggccgccgtatggctttcttctcggtcttgcttcgaatggagtttacatgtgcccgctctgttaccacagcggcggtagtctcttacactgcctttccacccttaccccgcaaaacggggcggtttatttctgttgcactggtctgggagttacctccaccggacgttatccggcatcctgccctgtgaagcccggactttcctcgtctggaccctttcgtctgtccagccgcgatcacctggcctggctgcgcacctgctattttaacacaggtgtatagacttgtaaagttagaattttcttggtctcctatgtcttttacatggaaatccatccaaatgcatttgccacagaactgaaaagaatgattgccgcaaagattgggcaaagatactggatcataaaattaaagattctttttctgcggaaagtaccaccttcctgcagtacttcctcttcaatcttctttgtaccaactactctggatatcagaagacaggtagcaatcgctgcgattggcatcatgacagagttcgtcaggaaatcaaagaaatcaaggaactgcattccaatgatcttaacacacgccagaggaccatagccaagagaagaaagacttccgagaacaaccatgataactccgacaaatactgtcgccttcttgcgtccccatttcagttcatcctgaaaagtagatactgcactctcagtcagtgcaatagaactggtcaaggctgcacagagaaccagtacaaaaaacaggattccaaccagagttccaaatcccatgcttgcgaataccttcggaatcgtaataaacatcagtgccggtcctgcctgtaacgtatccggttctccaccggagaatgcaaacactgccggaatgatcattaaacctgccatcattgcgatcgctgtgtcaaaaatttctacattttgtgtagaaccttcaatagatacatcttttttcatataagaaccaaaagttaccagaatacccattgcgatcgacagagaataaaacatctgtcccattgccgcaaccactgtcatccaggagaagtttttgatatttggtatcagaaaatatttcacgccttccagtgctcctggtcttgtcaccgaataaacgacaatgactatagacaaaaataccagtatcggcatcattaatttggaaactcgttccacgccattctgtacacctgcataaatgatcaccagcgtaagcagtgtaaaaaacaggaaacaggtttctgtagaaaatccatccgctataaaagcagaaaaatatccgtcttcggcaagagtctgactgcttccctttacatactccaccaggtacttaattacccagccaccgatcacagaataatacggcacgatcagaaccggtatgatcgcattgatccaaccgccaaaagacagccactttgatttaccaaaagttccaaacgcacctaccggacttttctttgtcatacgtcccagagctgtctctgccacgatcatagaatatccgaaggtcaatgccagaatgatatagatcagtaaaaaaattccaccgccgtactttgccgccagataagggaatctccatatattcccaagccctaccgaagcaccggctgcagacagcacaaatccgatcttcccggaaaatgtacttctctcatgtttatgtttctccataattcttcctttcccgtcacatttttcatattctttctttatgtcttctcaatttccgcccatatgatgataccacgcttttatctctcaggcaaacaatatataaaaaaatacagagcttatattttcctgccaggcgtccgctcgtcaattcaagccctaccggagcaccaacgtccactcctgccgatccacaacctcaccgatcaccccagcctgcaaaccagccgcatccagccgcttcatgatctccggcacatccctctccggaaccgccgccagcaatcccccagaagtctgcggatcaaacaccaaatcctcccgccagagctctgccacacttttcactccggttttctcagcaaactcccggttcctgtaagccccacccggaatcaatcccatagaagcaaactcctccacatccggaagcaccggcaacttctccgtatcgatcacaaccgtccggtcactggccacagccatctccgtagcatgtcccccaagaccaaaccccgtcacatccgtacaggcatgaacctcaaactctttaaaaacctcacaggcgtcccggttcagtttcttcatggaagccaaaaccgccttacgcgcaccttccgtcaccagatccgccttgatcgccgtgttcacgatccccgcacccagcgccttcgtcaggatcagcttatctccggtctgcgctccaaaattcttccagaacttcctcggatctacaaaacccgtcacactgagcccatactttggtgtatcatcctggatcgtatggccaccggcaagaaccgcaccagcctccatcaccttatctgcaccaccacgcaggatctccccgagaatctccacatccatatccttcggaaacgccacaatattcaaagctgtcttcggagttccacccatagcatacacatcactcaatgcattggccgccgcgatctgcccgaaatcataaggatcatctgccaccggagtaaaaaaatccagtgtctggatcagcgccagatcatcactcacccggtaaacggccgcatcatccgaagtgtccgttccaaccagaagatccggatcacagaactttggcagcccgccaagaactcccgccagagtccccggtcctaccttagctgcacagccacagtttggagccagttttgtcagttgtactttttctttcatgatcattttccctttcctttaaaccctgtaaatcccctcatccatccgcagtaccacagaggactttaacttttccgattcaccctcaaaagactccacacaccacagatcccatgcacagagaaatcctgatcttctcatctttgcaccaaccgatatctgcactgcatagagccttatatctatacatagctttttttatttatacaattaatttatacattaaaacaactaccgccaataaactccctcagaagcgaattaaacggaacaccttcactgggcaccggcacaaaataatccaggaacttcaaaagccgcttcgcctcctgatactcaggttcactcttatcaattccaaaaagcagcggttccgcataaaccttcaggcaggcaagctcatacacaagagcagaattaaacatcacatctgcttcctcctggaacggaaaaatattctgctcctcgcctctccgtacagaaggccaccttgcaatggtatcctttgcggaagttccacgtgtacgtgcatcacggacaatccggcggatcagccttccatccgttgtggggatccggttatgttcatcaatgttcagctgtgtcaacgcactgatatagatcttaaacttactctcttttggaagggcataactcagcttgtcattaagcccgtgaatgccttcgatgaccaggatatcatcttttccaagctgaagctggtctccccggtattccctgcatccggtcttgaaattaaatgtaggaagatccacggtttttcccgaaagaagattcagcatatcttcattaaactgcttcgtgtcaatggcttccagacactcataattcttttctccgaattcatccaacggcgtatgttcacgatccacaaaatagttatccacagcaatgggatgcggcttcagaccatgagcagaaagctgaatcgataatctgtgagaaaaactggtctttccggaagaagacggacctgcgatcattacgaactttacattgccccttctccagatctcctcggcaatcgaagaaatcttggcctcatggagtgcctcctggatcagcatcaggctctgcacaccttctcttgtgatccggtcattgagatctcccacagtggcaacatccagcttatcgccccactcttccgattccttctgcacacgaaagatcttatcctggggttcaaaaggctccagcacatccgggttcttctgcctcggaaggatcagcacaaagccttcatcataaagctgcagatcaaaatacttcacatagccggtatccggtgccataaatccgtaaaaataatcctcgaaattttccaggctgtaaatattcactctggaaacccgccgataacggaacagcttttctttatcatacatatgatgcctgtggaacatggaaacggcatcatccgtgctgacactgcgtttgcagattggaagcttttggtctaccagttcccgcatccgcaccttcacccggtcaagaagctcctgatccagggtagcactgcctttcatggtaaaataaagagcatttccaatagaataatggatcacaacatgatccacattctcttttccggctacatcaaaaattgccttcaaaagaataaagatcgcacttctccgataggtttttcgaccggcactgtcctttgcggttataaatcccagtgtacagtcatgctgaagcttcttgtgaagctcacggagctttccgttctcagtcacaaggatcaccggatactctgttttgccctcataatcccttatgatctcagaatacggtgtcattttggggtattcccttgtttctccgtttatggtcactttaatcattgtctgttccataacgatcccctccacaggcttatatatttatacagctgcccgatttttcggacagccatgtgtttcacaattcatttttccgaaacggataatcgtattccgtcccactacatattcatgaatacaagcacttttttgcaatccgcttttacaaaacaatatatggatttttcacactggcgcaggttgtcttaagcgcagggaatgccgcattcagctccttctccatagcttccgcaaaaatatactccgtaccgtaatgtccggcatctacaatcgccagaccatctgccatagtatcaatggcagtatgataatcaatatctccggtcacatatacatccgcaccggcggccattacatcaccgatcatactctttccgcttcctgtacaaatcgctacagtctcgatcttccgatccagatcaccgtaaacccgcacatccggaagatgattgcattcttttacatattttccaaactcaccaagagtcataacatggggaagctttcctactcttccgaacccctccggctgctccccggatccatcggtaactgtaagcacccttgtatcctgaagcttcagatgatctgcgcttaaatctgccattccgatcacatcataattggtatgcatggcaaaatacgggatatcctcctttatcagacggaggatctttcttccggtaaaggtatgattgttgatctttttgattccggaaaagatcattgggtgatgggtaaggatcatatccgcaccagcagccaccgcctcatccaacaccggttccgtaagatccagcgcaagaaatacatgggaaatctctttctggtcatctcccaccagcagtcccacattatcccagtcctccgcaaatttttgtggatggtgctcattcagccattcgatcagttcatatgctttcatatcgtttcagagctgtatggatcagctccatttcctcctttacttcttccagacgagtttttgcggaaacagactctgccccggaaagaccggcaagtattttcttacggatcatttcctcccgtagaagatactctttaaggaccgggtgacattttttcagaaggagaggtccaaaccaggcctcttcctctgtgtaaacagtcttttctcccgaattgttacgtaccgctttcatcataggataaaattttccgtcttcttttatcatttcttcccttacgatctcccagccgatctcagaaagaaaatgccggaaatgaggaaggtccgactgaggctgcaggatcagttcctgaaacccctcccggaccttcgctccatcctttaatatcctttccatcagaggaccacccattcccgcgatcaccagggtatcaccttctcccggctcaagcttcgcaagcccgtcgctcaaacgagtctctatgtaatcttcaaggccataacgggtaatattctccctggctcttgaaagcggtcccggacgtacatccatggcaatggctgacggaactgttttttcactgacaagccagatcgacagatagccatggtcacatcctacgtctgccagccggtttccttttgttaccataccggcaatggcacgaagacgcatggaaagctgtacggatatatttttatcagtcaagataatccttcagcttgcggctgcggctgggatgacgcagcttgcgcagagcttttgcctcgatctgacggatacgctctcttgtgacattgaactctttaccaacttcctccagagttctggcacgtccgtcgtccagtccgaaacggaggcggagaaccttctgttcacggtcagtaagcgtacttaagacttctaccagctgctccttcagaagtgtaaatgcagctgcatctgcaggtaccggaacattatcatcctgaatgaaatcgccaagatgactgtcttcctcctcaccgataggagtttccagagataccggctcctgggagatcttaaggatctcacgtacacggtctaccggcatgtccatctcctcagcgatttcctccggcgtaggttcacgtccaagctcctggagcagctgacgggaaacacggatcagcttgttgatggtctcaaccatatgcacagggatacggatggtacgtgcctgatctgcaatggctcttgtgatagcctgacggatccaccaggttgcataggtactgaacttgtagccttttctgtaatcaaatttttcaacagctttgataaggccaagatttccctcctggatcaggtcgaggaacagcattccacgtccaacataacgctttgcaatgctgacaacaagacggagattggcctctgccagacgtttcttggcagcttcatcccccttttccattctcttggcaagctcgatctcctcatctgcacttaacagactgactttaccgatctctttcaggtacatacggaccggatcctcgatgctgacaccttccggtacagagaggtcgatcttatcaagctctacctcttcttcatcttccatcccatccatatccatatcattatcaaggaggagttcgtcaccgctgttttctgtgatacggagaacgtccacaccgctggcctccaggaagtcaaaaaccttctccatctgatccacttccagtggagagtccttgaaaaagtcgctgatctcctgatattccagcacattctttttcttttttgcaagttcaagaagctctacaagtttctcgctgaattttgccatattcatttccataggtgctctatacctccatatagtgtttatattttatccttaattgaaagaaatatgcagctgctgcctctttcttccaaggtcttccagttctttttttgcttttatcagttcctgaagcccggccatgtctgacgggtcccaggtacggtttttttctttgaggctttcttccttgatccgcagcagcgcatcggaaaaagccctctgctgttctccttcgttttccagatggatggtggcgttaaaaagagatgccacctcccgctgctcctcactgtctgtaaaggcgttgagaagctttcccggattggtctctccctccttatgctgttcaaacagcatctgggctacctctttatacagcggtaccacaaaatcggaaggggaaatgtatttttccacctgttcaaaaatacccggataatttacaagccaggtcagcatcagcttctgtgctttgtctgcggcggattcctttttctttgtttccggagtcccggactttggctggatccgtttctctgcaggcgttcccttcagagccagcgtgttgacccttttccggatatcctccgtgcccactccatagcggccgtattcctttacaatggcttctatataaagattcctctccagttcatcggaaagctccagaagcatcccggcacaccgctcaaaaaactgattctgtccctggggtgcatccatggcaaattcctgttccgcaatgtgcacacggaacataaagctgtccatggcccggttcagacgttcctcaaaggcctccgctccttcgttcttgatgaactcgtccggatccttccagggcttcaggcttactaccctggacgtgactcccgcctcccgcaggatcgggatcgcacgaagtgctgcccggatccctgcaccgtcactgtcataaagaagcagaacttccttggtgtaacgtttcacaagacttgcatgtccggaggtcagtgcagttccaagcgacgccactgcattggtaaagccagcctgatgcatggcgatcacatccatatatccctcacagaggatcagataattcttcctggtggtcctggccacattcagcccgtaaagattccggctcttatcaaagatcttcgtctccggtgaattcaggtacttgggcttgccatctcccatgacacgacctccaaaaccaatgacccggttgtttacatccatgatcgggaagatcacacggttccagaacttatcatacatgcctcgccgctcatctacattgaacaggccggattccctgagaagttcatcactgtagcccttacccttaagatatttgtacagatcatcactatacttgtctgaatatccaagaccaaatttacggatggtttcctcggagagacctcttcctgtgagatatccgtaagccgtctttccgccttctctccggagctgataataaaagtactgtgctgccagcttgttgatctccagaagatttgctctctgttctgctttttctctggcttctctggaatactcgatcttcggaagctctacccctgcccgatcagccagatgtgacagcgcctcaccaaacgagtaattctcatattccatgataaaattgtatacgtttcctcctgccccgcagccaaagcagtaatacatctgcttggatggtgttacggaaaaggaaggagttttctcattatggaagggacacagcccaaaataggaactccccctccgtgtcagtttcacatactgggatatcacgtctacaatgtcatttttcattcggacttcttctatgatgtcatctgaataacgcatgcttatccctcttttccatttaatagacctcccaggctctcggtatatagatctccctgaatttctccatggaatactgatccgtcattcccgaaatataatcacatactgcctgttccttaggtactccccggtattccaccagttccctgtattcccgggacattgcctccggatggtcagtataatatccgtacagttcactcagcatctggatcactttatcctcttccttcctggcaaccggattctcatagacattccggaacatcagcgcccgaagctccatcatcgcctcaaaaacatccggcgacatggagatgctgtctttccccatactgttctctataatattatgtacgaaagtattcagccgttctctcgtggtatagcccagaaaagttctcattgtgacaggaatatcatcttctgtgatgatccctgcccgctgggcatcgtccatatcatggtggatataggcaatcttgtcagaaaaacgtaccacctgtccttccagtgtgaaaggatttccgctgatgcggtgattcatgatcccgttgcggacttcccaggtaaggttcagtccgtttccgttcttctccagtacttccacaacccggacgctctgcttatagtgtgcaaagccacccggatgtacctgatccagtgctctctctcctgcatgtccaaaaggcgtatgccccagatcatgtcccagagcaatcgcttccaccagatcttcatttaagcgaagtgccttggcaatagtccgggcgatctgcgatacctccagtgtatgtgtcagcctggtacggtaatgatctccctgtggtgccagaaacacctgtgtcttatccttcatacggcgaaaagccttacaatgaaggatcctgtctctgtctctctgatacgttgtccgcacatcgcattcctcttccgggtgctcccggcctctggtatctgcgctgtgagaagcataagggctcaaaagctcccgttctctctgttccatgctctctctgatgttcataagcatttcctccacagtctgacaaacagcggcgacaaaataccctctgttaattatattctacacaaaaccacaaattcctcttttctgaaaaaataattcaaaaaatattggagttacggtctgatcagcccttaagatgtccaaaattatcctattgtatatgaaatgaatacaaatatatcacggaaatcttccatttcagcttctccgtcagtacaggcaggcaataatttactttcatatagccaaaaacagagctgcgattcacagctctgttttaaagtcatgcggaagatgggacttgaacccacacaagcgcaatgcttacaagatccttagtcttgctcgtctgccagttccgacacttccgcat

SEQ ID NO: 231 - DNA, 67562 bp, Unknown
  gut microbiota DNA sequence
agtttttcactttttcgtgtggaaacaatacttccaactactttgcctacgatcatatgagcctccgttttctctatatcctccttttgggatgcctgaaaacggcatcccaaaaggaggaatattatttgattatggtaactgtattgcctgtggcaattcttgctgcatttgcttcatctgtatcaatatgcatttccaatgtaaagctgtcatctacacggatcttaacctgattaaagatcgttccgcgctcattgtcagcttttacggaaacaatatcgccatcatgtacacccgcagcctgggcatctttcggagccatgtgaatgtgacgcatagccacaatacatccctctttcagataaatggcaccttttggtccaacgatcgcgatcggtgcacttcctgcaagatcaccggacatacgtaccggaaccttcattcccagcttgatcgcatctgttgctgaaacctcaacctgtgatttactgcggacaggtccgaggattcttacattctcgatcgcacggagcttcagtcctacgatggtaactgtttcgttggatgcaaactgtccgcccatcagatcttttttcttggtaagctgatagccttctccgaacagtgcctccacatgctcctgtgtcaggtgaatatgtcttgcagaaactccgataggtacaacaaaaccattgcccttgtcttcgtttttgttgatcgcatcgatcaccatttttgtgatcatttcaatattattcgtttccaagagtacacctgctttctttcggtttcataactgaaattaactcaaaacgcaccggcccgaacccttaatggcccttgggccggtgcatcttggaactaatcagttggattatttaagaaccggaaggattttctcaacgtctgtatgaggtctcggaattacgtgtgtagctacaagctctccaagtctggatgctgctgcgcttccgctctctactgcagatttaactgctcctacgtctccacgaaccataacagttacaagaccggatccgatcttctctgttcctacaagtgcaacgttagctgccttgcacatctggtcagctgcctcgatagctgctgtaagtcctcttgtctcaaccattcctaatgcttcctgtgtcatgatcatatcctccttgtggattataaatgctttatttgttctgtttacttctgactattttggtgcagcagcttattttttgctgctgtttttgcttgccagtgcttcttccggattttcctgctgtttctttttccaccggcttgcactcagctcaaccagtttgacgatttcctcgtgaggattggcaattaccgcatagctggcaggttttttgattgcctgctccactgctgcattgacagctgctgtaactgctgatacatcgccttgtacgatcagggtcaccagtcgtccgcccagcttacgctcccatgacgccagctcaacgtctgccgttttgcacatgatgtccagggcattgatcgccgctacaacaccagtgatttctataaatccatatgattttcccatgagcgaactccttaattaatttctgttcctctcaaagcctgaaatcagagcttcggaagaattttctctacgtctgtatgaggtctcgggattacgtgtgtagctacgagctctccaagtctggatgctgctgcgcttccgctctctactgctgcttttacagcgcctacgtctccacgaaccataacagttacaagaccggaaccgatcttctctgttcctacaagtgcaacctctgctgcttttgtcattgcatctgctgcctcgattgcagctgtgaggcctcttgtctcaaccattcctaatgcttcctgtgccatgattctatcctcctgaatcttacattcgttacttttttatcatatatgattcctgcacttttgtaaagtgaacatccggaatcctcttaatctttatccagggcgctgatcttcagcatcttctgtgtacctggttccgggttggggattatgtaatgctgtaccacacctgtcatgctctctgcgaccttcatgccggcttctaccgctgctgtgacatctgacacgcttccgcggtacttgatgcagacaagaagcggtactggcaggctgtccgcattcgccggtttattcttatcgaatacctccaggtggacatttgcagccttgcacccggcgtcagctgccacaaaggctgtcgcaagtccgaagacctccagaattcctacagcttctgccatgttgcttctcctttcccgttaaggttatttgttaacaaccgcgatcttaagacctgtcattgacaggttcttctcaagtgcctcgttgatctcttccagcggatacttgtcagtaatcagctcagacattggaagtccgattgcttttgctctcttaaggaaatcaaatgttgttgcataatctctcagattgtatacccaggaaccaacaaggttgatctctttggagcagaggtcgaaatgcgggttgatggttgcatctccaccgttgatgaagaatccaagctcgcagaggccgccgccgttgcggatgaatttgtagatattggaatgagcatgaggatttccagtacactggaaagcgaaatctgcaagatgtccgccctgagcctctttcacagcctcagtaagtgcctcaacacccttgaagttcataaagtttacagttgtagttgcgcccattctcttggcgaattcaagacgctgctcgtttccgtctactgcacagatattatgaacgcccattgtatggagaactgcgatgcagataagaccgatcggtccgcaaccctgaacaacaactctgctgttgaatttcaggattcctgttgtttttgctctctctacagcatgtacaagtactgcacatggctcgatgaggatacgggaatcaagatccaggtcacttacattaaagaatgtagaaccgaattttccgcctctgatgaagatgtaatcagcgaaccatccgttgaatttaacatcatcgtccggaagaagtccgtatacgtcagcgccgcctacgtttttcttgttgaggtcgaacattgtgatttccggatcatctttgaagatcatacatgtaacgatcttatctccgactttaaccggtttaccagctgtatcaaccttaacgtttttacccatttttacgatctcgccggttccctcatgtccgagaactaccggaataagaccaaatggatcatttttgtactcatgagcatctgttccgcagacaccgcatccctcaacttttacaaggatgtcgtcatctccaacttccggaagatcatactcctgaagctcgaaatgtttcttctctgtcatcattgctactcttgcttttttcggaattgtgtttcctgccggagcagccggagcgcttgctgctggtgttgcagccggagcgtttcctgtcatgccggagagaacctgtttaacgatttcttcgatatttacattgttcatatccattgtttctgttcctcctgatcaacgaatgcaaagactgtctgtcattacgcagcgtcttctcttggtgaatgtgcttgcgcttgtaagtccctcaccggtacggcttgcgatagtgaatgtacagaagccttctccaccaaatccaagtgcggaataggacgggccgttctttacaaggatcgctgtgtcgattgctttcgcatattttgtaatgttatcaatattcttggaatgaatatgtgcagaatgacggttgccatgctcaagccatacagcttgctctacagcgtcatcaaaatcctttgctcttacgattccgaggatcggcatcataagctctgttgtaataagcggatgctccttcggtccctcgaagataatgcagcgggtgtttgccggtgcctgaactccgatcatggaaagaagtgtcttcgcatcacgtcctacacatttacggttcagcttgccgcctgcaagtacagtctcaacaagcttgtcctgctcttccttggaagcaaggtagcagtcattctctgtaagcatgtagtgcattaactcatcaactacggaagatactgcaacaacttccttctctgcgatacatggaaggttgttatcgaatgtacatccgtttacgatatcctgtgcagccttgcggatatcagcagtatcatcaaccagtgccggcgggtttcctgctcctgcaccgattcctctcttaccagaggaaagaactgctgtcacaacaccagggcctcctgttgctgcgatcagatggatatctttatgtttcatcataatattgcttgtctcaagggttggtttctcaactgtgacagcgatattatccgggccgcctgattccagggaagcctcatttaaaagattgattgcgtaaatagaagttttaactgctgccggatgtgggttgaatactactgtatttccgcctgccaacatacccattgtgttgcagagaactgtttcacttgggttagtgcatggtgtgatcgcaccgataacaccaaacggtcccatctcgatcagagtcagtcctctgtctccggaccatgcagttgttgtaatgtcttctgttccaggtgtcttgtctgctaccaggtgatgcttcaggatcttatctcctacattacccataccagtttcctcaacacccatacgtgccagtacttccgcattttctttgatcttcttgcggatgcaggtgatgatcttttctctctggtccatagacattgtcttaactaccagctgagccttcttggctgcttcgatagcatcattcatatccttgaaaacgccatgttttccggccggagcatctgcgatctgcatttttgccataacttcctgtacaatttcctgtaccatattctcacttattggcatgagatgtcctccttaatattccgtcaaaaatttatttcaggccaagctgagccataacctgttttgtgatctgagcaacaagctctgcgtcattctttgctgtatctgctgcaggagctgcatctttatcacaatcacagtcttttccaacgaaatcatactgatatcctgggaactgtttgtagtcctcgctgtggcatgcaccgccacagttgtggcagttcttgccgtctttgttcaggcagaggcttgccggatgttttccaggcataccgaatttacgacggatcgcatagagcttctcgatgttctctttgtcgaattccttcggtccgccaaggagcttggtctgatacagaagctgtgcatagaactctacagactccatcttcatatatgcagcgttaagatctgtgctccatgtaagtgctccgtggttctcaagaagtactgcatcgaagtatggaaggtatttctcaaggttgtccggaatctccattgtggaaggtgtgccgtactcagcgatcggaacacatccaagagcgataactgcctcaggcatgatcggctgtgtaagcgggatacctgcgattgcgaaagatgtagcatagattggatgagcatgtacaacagatcctacgtccggtctcttctcatatactctcatatgcatcttgatctcagatgatggtttgaatcccgggttagcctggatcacattacccttgccatctactttacagatgaactctggtgtcatgaatcctttggatacaccagttggtgtgcaaagatattcattctcagctatcttaacagaaaagtttccgtcgttagctgcaaccatgttacggttgtagattctcttaccgatgtcacaaagctgttttttgatttcaaactcgtttaccatgcttaatttcctccttgagcattggattgcactattttgtttctgagaacattttaccccataccacaaaataagtcaaggacaatccgttgttttatgttggtttcttgttgtattttgtgttgtttttattgttttttatattttctgtttgtaaaggatcttttttctgtaatcctgtatctctcagccgccgatctggcagtccaggccgcataccgcatgcactgcattctttaacatctgcatatgttctactgtaggcggaaggattccttccattaaatagggtctgccaagtccttcatatttatcctgccccagtctgtggtacggaagaagatggatcttgtttacgcccggaagggatgctgcaaatcttgcgatcgcctggatctcttccacagaatcattaaatgtggggatcaccggaacgcggatcaccagtctggtttttccgtagagcgcaacccttcttgcattctccagcatcagtccgttggcccgtcctgtgaattctttatgtttttcctgatccatatgcttgatatccatcagatatacatccagatagggaagtacctgttcgatcttttcccatggggcacaggccatactttctaccgctgtgttgatccctctctcctttgcagcgcgaagaagatctctggaaaagtccgcctgacacatacattcccctccggaaagggtgatcccgcctccggaacgataataataggcacggtctttttccacctcttcgatcatctcacgaactgtcacgtcgcggccgatcactttatcttctcccagaaccttcatgttctggatccggtattcctgtgattccggattacagcaccagcggcagcgaagaacgcagcccttcaggaacacgatggtacggatacccggtccatcgtgtactgaatatttctgaatatcaaagatcctgccctttgtatccaaatagtccattcgttactcctttagaagccctgctcagtacgtctgatgatatcgtcctgcagagatctggaaagtgtagtgaacaatgcgctgtagcctgcaacacgtacaaccagatgtttgtacttctccggatgcttctgtgcatccagaagtgtttctctgtcaacaacgttaaactgcatatgcatacccttctgatcaaagtatccgcggatcagtgctacgaatttctccagtccttctcttcctgcaagtgctgacggatgaaatttctgattgaacagtgttccgttggatacgataaaatgatccagacgggatacagaagttgccgcagctgtcggtcccttcacatccttgccggctgacggggaaacaccatctgctaccggagtatgtgcgtaacggccatccggtgttgcaccggtctgtccgccaagcggaacatttgcagatacaggataaagtcctgcctgataatgtccgcctcttgggttcatatatttctgaagcggtcttgtgtaagtataagccacatcccttgcaaagtagtccacatccgggatatcatttccaaacttcggaacctcctcgatcatcttgtggatctcttcgaatcttgcctttttctccggagatggctctgttccgagagctgctgtcataacagctgttgcggtctgctcatttacgcggatgccattctcctgaagcttctgcataacgatggtggtgatatctgctgcagactgtgcatcgatgcccttgccgtagttccatgccagagcctccttcagctcttccatggtcatcttcttttcttcatatacaagcttgcggatcgcatacagagaatctgccatgtttgcaataccaaatccctgaggacctgtaaagttataaacagctccgccttcctgaacggatttgcctcgtttcaggcagtcatccaccatacaggaaaggaatggaagcggacatctctccgcatgtgccacatcaatggcattatcagcatttacaagcagggaaatgaaatattccatctgtttcttatatgcatcatagaactcatcgaagctcttcatctctgtgacatcgccggtctggacactgatctgtacccctttgtccataccattagagaaaaccatctccagcggacggcacatgttaaagaatgcagcgtcatgccagccctctgtcttacctgccttctgcggttctacacagccgatgatgttatattctctggcatctgcaagagaaaggccgcggttctgcagtgcaggaatgataacctcatcattgtaataagccggaagtccgattcctgttcttgtaagctctgcagccttgatcaggaattcatgtggtgatccgttccatactcttacagaaagagacggtgccggaagatgcacatgcatagacgcctggatgcacataaaggagagatcattggtcacatcctcgccatccttgttctgaccacctgcgatcaggttctggaaaaggctgtagcctgcaaagccttctgcagatgcagcatcacggcatttattcaggtcgtttaattttacccatatgcagtccatcagttcctgggcaaattctctggtaagattgcctgcttccatatcactcttgtaatatggatacatatactggtcaaaacgtcccggagaaatagaatgtccgctgctttccatctggatcagctgctgtacaaaccagaaggactggcacgcctcatagaagttacgggcgcccttcgccggtacgcgtgtacaattggatgcgatctgaaggagttcctgttttctggtcggatcctgacactgatatgccatctgctctgcgagctcggcatagcgatgtgcatagtcgataactgcctgacagctcatgataactgcttccaggaaacgggatttctttgcgtaatcaccatctcctacattacactcatccagttccttctgagctttggcaatgatcccttcataaccgatcgccagaacttcttcatatttaacggttacgtgtcctacaccattgtagaaatagtttccgggtgtaaaaatattgtggtcaatggcaagaatcgcttccggtgccatgtaggaggttgcaagctcactggtagtcttgcctttccagtatttatgtacctcacggagctccgccttggtttcctccgcaatataaaatggatcggctgttctggtagccactgtatccagctcatcctccagccactggaaagaatactccggaaacgtctgacagcctctcggcgccaaagtgctgcttccaacgatcagctcctcatcacggatgatgatcggaatgttgtgcaggatgtgggcaaatgccttggctctgcgggtgatgatcggctcgtcttctgttgctttgtaagactctgtgatcagttttgctctggcagattcgatcaccggcatctttgcataaagattatctacaagatgtgtgatcctgtctgttttcggaacatctgctatatgaaatttctccatgattctcctttctcataaccggttgtttctggtgatctgtctgcctctacgcttccagaaccgctcctgtccggctatgtgctcatgtagttttattataccttacccctacttcgatgtcaacgaaatccaacatgtgtttctagctgtttttgtggtttttatcggttgcgccctgttgattttatttgttttttgtatttttatgtttttctctattgactttgtttttctgctctgccatacttggatttatataggaattcctttgtttttcagaaaaaatttatgcaaagcggacattcgtattccgctctgtcacatgttctcaaacagtaaaagaggtgtatttttatgtatctttctgatatgcatacccactccatcgccagtggtcacggcacggaatgtaccatcaccaacatggcacgcgcagctgccgagaaaggtctccggcttctcgggatcactgatcacggtcccggcactctggcagccggaacttcctcctatttccgcagccttacctattctcccaaaaaacatttcggtgtagaattactctacggaattgaactgaatatccttgaccgcagcggaacggtagatttagatcaagaattattatgcaaacttgattacgccattgccagcatgcatgcctggaattaccgttgcggtaccagagccgaaaacacagaagcttttatcaatgtaatgaaaaacccctgtgtaaagatcctcggacatagtgataacactcattacccggttaattatgatgcgcttgcaagggctgccagggaaaccggcacgatctttgagatcaacgaagcttctcttgcaccttatggctatcgtggcgacacaagagaaaactgtttcgagatccttcgatgctgccgcaaatatgatctgccgctgcttctttccagtgacagccatggcccggagcatatcggagattttacctgtgctgctgagtttgttcatcaggccatgtttccggaacagctgatcctcaacaaccagattcccagactcaaggtttttctccaaaccagagaatgatcttctgtatcttttccgacagataacagatattgtcccctaaaacaaaacaggccagttcaaacacaggaatatacattttcctgtatctgaactggcctgttttttatttttcccgctgctttcgtacaatttccgcaagctcgctatatttacctgtaacatatccaaaattttcttttctgtgaggaagcttgcattcggtgcagtctttgatcccgctttccgtaaagcggaaattaccaccacatttatctcccagtgcatataaaggacaatagcagaacagacaattgaagttctccggatctgctcctttatggcacggaaaatattcacagtttttgtggctgaagtaagagtattctttgccttcccagtatggtttctccatggctcttttctcctctcctgacataaccacacataactttttcctataaaaaagaggtagcgatgccaccccggggtagaaatataatccgttcatgagtgcgcggagggaacgaatgtatccggagtagtatcgcctgccatttaatcatgtataattcatatgaacaggcgcattccataaaaaaatgcctactctcgtaaaaaagtagacaacgtcccaggggtgcggagtccctgaaatggttgttacactttacacggaagtttaacctcgccataacaagcaggtttcctggctccgggatcatgactcctctctccttctcatacatacgtacaatggactatgagattcgctcctccgttacagtgaccggatcgctcaggtttcacacctgattcccttttctgtggacttctgataatcaatatataactgtcagctatcctcagcacttgctatgttcaatatggaattatactgacattataataacatcctgttaattatatgtcaatactgttttcaatatttatacatttttgagcatattttgttgctgttcactccgttccatgggttttcaatattttttccgacgtcaaaaacagcccgacaaactgctgtcgggctgctgtatttttattttctgttgtacgttcttattatacaagacgtcttacagatacaattgttctgtatgtagcatcattgctgatcttgatcccgtcctgagagttcgatgcatgaacgatctggccattacccatgtaaatagccacgtgtccgccatagcagatcagatctcccggctgtgcatctgcgtaggatacttctgtacctgcattctgctgctcataggaggttctcggaaggctgactccgaagttcgcatagacactctgtacaaatccggagcagtctgcaccattggtaaggcttgttccgccccatacgtaaggattccccacaaactgtgtagcataattcacaacagaagatccggaaccactgctgtaagaagaactgtcactggctgaggatgtgtcctctgcattagatgtgtcctctgcattagatgtgtcctctgcactttcttcagatgcgtctgtgctgttatcgtaatctgcgtctgcattatcctctgtattctcagtatcctcggacgcatcatcattctcaccattgtctgcatcttcatccacatcctcggtgtcatcttctgcagtatcctcatctgcattctcgatcacgtcgccgtcctcatcgtactgtacgtcttcgctctcgtccgcctcatcctgctgtgcttcctgctctgcctggcgtcttgcttcctcttctgcctcagcctgtgctctcgctgctgcttcagcctcggcctgacgtcttgcctcttcctctgctgcaatacgctcagcctctaatctctgaagctctgcagtctgctctgcaagaaggttggcataatctgtagcctgctgctgtgcgtaggcgatctcattatcataatctgcggatgtggcacgcttctcatccagctgtgcctgcaggttctgggactctgcctcatattcctgcttcattccctccagctctgccttctcctgtgtgtactgtgcctccaggtttgccacctgctggatcgtattggaatatttttcaagactcttacggtcctgctcataagtcttctgtgtgtactctgctcttgtaagaaggtcagacaggttctctgcattcagcatcatctggaaccatgcatcgtctccacccttctcatagagatactggatacgtttcttcattgcctcatactgtttctgcttggcatttttggccttctcaaggttggtctgtgtagatgcaatgtcggcttccttattggagatatctccctccagtgtctggatcgaaaccatcacgtttacaagattggcatcaagagttgaaatctcgccttcaatctgtgacttctgtgaggaaagctcatccaatctggaataagtcgcattcagctgttcgttggtcgcatccatctcctgctgaagtgctgcctcatcttctcttgttgcgcttacgctgactacctgtgctccgctgatgatgagcgccagtgtcagacataatatccttttcttcatgactgttcaccctcgcaatctgattctaatttaatacagcggatctgaccatccgcttcgttggttttctttgtaatacttttgcaatatcttgtttcaatctttttatatattaacacagtgttatttggattgcaaggattttctattaattagtttaaaactttgtaacatttattaatgattttgacattaaaaaaggagaacccgggttatctcaggttctcctctcacgtttcttattgctatttgttacatacaaatttctttcagcacatcctgatcagaacagatctgcaaggatctgattggctgtcttgttcagatatccgttgggatcggaaagagtgcttctgttccatctgaagtatgcaccgtttcggatatagttaccactggattcatgatagtcatatttgctggctccaggatacctagacatataagtttctgccagcttgatcgcctggcttccgtaagttccgcttggtgtcggtgttccggaaatctgtacgccggcattcggtgtacagtggaggatcacaacactcttatcggaacactgtccgagaacgatccaagtatgtccgctgttgtatccgatatctcccggataaagcttccagtttgagcttgccagctgagactgggaaacaacggtacccattcccttgccggaatacaaagatccaagatttccggaaacatccgtgtacataggtccaccggatctgctctgcatgatctgatatacagaccatcctacaaagccggagcagtcaaggcccttctgttctgtagcttcactgagatccatataatatctgtaattataggagctggaattgctgtcataccactgtttccattttggactgatgccctttctggtcgcatccgaccagttgtggccgccgccccatacgtaaagagtctttcctaccggaagcagtgcattagcaaggaaattcttgatggtcctggagcttgtagctgtagtagtgcttgggttggtatccaggacaccattgctgccaaatgtatacttcttgccatcgatcgtcttcgttcccgtagccatgacaccggttgacggatcgaaataatatttatatccttttttggaatttgtgacccatccggtagccatcacgccgctcttgctgtaaaaataataggtattgctgccgatcttcttgaagcccttatacatagctcccgtgtttggatcaaaataacgcttctgttgtttcctattcgttgcccagccctttgccataaagcatttgctggtaaaatatctggtcacattctgcttgtctgtaaggaatacgcttcttgcagcagcgccactgccgctgtagaaataatatttcttattactgatcgtggcccatttcgttgtcatatatccgctggtaggcttaaaatagcgggtattgttcttgctgtctgtaagccagcctgttgccatatagcccttgacaccgttgacattataaaaatatcgtttacccttggaatccttagcccagcccttcatctgtacgcctgtggatttattaaaaaaatatttcttcccgttcagtgtaagccagccttttaccttctggccattctgataataataggactttcctttttctgttttaaagccgtttttggtcgcagcctgtacatctgttgccgttgtatgtacagttgctccagctgcaaagaacatcagaacaaaaaaaagtccccagagtttccattttctgcttaattttcgcatacataccttcctttgatagatagatcattgatatttactatttcttaagtccggctgatcgtaaacattacaattttgttacaattttacgtccatattatataacattctttacagtccgtcaactctttccttttctttcagaaaaaatgtcattacggtattaccaatgttgattttatgcagaaaaaatccccgaaacatcagaaatattcactgatgctccggggatatgatcctttatgcagttttactcctgcctgttacagatctgttacagatccttacagaaattttttgcgaagctctgctccgtcaagggcacttaaatatgcaggtgcaacatcaaatactgtcttgcaacccttctgtccttcctgattcatacggtatgcagctcttgcataggcaacgatcacagaagatgtgaactcaggattggaatccagcttcaggctgtactcgatcacatggctgttctcattgttccagcctgtttttccactgcggatcacaaaaccgccgtgtggaataccgctgtggtcacgatccagctcttcctgagaaatgaaatgtaccgttgtatcatactcgtcaaagtaattcggcatggtcttgatctcttcctcgatacgtgcaagatcagcaccctcctcagcaactacgaagcactctcttgtatgtttctgacgtgtggtaagctccggattctctccgtttcttactgcctcaagtgcagcttctaccggaatggtgtactgctttgcatcctttacgcctttgatgcggcggactgcatcagaatgtccctggctgacacccttgccccagaatgtgtagtcgtttccatttgtaaggatcgcatttgcatacatacggttcagagaaaacattccgggatcccagcctacggaaatgattcctacatgtccactctctgttgctgccttgtcaacatttgcaaaatgctccggtattttcttatgtgtatcaaagctgtccacaacattgaaatattttacatactccggtgtctgaacaggaagatctgtagcacttcctccacagatgatcaggacatcgatctcatccttcagcttctccgcatcttttacagaataaacctttgcggtctctgtaaggatctttacagtctctggatcacgtctggtaaatactgcaaccagctctgtatccggattatgcttgatggcgcactccacgccgcgtcccaggtttccgtaacctaaaataccaattcttatactcataacgatttcctcctctttttctctgcagtatgacattttccggacagcattgtgaatttctgtcagaaaaagccttctgcgatctatatcgcaaaacggatctgcaggatccgccttacaaacatatggatatgctgccttatgatatccccgatctcagtttcaggacatcgatgacagacctttttcctgcatcagcagcagaaaaagccgcccggccagcacatgaaacaggccatggtcctgcagcaggcatcacacatatctcctcctgcagtcggcattcccccaaagggatcctgccgctgctgataccagccgccaccgccttccattctctggagcagcatacggtactgcatattatccggttcctgacggactgcttcacggatctgatccagagctgttacattatttcccattcccatatttgccatagcagccaggtaataccattccccatttttctgaccaagagaatccagtacattcatagcttcctgaaaatgaccgctctgcacataattggcagccgcccttctgcgcatactttcctcatcctgataggcactggaaccggcatttccgtaatttccaaaaccaccgtaatttccgtagctgccataaccattctgggaactgcttccgtactcacgctctttcatgatctgctcgtaagcctgctgcacttctttgaatttttcttcggcctgatccttattcggattattgatattggcatccgggtgatactttcggctcagcttccggtatgccttttttatttcatcatcagatgcgtttctgggaactcccagcacgctgtatggatctaacattttttctctttctcccgttcttccctgcgcttctgtccgatcgccgcaaagcggcaccagacgccggaatataaaatatttcgaaggatatctccgtatcggaggatcggcagcttttcaaattctctgcagcattctgcaagcatcatcataagaagccgacgtacctcttcctcgaacccttctatcttatatttttcaaggaaaggattgtaatttccgttttctgcatctttttccacatcgtcataagcatccaggatgtagataaattttccgagataaaatcccagacggcgcagggacgattcccagacatccttacggaaggccagaatctcttccataatacgtccggaacacccggctacacggtccacatcggtttccccctgtttttccaaggaagaaagctcctccagcgcgtttcggattctttggatcttcgccggataagcggacatatgcatatttccgcaattcttcagaattcctgcatatgcatagcgcagtggtttgtgttcatcctgccagtcatccatacatttgtaataggtaaggatcacattcatatccgcacagtactcagttactgtatttttacgtaccggctggggcttcagcggatggaccacacacctggaggttcccttcttcgttggcggctcataaaggccgcttaaaagaaggaccacaaatgtcatatcataagtcagtgagatctgtcccggtatcccgtatctctcccgaagttctctgcaaaggccgcagtaaaaagaacggtacacatcaaaatccttgaattttatttccggtttattaacggtcacatatccgaacatgtcagctcctttttacgaattttgtatggcatttcggacattcgatctcgatcttgccctttccctttggaatacgtatcttctgtccgcagcccggacagctgtagatgtgatgggtctttctctgcttcatcagatccttttctttattaaagcgaaaacggaactttgacgtcatctgaaggaatttctgattttcggcataacgctgctggatatttctggaaaaaatacgtatatatgcatatacgattgctgcgaccccgagaatgtcaagagtgctgccggcagttctgctgaatatattggcaaacattgccagaatgatcagaaccagtgcagttcccatggtaaacctggaaagatcatccactccataacgtccctgcataaatttattgaatttgtctctcatatgatctgcatctccttttcactgccatacggcactgccaaaaaatttccgtaaaaaatccggaggcagttcctaacggtcattgcatacctggaaaatgtagaatttcagataataggattcgtcagctgaccagaggatcggatgatccggtgcctgtgtacggtactctacctggcgcagtctcttatggacattcttcgctgcctgaccgatggtctgtgtaaacagctcatatgtcataaaatgagagcaggaacaggttgccagaaatccgccgtcctttacaagacgcattgcacggagattgatctcacggtatcccttgatggcattttttacagagcttctggatttcgtaaatgccggaggatccagtaccacaacatcaaatttctctcccttctcctcaagctcgggaagaagctcaaaaacatcctcacagagaaatttcactgttccgtccaggccgttcagactggcgtttcgtcttgcctgcagaactgcagtttccgacgcatccacaccaagaacactctgtgcccctgcaattcccgcattcagggcaaaagagccggtatgtgtaaagcagtccagaaccttcgcccccttgcagagcttctggatagcaagacggttatatttctgatccaggaaaaatccggtcttctgcccgtccctgatatctacttcatatttcacaccgttctcttcaatctgaacaagtgtcggaaattcttctccgataaatcccttggtaagttccattccttcctggcggcgtacctttgcatcacttcgctcatagactccacggatccggatcccatcctcagcaagaacttccttcagtgcatctatgatcgtttctttaagacggtcgattcccagtgcaagagactgtacaacaagcacatctgaaaacttatccacaacaagacccggaagaaagtctgcttctccgaagatcacacggcagcttccggtatctactaccttcttacgatactcccatgcgtcgcggacacgttgtttcaaaaattccggactgatctctgtacgctcatctctggtaagcatacggactgtgatcttggaattggtgttgataaatcctcttcccatcggatatccgtcaaagtcccggaccagaacgatatctccgttcacaaaacttcccatgatgcttgcgatctcattgtcatatacccagaggcctcctgatttcaggaatctgccttcgcctttttttaatgttactactgccaggctcataaattctaccttttccctttctcgtttccctgtcacggtttgcgatgtatgagtccacaaaaccgatttacggtcaattttatcacagaaaaatccatttttccagtgcttacacaaatccttgtcgtaaatcacaaaattttcatgatatctttccggcacgacaaaaaataccgcagcagaggttgttttctctgctgcggcgtattcatctctttttctgctgatcttttattctgctgcggattcctcagaagcgtccgtattctcgccgtaaagacctgccagatatttcatggtttctttataaagtgtctgcttatcttcctggggaacatctgcaagaatagtagctgtcacgtctgtggcatctgtgtcctcctgggaactgtcaataccgaacagcttcttcagcttctgatccatcatattcagctctgtactctgatatttctctgtaccatctgcctcataggattctgtaccatccttcaggatatcataataatccttctcaacagtttctgccacactcttcgctgtctgctcatccagtgttaccgttgccactgcctctgtatcctccgttgcagcgagaagggaatctgcatctccctcatactcgccttttacaaagaggacaaatttgtcataattgttctttgcttcttcgctgagcacggaagtatcgttttctgcactgtctgcctggtctgagccctctgtactttctgaagattctgtatcttctgttgcctccgggattccggtctcatcggatgcagcctcatcagaagcgctttcatctgtgctgttctcgtcagaagcactttcgtctgtactgctctcgtcggatgcactatcctctgtactgctctcatcagaggtactttcgtctgtgctgctttcatccgagctttcctcattgctataggttccgtcgtcggtagcatccgggattccggtctcattgcttgtatcctgagaatctgctcctgtttcttcctcaagacccggatcctctgtggagctctggatcacatcgtcaccaagaatgctgtcatttacattgttgacgatatcatcagaagaatctgcatccacatctacggtttcatcactgctctcgccatccagcgtatcatcagaggaagaggtctggcctgtggtattggcatctacctgctccagtgtttccttcacatcatcataattgtaatcctgctgtgagatctgcttcagaagagacacgatcctgtcaatatcgtcctggcttacggaaatattgttctgctcagccacattgataacaatattctggatctcatctgcattctgtactccgttctggatcacatccatcttggactggtttacaactgttgtcgcctcatttttaccaaccttatctgcaagctcaccagtggttacgatctcctggttggcaagcttcgtcttggtctcatccagcttctctccgctggccttctcatatgccatctggataccggtaagtgcacctgttccggatacttccatcgggcaggcagcaactacttcacagttcttcacaccggatgtggaaagtgtcgttgcgatcatattacctgtcacccagttcagatttgctgtgcggaccttgatcccgccggactgtgtaggcttcacataggcacagctcaaagttctggaaccgatctgggactgtggtgcgatattatccaggtgtttatgctcatcctcatttgtaatggtcatcacctgcacctgatcggaacttacattaaaatatttcatcattgtctgcttctgagcatccgtaagatctgctccaagtgttactaccttcgatgcatctgcaaatacgggatttacacttcctgccacaaggcatgcactgcagagcagagctgcgatcatgtttctttttttcattgatcttccctccatatattttttcggatcgattgtatctgcttaacttttgcggtgtaaagcggacattcctcttcgttacttacatctccacgaatgcgagcgcttcacgatctgtcgttcttgtcatattataacacagctgctgaaatatttgtaatttatattatataaaaaacgctgccggaaattatatcactcatttctgacagcgttttattgcttttctcattttcccagagaacttatctgatctggtttaattttccggtttcttttgcttttttcaacaattcccggtttttttcattcatgataccaaaatccttcagcggacagtacactttttcacattttcccatgaactccagtgcttcttcaaaggcagactccgaaatgcattcaaaaggcttctccgtgatcacttttgcagccagttcttttgccacctgataatctgcatcattggtatggagaactccggtcacaaaaggaatcccctgtcgctgcagcttccgatataccggaatcccacttccatttcctccgatcacaaacacctccggttttccggccggaggttccatttccacgcagccgaattctgcattatagcttccacgggtgatgccataaagcttccgaatataatcggaagtaaagatttcctccggtgcaccatatttctcaatgtgatctccatgaacacagatcacctggtcagaaatcttctgggcaagatccagctcatgaagggacatgatcaccgtcatctgtttttccaataccatcttcttcaaaatggcaagaagctccagcttatgccggatatccaggaaggaggtcggttcatccaggataatgatctccggttcctggcagatggcgcgtgccagaaggatacgctgtctctgtccgtcactgatggctgtaaaatcccgatccttcagatcccaggcgtgaaccatctccatggcacttttaactttttccttgtcctctgcggaaaggatcccgagagttccggtatagggatatcgtccggtggataccacatcctcacaggtcataagctccggtcgcatgcgttcggtaagtactacagccagtttttttgacacttccctgttggtcatccggctcatctgttcctgttccagatataccgttccgctgatcagggaaagctgtcttgtgatactcttcaaaatagtagattttccggcaccgttgggaccgatcagtgtcaggatctctcctttattcagctgaatattgatctctttgatcagcggttttccatcatagcctacggtcagctgatctgtataaaaaaaatatgatttcatcgtttatatcctctgctgtctgtgaatcatgatatagataactaccggtgctccgaaaactgctgtcacagaactgatgctcagctccgtcggtgcaaatacagttcttgcgatcagatcacagaacaggcagaacactgcaccgcccagaaaacaggccgggatcacaagcagcggtttggcagtcttcaggagactttttgcaatatgaggcacagcgatccccacgaaggagatcggccctgcaaaagcggtcacacaggcagaaagaatactggaaagcaggatcagaagtatccggaaagccttgatattaactcccatattctgcgcgtaagtctcccccagctgataggcgctgatcggttttgacataaaaaatacgatcaccatagtaagaagtaccacaacagccatagtctgcacatttccccaggtcataccggaaaagcttcccaatgaccaattgtgaagattaactatgttggaatcatctgcaaaggtcaccacaaagtctgtgatggccgaacagatatagccgatcataacaccactgatgaccagcatggacatattgtggactttttttgccacaaggagcacaaagcccatggaaatcattgagcctgcaaaagcagccaggatcatggcaccggaaccgatggacaccgatctgcttaaaaaaaagatcatcagaagcgccacgatcagcttggcaccggaagagattcccagtacaaagggtcccgcgatagggttgttaaaaaaggtctgcagcaaaaatccggaaacagaaagtgctccgccaagaatgatcactgccagtatcctgggaagacggatctcccagacgatattataagaagtttcatctccctgatgccggaatatgatattcaggatctccttcacagagaggtggatacttccggaatttacattccatataaataaaaagatcaaaagtaccgcaaggatcacaaaagagatcccgtatcggactgcgcgttttctgtcattcattttttctggtacactcctcttctgttttgttatcatatcctttcgtttcctgctcacaggtggaaaccggcaaaggagttaaagcgaacactggaatttatttcagtttatgcatataggtcagctcatccagagaatcatcatctgtagtcagcatggtgtggatatcctcgatcatggttccaagtccggtggtttcctggaaaagatttttgcctgtgcaccagacatttccgttcttcactgccttgaaatctgcaagaagcttacttttggaaagaagctcatcaatggtcttaagttccccgtcgatcgtactattgtagatgatatagtctgcatccttcgccttggcataaaattcttccatctgcatattcatggtagaaagagcattgtcatttactcccgtatcctccggaacataatttcctcctgcgagggaaatcatttccgaaacatagtcgccgctttttcttatatttaccgcacctacggagttgatataaaagaacgccacggtcttgtctgttttatctgcggtgagaaccttatccaacttgtccgtctgctctttgaataccttttctgccacatcttcttttcccagaagaactgcgtaaagtttcatccactctgtccttccaagaggatgactctcatagctggaacgctctaccattacagggatcccgaactgctccagcttctcctgtacctccggattgtgatggatcatggtggattcaatggcaaggtcacagccctcgttcaggatcagctcgtaatccggagcactgtacttgccggcatagatcatctttttctgttccatggcgtcctttgcttcctggatataccatccgtcttccttggttccggaaagcttgatgctgtcaatcccgtcgatagcacggaaaagatccatggctgatgttgctaccagatagatattgtttatgggctgctgcagaaccgcaatgtcaggatccagcccctccggtgctttcctgccctcgggaaccacaagaaactgcccttcctgatcaatggtgatcagcgcatagccatcgttgtagtaatccacattaaattcctctgcgtaggaaagctccatactgtgatcaaaggtaaggcctggaatatccgcaggcttatgttctgtctctgctgcctgcactgcaaaagcacaccccaggatcagggtcagcgtcagaaatatgtatgaaattatttttttcatttttctccctttttcatacttgaagaatcaaaattcagagtatactcaatctcgtgaggcgtactcatggctacagtatctgcagtcacttccatttctgcatcaaagacagtgatcgggatctcaaatgtggagtttccgtctttgttcaccggctcatatttttcgccgtccacgatcatataatcataattcggactgctccagatgatggttgccgtagcttctttgtccttgatctctactttggccggagattctacggatgcccttcctgatccgcctgtaagggttacatcagtctcataggttccatcctccagcttcagatcttccggctttttcccttcggatttcttgtcgtcagaggtttttccatctttggactcatctgacttttctgctgtctttttgtcagaggcagcttcttttttttctgtatcgtccgctgttttttcagcagtatcctctgtttttacaggattctttacgctgactttatggtcgtaccatttgcctttttctcccaggatcgccacgttaaattcctcaccaatggccggtaccgggatatcaaatccgtaaacctcctctgtataaccatcgctgtacttcactgtatctgtggtcggctcaatgatctctgctccgtccttctgggcatcctcggcagttcccgcaaacaggttaacgatcttcttggaaaccagacttacgtggatggtcattttaccatctttgaccgtgagctctccttttttgtcattggcctcatttacatgaaacatgctgctgtctgtatcaaactctgctgtataaacgccatcttccagggtatctgctttggctgcatctgtatccttttcttcggaagcttctgcttcctcaccggactctgtttttgtttcatctgtttttgccatcgcaggcacagagcccagcaccaggactgatgcacttgccattgcaagaattaagtttacatagcgttttttcatgataatcttctcccttccatagatacagcaatctgcccggaaaacagtcttcctgatctttccgggcagttacattgatttcttataggtatctgaactcactcagatatttttatatttattattctgcggactcctcagcagaatcagcctctgtatctgctgctgcatcagaatctgcggactcctcagtgcttcccagagaatcgatggctgcctttgtatgctctacataaagcttctcaacggcttcgattcttccaagaccctcgatctggcagtcaaccttatcgaagtttccggatgctacaaactggctcttccaggaatcctcatcatcaccggccatatcgttatttgcatggtctccggcaacaaccatcagcggacgaagaacaacgttcttgtatcctgcttcttttaccttctcgataaccttgtcgcaggctgtatcttccggcttaccctctacagtaccgatgaatgcgttcttcaatccaagattttccatctgtgtctgcatctgatcgtatgtaatattagctgtatgggatgttccatgtcccatgaatacgaatgctgtgccagcctcagctgctgcatccatgctgtcaaatccggcctctttgcaagccgtatctgtgatcgcctgagcaacggctttcttgtcatcattgatcacagttgcatcgtctccaacctcaccgagcattggctctgcgatagctacagactcgaatttatctttatagccattgattgcttctgtcatctcatcgtactcagcaccatgcatcagatgggtaggctgtacaaccagattcttaacaccattctctactgcacggtcaagagcctgctgcatgttatcgatcacttcattatctcttgcctctacatggttgatgatgatctgtgctgtaaatgctcttcttacagaccagtccggataagcttctgcaagagcatcctcgattcccttgacatcctctgcacggctgtcattgaaggaagtaccaaagcttacaacaagaagttcattctcaccgatctcatcctggttacgcggatcgtccttggaagcatctcctgtgtcacgtccgaaataatccggatctgcattctcaccctctaccagctctttctgagcatctgtcagagcatcccatgcttctttggctgccttgcagtcctcatctgttgtgtcgtttctttcctgtacatagatcttgtcgatcagagctgctacattatctgctgcttcctgatctgcatcagaagcctctgtggtatcagctgcctcagcgttctcttctgtagcagaatcctctgctgccattgctgttgtagccgcacccatagagcatgtcatggaaactgcgagcatcagagctaacattgtttttcttttcatttcttattgtcctcttttcatgtatttccagaatactgatatgtacaaaaaatggcagctctctgcggccgcctgctcacacatgattctctgcgcaatacaaatacataaaaagaagtcctgtattgttatggagaataccgattcgtaaaccgcgaatccttggatctcacaataaggcagttctcctgacttggttccacgctgctttcccttcccggtctcccagtggttataaaagcagctcctctttcacagtgacggtatcgttccggattctcaccggattctcttttgcacatccgactggatgcaaccttatcgttataacatttgcacatattttcttttatctggttatctaatttttaccacaaactcacaaatttgtcaagattgatgtcggacgattcacggttttctgtgaccttcagttactgttcactccgttctcagtaacacgcttcgcgatgcacagaatttatgctgatcgcataaattcgcgcggtatgtctcgggttttctgtgaccttcgctcacaaaaaacacctcgcgggacattaccagtgaacagtaatgaccttcactcacaaaaacagcccctttctgtcatcaccctgatatcagaaatggactgttttgctcataatcgataaactgctccgcagtttatctggttaaacggatattcgcaatccgcttcgctacttgctcataacagataaactgctctgcagtttatctgttaaaatactcctgctccaggtatctggctacgtagattccgctggcagatgcatgggaaagagagtgtgtcacgccgctgcagtctccgataacaaagagacccttgtggcaggtttccagattttcgtcgatctcaacctccatgttgtagaatttaacctccacgccataaagcaaagtatcgtcatccgcggttcccggtgcgatcttgtccagggcatagatcatctcgatgatgccatccaggatacgtttcggcataacaaggcttaaatctcccggtgtcgcagaaagtgtaggtgttacgaagctttcctcaatacgggcttttgtgcttcgtcttccgcggatcagatctccgaaccgctgtaccataacaccaccgccaagcatattggaaagtcttgcaatgctctcaccgtatccgttgctgtcatggaacggctctgagaaatgcttggataccagaagggcaaagtttgtattgttggtatgctttgccggatcttcgtagctgtgaccgtttactgtgataataccgttggtattttcattcacgacaacacctcgcgggttcatgcagaaggtacgaaccatatcctcaaacttctcagttctgtaaacgatcttgctctcataaagctcatctgtcagacggctgaaaacctccgccggaagctccacacggactccaatgtccacacggttggaaagagtcgggatcttaagctctgtacataccgtctccatccatttacttccgcttcgtcctgcggagatgatacagtaagttccctcgtaacgctcatctcctacaaaaactgcataaccgtcttcagttttttctactttgtcaacagatgcgtcaaaatagaagtccacatggtctttcattttttcatagaggttctgaagtaccacatagttgatatctgttcccagatggcggactgatgcatccagaagatgcaggccgttctgaaggcagagcttacgaatctcgctgtttgtggtagaataaagtttggttccctcaccgccatgcatcaggttcagtttatctacatattccatcagctctgtggctgtatccttgccgatatgctggtacagagttccgccaaactgattggtgatattgtattttccgtcggagaaagcgcctgcaccgccaaatcccttcatgatcgcacaggttttgcaatggatacaggattttactttctttccgtcgatgggacattttcttttttccagaggatgaccagcttcaaaaaccgcaatctttttctccggatcattattcatcagttcataggccgcaaagattccaccgggacctgctcctacgatcagtacgtcatatttcataaataaaaactccttatcttgtattgcacattttcagtattttgtttttgcacaaaccctgtctattttacaacaaacgtgttcaaaagtcatcgtttttttcgattttggaaaaaaaactcaatccttccggaaccttccgatcttaagcttttttccatctgtttccacggtaatagcaccgtttttcatggtgtattccacctgacttccggccgctttaagccgctctacggtttccggtgacggatgtccgtaggtgttggtagaagaacaggaaatgatcgccacttccggctttattttctcaagaaatgcttctgtggtagaataacgggaaccgtgatgtcccaccttcagacagtcaacatcctcaagccccccggctaccagaagctttttctctgtatctgcaccgatatctccggtaaaaagcatctgaaaatctccaaaagacaattccatcaccatagcttcctcattcacatcttttcctgtggcatttttctccggccacagaacagaaaaagatactttgccgcaaggcaattcatccccttttcctgctgtcacgaccttaactccggctgtttttgctgcctctgcaagctccctccatgcatctggtctttccgcccaggcaggcaggatcagatatccggcccggatggttgtaagaccttttcccatatattccagaagctccttcacaccgttgatgtgatcctgatctgtatgggaaataaaaatcccatccagccaggaaatcccctgacttttcaatgccggcaaaaggcagtatcttccaagctccgactggctgctgcttcctccgtcgatcagaaaatggtgatcctccggggtctccacaagaataccgtcaccttgtcctacatccaggcagatcaccttcaggcttcctgctggatgatatcccagtatcaggattccgactgccagaaaaataccggctgttatccggatagcatatagcttccggcaacctgcttccgcctgctcctctgctagctccgtttcctcactgactgcttttttcttccggagctgttcttttatatactgtcccataaacaggactatgatcaaaaagccataatataccaggatctgccatatttccggctcccctccgatccaggtactccatcctgattttcctgccagactgcagagatattcataaaaaagcagcagtacccttgccggcaggattaccagttttgccgcaggaatactgagaattcccagcagcagcgccgccattcctcctgtcagcactacccccacacttggaagcaccaacagattcaggataaatccggcaatagagacttctccgaaaaacttcagcatcaccggcagagtcacaagctgaagagctataggacttaccagtgcctttgtccattttttctccgctcctgcaagggcacagatcttttccgcagcgagccccattcccagaacacagccaaaggacagaagaaatccgctgtccaggagataggccggagattccacaaggatcatcatggcagttacggaaagagcactcatcatatcatagatccgtccggtgatcctggctcccatggcgatcaaaaacatagttactgcacgcatggtggaaacactccctccggtcatgattccatactgcagcatcactcccagagaaaaaatcccggcaggccagattcccagtcccatcttctttagaaggttgtaaagccccattcccagaatactgatatgaagtccgctgatggcaaggatatgtatgattccggccagctgatagcgcatctgtgtttccggatccagttcctgtttgtctccaagcgttatggcacaaaaaacaggcgcatcttttcctgcagcttccttcaggatctgtctgcagctttcttttatctccaaaaggagctgcctgtagccggaatacactgccgttttcttttggagcacagcgttcttcataaaataataaatatgacgacaggcgtaatattgttggctatcaaagccccccggattcgcaggaccttccactcttttcagtgttcccttgaccaggatccgcattcccggtttcagatcttcttcttttttgagaaatattcttacattttcaattggaaatttttttgactgatggataagatatgtttttttcagataaacagactgggaaaattctgtgttttcatactgttccacctccccgcagatcatggaaccagggtgcgcttcgatctgctcctgcacatttaacggaaggggattccccctgatcagaggaatccccataagctccagtgcgccaagactcagcaccataagaaaacacaaaagacacatcggccttttcgccataaatgttctcccgttttctgatattttgaaatgttttattttttctattcttttttagcctttgtgtgtgccagcaggctgtcgttccattcatagaacttataaagctgcatattctggccaaaggtcacttccttgtttccttcgatggaaatctcaactttgtccacatccgttgccgcgatcagcgtatttaccaccgaatacacggcaatctgttccgaaacatccagcgcataatcctgaaatacggaattataatccacatagcagattccgtttgctctcgtcagagaaagtacctctgaattctccggtattgtaggataatgtcctttttccagcggacctcttgcaagctgctccagaaccaccgtagccttcggaagatttcgtctgtagcggacacttctctgttccgctaccagtttatctccgtttttatttgtgaaatacaaagtaaaggtgtcatagctgtacacatccccatcggacccggaaaactccacaaaggtgtcgttgttcatggctcccacttcctcacccctggtatctgtcagcggctttttacccacatagatctccacagaatccactcctggaacctgtaaaaagatcttcactatacctgcccgcaccagaagttctctggtacgtgacattttatcataggcctcattgaattctacgttcaggactccatcctgtatagaataagaagaaatctttaccccatccggaaaaagtgagattccgtcttcccgggtctcacggttattcagactctcggaaaaattgcgcagcatcacttctgttgtttccttctccggagtatatttttcttctttcagtctcgtttcatcgctgttgatataataaaatctatactgctgttcttcgtttttatttcttcccgacaaacctatgaaagcaaccagaccaaaaaggatgcaggcagcggccacacagatgatcaaaatcgtttttttcatgctgtacctcctaggacgggatataggacagcgggatcttcacggtaaatgtggttccctcgccctctttgctggataccttgatgatcccatgatgcatggctatagaacttcttgtaatagcaagtccaagaccggttccgccgatctctctggaatgggatttatccacacgataaaaacgctcaaagatccgttcaatggaatcttccggtattcccaggccggaatctgcaaccgtcacatagaaatccttatgatccgcatccagtgttacgcggacccatccctcatctacattgtatttgataccattttcgaccaggttactgatggcaagggtaaatttcacctcatccacatctgcagttaccggtcggaacgaatccaggatcaggtcaatccttctctgatctgcaataggacggagacgcttcaggatattctccagcagctcattgatattcatattacggatattcatatctgctgcttttttgtccatttttaccagggagagcagatcggtgatgatcttgttctctctgtcaatctcttctgtgatatcagaaagaaattcctgatacagttcctccggaaccccctgctgtcctaccagcgaatccgccagaaccttcattgaagtcataggtgtcttcagctcatgagacacattggatacaaactcctgtctggattcatccaacgtcttcattctggaaagcatcttgttaaatgcatctgtgatcaaagctgtctctgtataatccggtaccgagatctcctcattctgatatccgtctgtaaggtcctcgattgctttcgttaccctggcaaatggcttcaccaagatcgtggaaagaatataccccagaaaaatggccagcactacaatgataccgatgatcagaatccctttctgctccagttcatggatggttgctgtcacctcactggaagatgccatgatcatcatggcaccctgcacctgttttacatccggactttttaccggaactgccaggatcagcttctggctgtcagaatcatattggtaggcatcttctcctttaaaacagttcaatactttctgggaaaccagagtcctgccctcatccacgccataggtatccttgatgatcctgaaatccctgtctacaatgagaatcctgccaccatagctgttagacagtaattccagcttgctgttcaccgtctgagagctggtgtcattcagataattctccttgatcagcaggtcgcacataatgtcacagatgttctccatgctctgcacacggttggcaatggcacgatcttcatagttggcaatgaccatttccgttacgatgacactcggtacgattcccagtatgatcaggatgatcagaatacgaaagcggagacttttgaaaaatttgccgttctttttgaacttcacaggttatgcctggaaatagtagcccacaccccatttggtgtgtacatatttcggctcactgggattggcctcgatcttttctctcaggcggcggatatgtacatctacggtacggacatctcccggatattcatagccccatacgatattcagaagattttctctgctgtataccttgttcggattgaataccagcagctccagcacatcaaattccttggctgtgaggttgatctcttttccggagataaatacgcggcgtccttcgcagtccagcttcagttctccgacttccacagtcttggccttctcctgcttgtcctgtttgctgcctgcacggcggatgattgccttgatgcgtgctttgacttccaggatgttgaaaggcttggtgacataatcatcagctccgtattccagacccaagatcttatccatatcttctccttttgctgtaagcatgatgatcggaacattggaaaattcacggatctgctggcatacctcaagaccgtccatttttggaagcatcaggtcaagaaggatgatatcgtactctcctgcttttgctttttccagtgcttcctctccgtcataggcacagtccacttccattccgtcctgctccagactgaagcgaagtcccttgacaatcagtttctcatcatctactaccaatactttcctgctcatttagcgctccttactttattgctattttatcctttatcttctcataggttccttctttgatgcctggtacattcatgatatcctctgctgaagtaaagggaccgttctcttccctgtaagcgatgatcgccagggccttggactcccctacacctgtgagagtagtaagctgggatacatcagcggtgttcagatcgatcttctgctctgtggaagatgcagtctcagcttcaccggaatcctctccggcggatttctgtccgctcgccgtttcggtactgttttctgctgtgacttccgatccatcctgggtagctgcgatccgctggctgtccacctccgcctgggtaggcacataaacctgctgtccatcggaaagtcccttagcacggttgagatagcttgctgcagcttccggaagatatcctccggcctgctcgatagcctgaaaaacacggctgccatatggaagctcatagactcccggactggtcactgctccacatatatctacataaatggtctgaggggtgtctgaaatctccggcagctgtttttcaacctccggagccggttcctccgcagactcattctgtttcttctgtgatatatctgccgcagcccctgcggatgccttcccggatacttcactttccgtatccttcggtttttcctgctctgcatccattccggatgcttccgtactttcttcctgcaccagttctttctccagaaattctgttccgtcatccttacagcctgtcagccctgccaggatctctaacaaaaatatggaaaaaacaaaccgaacacttctgatatgtgatcttattttcataggtaggcggttcactcctttccgccgatgtggcggcaggtgccccgttactcatgcaaaaccataccttattttaacgaagtattacaaatattacaatacttttatttctatttccatttgaaaataaccacacctgcaatacagatcagcattcccaacagctttctccactgaaaatctgctctttccacaccgaaaatccccaacaattctataagataggccaccgcaagctgagaaatgacaataagcataaccgcccgcgcaggccccagacttcccatactccggatcactgtgatagtgataaatgcaccgatcactcctccgagtaaattatatttatcctccacctgccacagcatgccgatactttctctgcctgtgaaaaaccatgctgccacacagaccagaaatgcagaaaactgtacccagccggttgaaacccacagactggtctgctttgttacatttgtgttaaataccccttgaatactcatcagtgcacctgagatcagtgctgacaaaaatccccacataaaaatccctccatacatgctccgtttccggtattactgcctgaaaaaggcgctgcatatttctgcaacgcctttacggtttcttatagtttagtttatgtgattttccagcaattatacacactgccgccctgttttctcatccgcataatatttatatgcatgatcacaaaacgctctttattcctgaaaatattttctgagatatatccttccggaaaacgcaatatgcggcatctcataaaaaatggctgtttccggacagatcggacgatagagcgggtctgccacaatgatcctggctgttttcaacttttcttccatggcttcctcgccacagatggcttcatctcccttgcgcaaaagtccctccgtgatctccagcggacagagcatctgaactttttttccgtatttctgctctatgactgctgccagggagcccatggtaaccggttctccgatgatggtaatgtccggtgcggaaaaaaacagctcatctccatcggacaattccctgctttctcctgaaggggccgatactgctgacagactgttccttccctgaaaatagatcacctgctccggagttactttccacagttcctcctgtttccctaagatctgccctccgctttcctctgtggagtcatccttcttatttacccactctccacaggatctatccgcgatccgctcaagtgcatctgaaatctgcccctcatagccttccacaggagtccccacgagaaatggcgtaccgaatttttctttcagcacattggccgccgggattcccacagaggataccacaaggtttaccgctgcttcatcggcacaggacaaagcttccagcgtatcccccatagcccaggtggaaagtatctcccagccatagtttttcagacgttttttcatggcatctactgcagactgcgggccaagatcaaggggggttgctccaagaatatttaatttccggtttctcttctctgtagatctttcagcagatcctgtgggtgcttctgaacaccttccggttttctctgcagctcctgtaaaatgtccggcgatctctgccagcgccagccctgctccgtatacatagtcatgcatgccgctggtcggaaccgaaaatgccgggattccgattcttgccgtaagtgcacgggccagtcccggaaaatccgttccattcataaaagggatcggagagcttgcaagtgcaataaatttcggtttcagctcctttgccgcctcttcgatatcttgaagaaatttctcatcatttcccataatggcatcgatatccgtaagacctgagataaagatcagactgtcctgatcgtaccaccggatctcatcatgggtattataggtagaattacagccggagggatcatgcatcactgtcattcctccaagctcatacaatgcagagcagacgccggacacgtctgccgtgtagatcggtatgatccgatatgcctgtctcatatgcagctttcgcacccccatccctttcgaacgatcagatcctccggagctttttcctcattaaatgcctccagcatcagctgtgcagtacgtctaatcccgtcaaagccccaaagcccgccaccctgtaccatattgacaaaattccgacttccggtaaaccaggctgctttttgtccgacggcaaggattttttcggaatgctgccgtggccgcactctcatctccgggcggacagtcgaaatcaacatgagttccgggtaattctccttcagccagaaaaatacttctttttcttccgggctgatactgtccagaaaaacggactgtacctgaaatccatgcgtaaggagaagctttgcaagtcccagaggtcttggatgaaaaagataatccacagctacgggagtgtcaccgatgatctggtgtgcatggaaaagagcttcctcgcattttcggatctccgtttcgatatccaggccatttttaccgccactttgctgatccagcagctccagcaaatacttttcctgcgtctctatctcctcatagtcaaagcttccgggcaggtataaaaacggccttccaagtctctccgcctgctgctgtactccgaattttcctgccggataacagttaaggatcaggcttccctctcccaggctctgataatcctcccaggtcttacaggccggtgcttcccggagacggattccgttctttttcaggatccggcagatatctgcactctcatccagcacaaaatcactgcccaggactgtgacacattccggatctgctttcctctccggtactgcatcatacatggcacggcgcagcttctgatccggagtcggacctgttttctgcatgacaggatccataaagcatcgcataaaaaagatctccggaaatctttcttccagttctccgtagatgcggtccagatcacttcccagaaaatgatgaagacacacggtaaaaagcagtactgcctttggcttctcatccagccggttcagaatatccgtcactccttcaatggtcacatcctccagatttccgcccagaagatccttttcctccacgatcacaaaggaaaaacggtctgccgcattcatctctgcggcagtcagcacaacgccacgcatgcagttatccgcacagacgtagatctgccttgcttccggaaccagcattcccgtatgtacgatattccagtttccatggactggtgaattaaattccagccccgactgaaagggaaccggaaaagaggcttcctttataaatatttctgtttttcccgaaagctctctgttaccaactctttttaacatgagccttcctccctgcatgcactcaggatctgctcggccagtgtccggtactcctctgccatctcacaatccggataggcttccagaagagtttttcctcgattctctgcttccaggaccagttcacttctggaaagcgttcccactacccgcgtatgaaaatcctctgccagctcccggactttttcttcctctcccggcacgttccgccggttcaggatcacgccgccaagagatgcatatcctctgtttctgaaattatccactgccatggcaatatttgcccctgcatggatggccatgttttctcctgaggtgatgataaataccttatctgcatacccctttcgcatgggcatggaaaatccaccgcagacaacatctcccagtacgtcataaaaaacaatgtccggtttataggtctcataggctccgttttccttaagcttctcgagagcagtaatgatacctcttcccgcacatccaagcccaggtgcaggaccgccggcttccacacagactacacccccatatccgatctgcaccatatccgtaagcttcagctcctggcgtttttcgttatacaactccagcacagtgggaactttttttccatgcctgagaaggatcgtggaatctgccttgggatcacagccgatctgcatcactttcattcccttttccgcaagggcagctgccacattggaaaccgtagtagattttccgatgccgccctttccgtataccgcaacttttatcattttctgtcctccgcttttgtgatcacattggaatatgccgttttggcggaaactccactgaggtggccgatctttccggataaggagctgatcacatcctgtggtgcgtcaatggcaatactgatgatattgatgcctttttcccggtaagggatccccattctcccgataatatattttcccgcttcatgaagaaaacggttgatatcatcgatcacgtcattgttttccacaatgatcgagatcaatgccactcttgtctccataagatctgactctcctttccggtattatcagcagatcctcggcagaagctctcctcccggctgcggaagaagtgcctgcgttccgatctccgtaatcatgacaacctttcccggctggtcttccgtaacttcaccgataatggctgcgtccctggaataaggacatttacgcaatgcttccacgatccttcctgcctcttcctttggtgccatgatcaccatgcgtccctcacatgccagataaagcggctccaggccaagcatgccgcagacaccctttacctccggagctaccggaacagctgctgcatccaggcggatccctacgttactctgtcctgcgatctcgtaaagaaccgttccgacaccacctcttgtggcgtcacggatcacatgaatgttatgggtggcatccagcacttcttttacagcttcccacagcggtgcgcagtcacttgtcacatctgcgtcaatgccgaaatcctctcttgccagaagaatggtgcatccatgtcttcccacatcaccggttacaataatggcatctcccggttttgccagctcaccgcctacctgaacgccctcctggatctcacccattccggttgttgtgataaacacaccatcaacctgaccttttcctgccaccttagtatctccggaaacaatacgcactccggcttcttttgctgttttttccatggctgcggcaatctcctccagcttctccatgggaaaaccctcctcaatgacaaaagcgcaggtaagatacatcggttttgctcccatacaggcaaggtcattaacggttccgcagatggaaagcttgccgatatttccccccggaaaaaatgccggagaaacaataaatccatcggtggatactgccatttttcctgcaggcggaaccagcacagccgcatcatcggctgtgagatccgggtttgcaaaatgcgttttgaatacttcatcgatcagttctgaggtctgacggcctccggcaccgtgtgccatggtcactgttttattttccataatattatcttctttctatgctgggtcaaaggaatttcatatcggtttcatcctgtcagatcttccggatacgatccttcgtttgtactatatgtaatgtatcatatttcgcagtccattaaagcggacatcagtttccgtacataaaatatgcggaacatgcaccttcattggataccatacaggcacctaccggatgctgcggggtacagacctttccgaataccttacaatctgatggtttgcatttcccctgaagcacatccccacagcgacaggccggatttggtatgccctggatcggcggcactgcatatttttttctggcatcaaaggcttcccactccttccggagcaccaggccggaccccgggatcacacccagaccgcgccattcggaatcacagggctccatcagttcttcgattagcttctgtgcctccgggcttccctcactttttaccacacggggatagcaattcacaaagaacggttttccttcctgaaaacgtaccagtgcaacagccagtgccgtaagcagctccttcgctgtaaagcctgccaccacaccactgatgccttcctctgccagctgctcgcagagcgcagttcctgtgatcgcattgacatgtccaggataaaggaacacatccgcactgccctttaatgcctgataagcctggggcatggtcttgtttgccacaaggagcgaataattggaaagtccgtcctctccggcctttttcacggaaagacagccggcaggcgtggtggtctcaaagccaacggaaagaaataccacctgctcttttggatgctctttcgcatatttttccgcatctgccggtgaatagacgatccgtatcctggcgccttctgccctggcatctgcaaggcttttctttgttcccggtacgcggacaagatcaccgaatgtgcagatcgtcacctgttttttcagagcaagataaacggcctcgtcaataaaccctaccggtgttacacagaccggacatcccggtcctgagatcagctccacctgcggcggcagaagcttgcggatccccagacggaagatctcgtgggtatgtgttccgcagacctccatgatccgcaccggcggcccctgatatccttctatgatctctcttgctgtttttttcctctcttccatcacagcagttcctccattagctggtctgtctcttcctcgtcatcatcggtgatctttgcaatggcaacacctgcatgcaccatcacataatcccccggctccaggtctcccaggagctgggcggaaacctctctctttgcaccgcctgcatccaccactgctgttccgtcactgatctttactacttttgctgataatcctacacacatatctgtgcctcccatcctgcatttctgctgtatgctccatgcgttatcataaaacatttatgatccgtatctgcatgatctcgtctatatttatctgtgccgctgcacataagccatcccatacaccgcctgtcccagtgcgatccctccgtcattcggcgggatcaggctgtgcttcagaactttaaaccccatttccgtaaggccgtcatctaccagctccagaagcagccggttctgaaagacaccgccacttaatgccactttccggattccggtctgccgctctgcttcctcacaggctgcaaggatctcatctgccagtgcccggtgaaatccataagccagcttcccgggatcctctcctgcaagccttgcccggaccagatatgcaacgatctcacctgtatttaaaataaattttcgttcatcttcagacgcttctgagatgcctgtgccttccggaatgtcttccttttctgacatccgtatcttcagattttcttccggatttttcttctgcatctcccgctgctttctccaggcctccgccgcaaattccagtgctgtggacgcttctccctcaaaggtggacgctctccggatccccaggatcgcactaactccgtcaaaaagtcttcctgcactggtggaagtcacggcattgatcttccgctgtgccatagtcaccagtacctttgcttcctggtctgtgcaaagtcccagtttacggacagtgttcagggttctttccagatctcccgtattctgccagatcagggaaacggcgatccgccagccttcttttgcagaaatatctccgccaacctggacaaagggttctatacttccaaaccttgtaaatccctgacaatctgcggtcaggatctctccgccccagatggttccatcggttccatagcctgttccgtcaaaggaaacccctatcaccttttctttgcagtcattttctgccatgcaggataaaatgtgtgcataatgatgctgcaccctcagaaccggaagccctagctcctctgccaccactgtggaattatatttagggtgaagatcacagaccactacctccggctgcacctccagaagtgtttccagccgcccgatcgtttccttcagggcttttaccgttcgaagatcctccagatctcccacataaggggaaggataaaaacggttatccacaccaatgcagaaggtgttcttaagttctccacctgctgcgatcacctggcccttccagggtgtggagaccataaacggaagaggcgcatacccgcgggaacggcggatcatatagggttcacccttatagaaatccatcaccgaatcgtcggcccggatacgtatcttcctgttgtgggaaagaatgcagtcacagagatgggaaagctcctctgccgcctcctcatcatctctgcagatcggcgccccggaagtatttccgctggtcattaccagaagcccgggcatccggatcccatcatcgtaatgaaaaagaagcagctgaaccggtgcgtagggaagcatgacacccaccttgggattcccgggtgcaatgctctcacaaagcctcgtttctcccggcagcttatccaacagcaggatcggcttctgatgaccggtaaggatcttctcctgttccttgctgacctgacagacctccttcacagcttccatatcctgcgccatcactgcaaaaggcttcaccggacgccgttttcgctgccgcagccgctgtacagcctcttcactggtagcatcacagcaaaggtgaaaaccaccgatccctttgatggccacgatcccgccggaagcaatgatcttccttgtataagtgatagcctcccgcccccgttcctctcttcccgccaggtatacatcagggccgcagtcattgcagcacaccggctgggcatcataacgtctggtatccgggttatggtactcatctgcacaggagggacacatgggaaattccttcatactggtccgttcacggtcataaggaagtgaatccaggatggtcagtctgggaccgcagcaggtacagttgataaagggatgcagataccgcctgttttccggatcaaacatctccgccttacattcatcacagatcgcgatatccggggagacaaagatttccccctttgtcttctcactttcgatgatatcaaactgtgtaaatttctccggctcctccaccggttcttcaagaagcttcaggatagctgcacgcttcggtggcttattcccgatatctgcgataaaggcatccacatcctgctgcttaccctgagcaaaaatctccacatagggtcctttattggacacactgccacggattcctcttgccatagcatgacggctcaccgtagggcgaaatcccactccctgtacgatcccgtaaacacggatcattttcgtaatttcccgctccatatgtttctccattccctgcagctgtttccactgatccggctacagcatgcatgtaactttatgtcctgcccttatggactacctgcattttccggataccgcaaaatgcactgtatccacaaacactcctgaaaaagcctttgtcatccgcttcatacatggatctgcaaagatcacgtcatatccgcccttctctgccagttccatgtgatcttcctcatcccttaatgacacatcgccctcctccaggagatctttttccatggaaaaccagcttgccacggtgatctctccgtccgcaccacgtttccgtagctcctctcttatggaaccggccatcacctgctgctgcacgatgagaatcttttttcctgtataatccatatcaggaaccagctcttccgccagaggatatcccacctcataaggtgttccgaaggttttctccagatatctggcacattccagtgccgcaggagaaaccacgatatttttttccgcagaggaggctttttttacctcatcaagcccgtctcccattccatagcagacggctctctgtcctctggcacggaatttttcacggatcttgtctgctgctttcaggtcactgacatcctgaggtgtcattccgagaactcctgtcttaccagcctccacaggcagcttttcccgggcaaaggctttaaaaagctccagataagccttccgctctcccgcatcataaagctccattccgttggtatttaccgtaagcaccggaagatctgttttcttctcgcacatccgccgcaatgcctgatgatccgttccgatcacagccggtaccggtgttccgataatggctgcaaagcctgcctccacctttactgctgcatccacaagcttggcaacaaggcggtcatcccgtcccaggatggcatccatatcccgaagtcctgcgctgaataccgcgcttttctgttcaaaccatcttggttcatcaaagccgcagacatttcccgcacatcctcctgcatcacagatcacgatgatcccgccaagctcatacagcactgacacggctccggactgatccggtgcaaagggtgtcagatatttccgaagtcctctcataccttttctcccttctgcaaaactttctctgtcagtgtttcaaacagcctgcgtacccccgcatagccatagggctgccgatcctgattccacacggcatttggctgatcccggtgataatatcctgcatcctttcctatggtaaggttcactccgctcccggacggatcgtaatacagcatggtgggttccatattggaaaaaacctttgtatccggactcaattccgcaagatgccgtatgtatacaaaattctcggctgtgatagttccgtagatctccggcacccggaaaccataccgcaccagggccagggccagctcaaagggatctccgttcatgcactcccctacagcaaaagacgcatccggacagacctcccggaatcgctccactgcctcttctgctgcttttttatacacttcctgatcaaaagagactccaagaacctgtcccaaggcacgatactgattttcgatcttatctgtctggtagagcctccgaagctcaataaaaggaatcttcagccggtcatgaaaatcctcccctgcaaaccttgcttccggatgaagcaccagattaaaattggcctgtgacatggtctgatattcttcataatccttacatcttgagatttcatggatggtctttacgcctgcctgctgcagcagctcatacatctcgcagtcatcaaccagcggcgaaaaaaatcccagaagattgaccacatttccctttttcttctgtggctcaaggagggaatataaggactggcgcacatggaccataggcggctttctgccctcacgtgtcagtgcgtacatgtaacagggacgcaccggaatatccaccttttcctctgccttccggcagacacgttccatatccgttcccagaagtgcatccacacaggtgatacagatcatcaccacagacggcttcttctcacagcagtcgcagatctcttttaccgctttcgggatctttttcaggtgacggcctgtaacaatatccgtctcgtccatcatcagataaaaaaatcgatcattgtactccggcatggagctgataagagaagtatttcttccgcagcatcccggtgccacgatcagcataatggaatccggcactgcaagcccggcccgctttacgccaaagccctccgctcccggagagttaaatgccagagttgccggagagctgtagatcagatgcttcccggagatcatctgcggaggaatcgcttccagcccgccccgggccagttcttctgcagttgcaaaatatgcttcctttttcatatatcctccttctccgcctcttcactttccaacagcttcctggccagtgcaaaaaatttctcactgatctcagaattctcatctccctcgatcaccgttttgccctgatcctcccatcggatgatctcgtcacttctcgggatctcacccacgatcgggatattatttttttctgcaaaagcatttactttttccgtttcattctccacattcctgtgattcagcacgattccgaagattctcgcatagcttcgatcctcaaaattccgcacagcactggaaatattattggctgcatagagtgccattttctctccggatgtgacaatgagtactttttccgcatagccctcccggatcggtgccgcaaaaccgccgcatactacatctccaagaacatcgtaaagcactacatccggcttccaggtctcaaaaagtttcagatcctccagaagctgaaaggttgcgatgatacctctgcctgcacagccaagtcccggcgtggggccgccggtctcaatgcagaggactccaccaaagccctcctttgaaatatcctccagcttttccggctcctcatcctcttcccgcatataattcattaccggccgcagaggttctccaccaagaagattgatggtagaatccgccttgggatcacaaccgatctggatcactctcttccccatggctgcaaaagccgccgccaggttggacgtcactgtagactttccgataccgccctttccgtatactgctaccttcagcataaaatcctccctaattcattctgttcgctcccgcaggtatttttcataaaaaaagctctttcacgcacaaggtgaaagagtcccgtattccgctcacaaaacaaagtcaagcggatattcgcgatccgcatttgctgcttgttcataaccgaataactgcttcgcagctgattcggttaagctgtgccggatgaacaacgattcctgctcggatattccttgccgtcaaagtctgtttcctgctgtattttgttttaatgcctcatccggatagaaagaaaatatttcgttccgtctgaatttttctgtttttattatacaatggtgtacattagtgagtcaattgcaactctgactttttatacaaaaaaagacccccaggcgaaatatttttaagcatttcgccgagaaggctcttctctgatctgccggctcagaagccgcggcaaagttattcttatgataaagctttactggatagaaactacgtgatatcctctgtcttccactaccttcttaagttcttcgttggagatctctctgtcgtaggaaaccactgcctcaccttttttcaggcttacttttgctgccgcaccgtcaatgcggttgatcgctcttgtgacgctggccacacagttctcacagtgcatgcctgtgatcttcatggttttctcacccagcttggttccatccagcttcttcttcgggatctccggcttgctgccgcctccgcagcaggcgccttcgcccttcagatgtttatatgcgccttttccggcaaacagcataatgatgataacaacgatgacaacaattgcatttgccatgatttctttccctcctggttacttatgcattccactgcagccggagcagccggaacaatgaccggagcagctgccgccacagccacctgtacgtgtgttaccggcacagccgacacagctgagcccctgtttctttcttgaatagagataactgaccacaaatacgccatatgcgatcaccagtgccagtacaataatatccgctatcatactcatatctgtcaccctttctttcgctgtacagcctgagaattgctgtcagcctctgatgaatacttttgtaaaaaaacttccatatttcttcaggcttattatagcacagaagaccaggtatttacatccccggtctcctgcatttcttatcatttcagctgttcttacagcatcatttcaaagctatcatatgtaccggatcgttactgtatgaccggttttcaattactctgctgcctgtacagatctctttgtaacatcgttctggttcttgtacggatctggtctgaacagaaggaagagcaggatcgctgcaaggatcagcgctacgatcgttccaattccgaaggaaccggcacctgtgacaacaagaccgatctgatatacacaaagtgttacaacataagcaaaaatgttctggaagagaattgcaaaccagaaccattttctggactgcatctcatgtgccattgtagaaatagctgcaaggcacggagagtcaagcaggttgaacagcaggaaagaaaatgctgctactgctgtcgggaaccatgctttgatcgctgcaccaacgatcatggtatcctctgcatcatcaccagctacgtttgcaagaacacccattgtacttacgatggactcttttgcggagaatccagagatggaggctgcaaccggctgccatttgccaaatccaagaggagcaaagatcggagcaaggataccgccaaggatagccatgatactgtcgttgctgtcctcaacaaatccgattccgcttcctgtatttccgatactggaaaggatccacatgataacggttgcaaggaaaagaatggtaccggctttgatgatgaagcctttcagtctctcccaaacatgaagcagaactgtctttacagacggaatgtgatactgtggaagctccattacgaacggagcaggtttaccggagaaaggttttgttttcttcaggatgatcgcagatacaagaactgctacaacaccgataaagtacatcagtggtgtgatgaaaccagcagctacgtagtcaccggttgcataagcagtcatgataccacccataagggcgataaccggaagcttggcaccacatgggataaatgtcgctgtcatgatcgtcaaacgacggtcattatctgcctcgatcgttttggaagccatgattccagggattccacagccggaggagataagaagcgggataaagctctttccggaaagtccgaaatgacggaatacacggtccatgacgaatgcgatacgaaccatgtaaccacagtcctcaaggatggaaaggaacaggaacaggatcgccatctgcggaacaaatccaagcactgccccaagaccaccgatgataccatctgatacaaggctcaccagccagtcagcaacaccggcattgccaagtccatccgatacaacaccctggatggttcccacaaagctgtcgtttgtccagtctgttaccatggtaccaactgttgttaccgatacataataaacgatgaacatggtaaggataaagatcggaagaccgagaatacggtttgttacgatacggtcgatcttatcggaaactgtcatcttatttccgcttctcttaacgtttgcagaaacaaccttctggatgtactgatatcttccatccgttacgatactctctgtatcatcatcctctgccttctcaaggccagaagcaatctcctcgatcctggactgtgcagaagccggaaggttcagaccttcttttaccttgctgtctctctcaagaagctttactgcataccatctcttgttctcctcagcgatgtttgcaggaacaaatccctcgatctcatttacagctttttctactgctttcggaaattccatctgcttagatggtactctgtgctggttcgcacatttgattgcctcatcaacaacctctttaaggcctgttcctttaagagcagaggtctcaacgatcgggcatccaagcgcggagcttaagccttttacattgatatggatgttgttctttttcagaagatccaccatattaagagcgataacaaccgggataccgatttcaagaagctgagttgcaagatacaggtttctctcgatgtttgttgcatccacaagatcgatgatcacatccggtttctctttcagaaggtaatcacggctgacaacctcctcaagtgtatacggggaaagtgaatagatacccggaaggtctgttaccgttacatccttctggtttttcagcttgccctcttttttctctacagtaacacctggccagttaccaacgtactggtttgcgcctgtaagagcattgaacattgtagtcttaccacagttcgggtttccggcaagagctattgttacagacattttgcatcctccttttttcagatcagagcctgacgctctgtcatttttcgaagcttatttactttacttccacacatgctgcgtcatgcttacgcagggaaagctcataacctctgatggtgatctcaaccggatctccaagaggagctacctttcggatataaacctcgctgccttttgtgattcccatatccatgatacgacgcttgtaagccgggtcgccggtgatcttggaaacaactactgtagaacctactgctgcatcacgtaaagtcatttctcttttcctccctgttcatattccaattcctaatctatcctcaactgcgccttccgcagtttggggcaaattcactaccggtcactgcctcgcagtccggtcacaccataatgtgtctggccatttccttattgactgctactctggaatccttgacatttacgatcagattgccgtcaaactgagaaataactgtcacttccgcattctcaacaaaaccaaggcctgcaagaaatcttcttgtatcctccgctccggaaatacgcttgatcgtgccagtatcacctgactgtaaaaataaaatcggctgcatggaatccctccgtttctttctattaattaactcagtctaattagtcagccctaactcataggttagtttatactaagttttttcgaatgtcaatcccctaaatgaaaaaagttaatcaagattaagtttttataaacaaaatataaaaaaagttcctacattctgaggtatttctgtctggcagaaggttacctcagaatgcaggaactctgttctgattctttttctgtttgcagcctgttaagctaaaaaccccttccggaactttttctttcttccgtgctgctcatatttttatctcttagtggatctgatcattcaaaagcttcaggatcagattctccgtttcattgattccgtagcttgcactgttgatacaaagatcgtagttatccggcttgccccactgagctccgccgtaaaaattgtaataccgtctgtgctggctgtccatcttcttcaggaaacggactgcctgcttcatattcatcttccttacatccataacatgctgcacacggatagcaaaaggagctgtgataaacagactgatatgcggaatgtgattgttcttgaggatcgcatccgcacaccttcccataatgatgcagtcctcttttgaggccagatcgcagatcaggtcactcatgttaaagaataccgcatcctgtttcggaagaccatggtaacggttgaattcccggaaccagcccttgggatcaaatttatgcttcttctcatatttattgaaatccgcaaaatattccgcatcgttgaccgcgcccttttccgcctcaagacgccttaatacctgatcaaagatctccacatcataatagttgatccgaagcttgtctgccagtccgaaaccgatatcattaccggcacttccctgtgtacggctgatgcagatgaccagatggtcattctcagagattttttccctccgcttgatcatatgattcagtgccacacgttccttatccatgatatccgtagcaacaaaagtctctggcagcgtcaggatctcctgaaagatctcatcatatttcttcatgagacggcttttttcttctttatccttgatggttctggccatgttgctgatcagtgccatctcgcttcgaagaagatgtccgtccggtttggtatacatcagagcacttaagttccggatagtgccttctctgtcaccggtgaaggtacgtccaagggaagatcctacgctttcataaacctcgccatccagttcataaagcctggtggcaagttctctgcatttctctcgaatgttattatcctgcatattgatcctcctcccttataaaaagaataccagcatatcgatgatgaacaccggtaccaggaaacaaatggaccatgccatatatccgaagaaggacggcatgttgataccattttcgtcagaaagtgtcttgaccataaagttcggagcattgccgatatatgtattggcgcccataaatacagcaccgcaggaaatcgcagaaagaagctttacaggaaccgttcccagcgttgttgcgattccgtttgtaaatccgagagttcccgctgttgtcagaaataccagataggtcggtgtattatccaggaagctggacaaagctccggtcgcccagaacatctggtacggctcggtgataccgagattcggtcctactgctttcagaagcatcagggccggctgcatggtaataaaaataccgatgaaaagtactgcaacctccttgatcgcaccccaggtaaaatggttccgcacacggatccttttatccgttgttttaaaggacagaaatgcagctgccaggatcaggacgatctcaatgatcgacgggaagcttaaagtaacctcaccgaaaatatgaatcccctttacatttccggctgcatcctggaatgcaggcataccgggaagcattccacttaagataacacccacaacgatcatcacaaggaagatgatattatgaagaccctcgatcttaaactcggtacccggtttgctgatatccggtttacgtccctctgcgatatccttcttgtaagagcgcatatccagatgatagaacacaaacagaaggatcaccatattaaagataagtaccggaaaaagatgaaggctccagaaaaacggaactcctcgcatgaagcccatcagaagcggcggatcaccgatcggtgtcaagcagccacccatgttggataccataaagatgaaaaagatcatgatatgaccctttctctttctccaggaattcattttgatcaccggacggaccatcagcatgctggctccggtagttccgatacagctggaaagcagggttcccagtgcaagaagtcctacatttactcttggcgaacccgcaaaatcaccctcaactgtaatgttaccggatacacagaacagtccgaataacaggatgataaatgtaagatagtcattgatcacgcactcaagtactgtttccgcagtttttccggcaccgtaaacaactgcaaacggaatgatcataagaacgatccagaatgcaaccacaacgggctgatgtgactcccaccactcaccctttaccagcggcatcactgcaacacacagaaggaggcccgcaaaagggatacaaagccacaccggcacaccagatcctgtcccaccgtttccagctgcccatacacccacaggacatgccagaaatactgtcagaaaagtacacatgacggttaataattttttcaaaattttcacccctcacataaaatttttttaccagtgaaattataacatatggcgtcctaaaatcaactgtgtagatgtgcaatttatactcgagccctctcgcttttttgtgcattttgtcggtgtgtcatagcagtttttgtttgttttcaaacacacgaccagattttcggatattgttttctatatctgttatataatttatatatattgtctctctgacaaaaaagcagccgtattctccatcggtacactgccctttccggaaaatactgctgcttttgtatctgttatttttttattattccatacactcgtcaaggatctctgccatcttgtcgatatcctcttttgtgatcacaagaggaggaacgaggcggagaacatcacttcctgctgagatcaccagaaggccttttgcaagagcttttttcaccacgtctcctaccggacgtcccttgatcacgataccctgcatgaagcctttgcctcttcttgtttctgcacagtcatgctttgcaaccagttcgtccagcttctcctcaaaatacggagtaagtccctgcacatgggaaaggatctgatctttttcaaaaatgtcaaataccttgctgacggctgcacatacgaagggatttccaccgtaagtggttccgtggtcgcctggcttcagggaggctgcagctgcttttttgttcagcacaaaagcacctaccggaactccacagccaagtgctttggcacaggtcatgatatccggctgtactccatatgcctgccatgcaaaataatgtccggtacgtcccataccgcactggatctcgtccaggatcagaatgatatccttctcatcacaaagcttacgtaagccttccagaaactcttttgtagccggataaatacctccttctccctgtacggtctcggtgatgatggcacaggtcttatctgtgatctgagcctttacactctcaagatcattgaaatctgcaaatttcaccccacccatcagcggctcaaagggttctctgtaatgtgcattgcctgtcacggaaagagcgccgatgctgcggccgtggaaggaatggttcatggcaatgatctcatggtctgcatggccatctctttcgtaggcatatttcttggcagccttcagagcaccctcaatggcctctgtaccactgtttgtgaagaaggccttttccatatggcttgcctgtacaagtttggcacctgcctcaatgatcggctcattgtagtacaggttggaaatatgcatcagcttgtcgatctgggatttcagtgcttcgtcatagcccggataatgatagcccagggcatttactgcgatacctgccgcaaaatccagatattcctttccttcggaatcatagaggtaacaaccctcgcctttttcaaaaactactggaaaacggttatatgtatgaagaatactggcttcagattcttccatctgttcattcatgctcattgtaatatttctccccatcatcttttaaaattgcagtaccaatacctttgtttgtaaagatctcaagcagtaagctgtgcgggatccttccatccaggatatgaactctgtttacaccatgctcgatagcatcgatacagtttttcagcttcgggatcataccgccgcccacagtaccatctgagatcagattctcagcctcatctacacgaagctcggagatcagagtggagggatcatctgcatccctgtaaacgccctcaatatcggacaagaaggcaagcttctctgcctcaactgcctctgcaatggcacaggctgcatcgtccgcattgatattgtaggaatcaaaattttcgtcaaagccgatcgggaatacgattggaaggaaatctctttccaataggtcatgaaggatcttcggattaacctttgtaacctcacctacgtagccgatgtcttcgcctttggaaagcttctttttgcactggagaagaccgccgtccttaccgctgacacctacagcctgtacgccgagagattctaccagagtaacaagctccttgtttacttttgcaagaaccatctctgcgatctccatagtgtctttgtccgttacacggagaccgtttacaaaatgcggctccatgccgactttaccgacccagcggctgatttccttgccgccgccgtgaacaatgatcggtttgaaaccgactaatttcagaaggactgcgtccttgatgacgttacgctttaattcttcatcaagcatggcgcttccgccgtatttgatgactacgatcttgcggttgaaccgctggatatatggcagggcttctatgagcacctctgctttgtcaagatatttctgatttaccatgtgggtgtctcctttttttgaaaaatgatatggggtgaaaaaggttttgttgttgtgtgttggacggatttgttttttattataattttgtctcagctgacagctgtgggatttgcgaggaggggaagcactcggagttccgaaggccgtttcccctcctcgcgctcctcccctccggccacgggaaacgggctgttgcccgcgttgcgggcaaagcgcctgatacggacagattgcgttgcatacttctttttttacggacaggctgctgcaagcagccgcttccgacgcgctttcgccgaaggcgaacagctcgtcaggcagtcttcggcaactgacgtttaatacgacataacttccgagttcccgccctgaggttcctcacattcgtcactcagtcttcgtcgactgacgttcaacacaccacaacttccgagttcccgccctgaggtttctcacgctcgtcactcagtcttcgtcgactgaagttcaacacaccacagccaagcgtgcccaacggagggggttcttagggggagcgtgcgggcttcgcaactttgagctcgctccccctaagggttttctcagcttacaaactgaaacaaaactacaactaaactccaccataaaaaccattctacagagttcttacatcaagaacgataatccgcattgatctttatgtaatcataggtgaggtcgcatccccacgcagttgcggatgcatctcccatcttcatatccgcgatggctgtcactgcctcttcagagaggatcttagtagcttcctcttcgctgtagcctgtagaaactccattttcaatgatcttgatctttcctgctttgctctcaaagtaaagatctaccttttccggatcgaactggacgccggagtagccgagggcgcagaggattcttccccagtttgcgtcgtggccgtaaatggctgcctttgttaaggaagaggttactacggatttacttaaggttacggcttctgccttggtggctgcgccgatgaccttgacctcgaagagtgcagttgcgccttctccgtcacctgcgatctttttggcaagggttgtgtttacatagttaagagcttttttgaactcttcataatctgcgtttttctctgtgatcttcggattgccggcctgtccgtttgcaaggaggaggacggtatcgtttgtggaggtatctccgtcaacggataccatgttgtaggtgtccttgatatcctcgctgagtgcttcctgaagaagttcctttgagatatccacatcactggtgataaatccaagcattgtgcacatattggggtggatcattccggagcccttgcacataccgcctaccgttacggtttttccaccgagctcgatctctaccgctgcctctttcttctcggtatctgttgtcatgatggcttttgctgcctcaaggcctgcctcgcggcttcccgcaagcttcggtgccatggcttttactccgtttgcgatacggtcgatgggaagctgcattccgatgacacctgtggatgctaccagtacgctgtcttccgggatcccaaggctttcggatgctgccttggctgtttccctgcaatagccgaatccttcctcgccggtacatgcgttggcgattccgctgttgcagatcacagctcttgcacccgggtgattatatacaatgtcctgatcccatcttacaggagctgcttttaccacattggtcgtgaaggttcctgcagccacacagggaacctcactgaataccatggccatatcggtacggcctttatatttgatctctgctgcagttgacgctgccttaaaaccttttgcggctgtaacgccgccgtcgatgatcttcatattatatatctcctctcaatggtgatgccagatcgaatatcgcagttcattcgtttaaagtccttcggcatcccccatattttatttgtgatctgcctgttttacgggcacatcgggatctgtttcagtccttcgttctcgtcaaatccaaacatcaggttcatgttctgaacagcctgtcctgctgcaccctttaccaggttgtcgatagcgcccatcatgatgactctctttgttctcggatcgatcttgaagttcacgtccacaaaattgctgccttctacatttcttgtctgcgggcatacatccttgttcaggacacgtacaaagaactcgtctttataatatttgtcataggctgcttttacttcctcgtaggtaacatccttggtcagggaggcatatgctgttaccaggattccacggttcatcggaacaagatgcggggtaaagttgatcatcacttcctgtccgcatgcatatccaagctgatcctcgatctccggtgtatgtctgtgtgtggcaacaccgtaagctttgatgctctcgtttacctcacagtagagattcggaaccttggctcctcttcctgctccggaggttccggacttggcatcaatgataatggtattcggatcaatgaggccttcctttaacagcggataaatagacagtgtggagcatgtcggatagcatcccgggttggcgatcagccttgcctttttaatatcctcacggttgatctcgcagaggccataaacagcttcctcgataaactgcggagccttatgctcgatcccgtaccacttctcatattttttcacatctttaatacggaaatctgcgcttaagtcgatcaccttacatttggaaaggatttcttcattaataagggatgcacaaaggccctgtggtgttgcggtaaagatcacatccacctcatctgcaagtgcagccatgttgtcatccatacatttggcatccaccagcctgaaaaaattctgataaatatctgcatactgctgatctatgtagcttcgggagccgaaccatttgatctcaacgtccttgtgtccaagaagaagtcttacgatctcatttcctgcgtatcctgtcgcaccgataattcctgctttaatcatctttcacattcctcctctgccgttttcctacggcttaatacaccctgcagaagcgcttgttattctttatttatgtttcttttttatgtcttctgatatctgaaccttctgcacaggtcagacggacatcttaaacctgtctgtactgccagctcatatgtccatcttatcaatggatagattatacatcttctctgcatattatgcaatagtcattttctttgatttttcacggtcttttctgtttttcctgtattttcttataatatcgtctacttttagatgtatttttatgcaaattttttttcatatttttcaaattatctcttgcatatttataaaatctggtgtatattaagccatgtcgacaggacagccgaaaattttgttttgttgtacatgaatatttattcactctggtaaagttataaaacagcataatttttttccagataacgtaaaaaaattcaccgtcccggaaatgtccggagcgatacaaaatcaaaaaaatcccaggaggacatatattatgaaagaaaaagttgttttagcgtattccggtggtcttgataccacagccttgatcccgtggctgaaagaaacctttgattatgacgttgtctgctgctgtgtaaactgcggacagggaaacgagctggacggtcttgaagagagagcaaaaatgtccggtgcttccaaattatatatcgaggatatcgtcgatgagttctgcgatgatttcatcatgccgtgtgtagaggctggtgctgtatacgagcattcctatcttctcggaacttccatggctcgtccggtcattgcaaagaagctggttgagatcgcacgtaaagagggtgccgttgctatctgccacggtgctaccggtaaaggaaatgaccagatccgtttcgaacttggcatcaaggctctcgctccggacatcaagatcattgccccatggcgtatgacagatctgtggaccatgcagtcccgtgaagatgagatcgagttctgtaaggctcatggcatcactcttccatttgatgcaagccacagctacagccgtgacagaaacctctggcacatcagccatgagggacttgagcttgaggatccatcccaggctccgaactatgatgacatgcttgtattaagtgtaacacctgagaaggctccggataaagaaactgagatcaccatgacattcgagcagggcgttccgaaaacactcaacggaaaagcaatgaaggtttccgagatcatcacagagctgaacaagcttggcggtgagaacggcatcggtatcgttgatattgttgagaaccgtgttgttggtatgaaatcccgtggcgtttatgaaactcctggcggaacgatcctgatggcagcacatgaccagcttgaggagctgatccttgaccgtgagacaatggaagccaagaaaaagcttggcagccagtttgcacaggttgtttacgaaggaaaatggtacacacctctccgtgaggctatccaggcatttgttgaatccactcagaaatatgttaccggtgaggttaaattcaagctttacaaaggaaacatcatcaagaatggtacaacctctccgtacagcctttacaatgagtctcttgcttccttcacaaccggtgatatgtatgatcatcatgatgcagacggattcatcactctgttcggtctgccgctgaaggttcgtgccatgaagcttgcagaagttaagaataaccagaatcagaactaattttgttggacattgttccgacagatcataagaatgccccgggaagctatataagttccccggggtcttttgttatatactgctttgatcacataatacctaataaacgaaaggattttttatcatgaactcacagaaaatgcctctgaaaaattctctctgcctgcttctggccgcaacgatctggggaatcgcctttgttgcccagagtgtgggcatggaatatgtcggccccttcaccttcaacggcgtccgttccctgatcggcgccgctgtcctggttccggtgctctttatcctgaaccgttccggaaataaatcctctgctgacacagactccgcaataccggaatcctcatcagcaccttcagaaaaagcggcatcccccacgccatataacagccgtgacctgtggctgggcggcattgcctgtggatttgctctttttgctgccagcagcttccagcagtttggtatccagtacacaacagtaggaaaagccggcttcatcaccgcctgttacattgtcatcgtcccgatcatcggaattttcctgaaaaagaaatgcagtccctttatatggacagccgttgtcatggcactggtcggactttatcttctctgcatcacagacggattttccattggcctcggagatattctggtgctggtatgtgcttttctcttttccctgcacattctggtgattgactatttttccccgaaggcagacggtgtaaagctttcctgtatccagtttcttgtctgcgggatcctgtccatgatcccggcacttattctggaacatccgcagatttcttccattcttactgcctggctgccgatcctgtatgctggtgtgatgtcctgcggtgttgcctacaccctgcagatcgtaggccagaaaaatgtgaatcccaccgttgcttctctgatcctttctcttgaatcctgcatctccgtgcttgcaggctgggtgctcctggatcaaaagctttccataaaagagctccttggatgtgtcatcatgtttgcagccatcatcctggcccagctgccggaaaaagaaaaagataataaataaaaaacaggcagccggtttggtattttaccttccggctgcctgtctgcatgtttcttagtctgctgtttcttccttcttaataaagttattataatgtgccttgatcttctcaaagctctcctggctgatgtcgtgctccatcttgcaggcatcctccattgcgatttctgccggaaccccaagtccctccagcatcctggcaagaacaatgtgacgctcataaatctgattggcgatctccgcccccttctccagaagtgtcacggtaccgtaacggtccatggcaatataaccatcctcacgaagaagcttcattgcgtgactgacgcttggcttggaaacaccaagtctggtcgcaatatcaatggaacgaactcctcctccttttttggataaaaccagaattgattcaagataatcctccgctgactgtctgatctccatataaaatcctccctgcaaaaatttaactctatatagaccctctaaagggacctgaagcccattctttccctgttctacaggcgaatattaacttttaatataccgcttaaaggatgttgtgtcaagcatttcgcacatgtttatcttgacattaaaaataatttccccgataatagtagctgaacaatatatctgttctatagcagcccggaatcctttccagtagtgctgtcttttgaacagtaaagaaaggagattttttatgctcaaaacccttctggcccaggtcagggagtttaaaaaggcatcgtttctcacgccttttttcatgatcctggaagttctctttgaaactctgatccccctggccatggcttccatcattgataagggtgtggaagccggaaatatcggccatatctatcggatgggtgcagttatggtagctcttgccctgtgcggactctggtccggcgtcatgggaggaaaatacggagcactggcctccacaggctttgccagaaacctccgaaaagccatgtacaccaacatccagaccttttctttttccaacatcgacaaatacagcactgccggcctgatcacccgtcttaccacagatgtgaccaacctgcagaacgcctatcagatgatccttcgtatgtgtacccgtgcaccggccagtctgatctgtgccatggtcatggcatttcttatcaatgcaaagcttgcaagcatctaccttgtcgctgttatcttcctgggaggctgtctgatctttatcatgagaaaagcaacggtatattttcaggccgtattccgtaaatatgacgacctgaacgcaagtgtccaggaaaacatcggcgctgtacgcgttgtcaaggcctatgtccgcgaagactacgagatcagcaaattccagaaagcctgcaacaaagtatacgaaatgttcttaagtgctgagaagatcgttgtcatgaacatgcccctgatgcagtttaccgtttatgcctgtatcctggggatcagctggctcggcgccaaaatgatcgtaggcagctcccttactaccggtgagcttatgagccttctcacctactgcatgaacattctcatgagccttatgatgctttccatggtttttgttatggtaacaatgagtattgccagcgcagagcgtgttacggaagtcatcaatgatactgctgacatcacagatccggaggatccggtaacagatgtcccggacggaagtatcgtcttcgatcatgtgaatttcagctataagaaagacagtcaggaacccgttctgaaagatatcaatctctcgatccgttccggcgagaccatagggatcatcggcggtaccggaagtgcaaaatccagtcttgtcaacctgatcagccgtctttatgacgtaacggatggttctgtttccgtaggaggcatcgatgtccgtaaataccatctggaatctctcagaaatcaggtttccgttgttcttcagaagaatgtactcttctcaggaaccattctggaaaatctccgctggggtgacaaaaatgccacagaggaggaatgccgccgcgcatgccagcttgcctgtgccgatgatttcatcgaaaaaatgccggacaaatacaataccttcattgaacagggcggctccaatgtttccggaggccagaagcagcgtctctgtattgcccgcgctcttctgaagaagccgaagatactgatcctggatgactccaccagtgcggtagatactgccacagatgcaaggatccgccgtgcctttgccgaggagatcccggataccaccaagctgatcatcgcacagcgtgtttccagcatccagaacgcggaccggatcatcgttatggataacggtgagatcaacggttttggtacccacgaggagcttcttaagaccaacgccatttatcaggaagtatttcattcacagaccggcggcgccggtgattttgacgagggaggtgagccggcttgaaaaaacagaacatgaaaggcccgggcggtcctggcccaaggggtatgggaacaccggagcagcagggaaagcttctgggacgccttgcccgttatatctttaaaaactacagtatccatatcgtgatcgtggtgatctgcatttttgtcagtgttcttgccaatgtacagggaaccatgttcatgaaaaccctgatcgaccagtatatcacaccgcttctctcagcagatacaccggatttcgggcctctggttgcagccatcgcacgtgtagcatgcttttacgccattggtgttattgccacctatacttataaccgtatcatgatcaatgtttcccagggaaccttacgtaacctccgaaacgatatgtttgcaacgatggaaacgcttcccatcaaatattttgacactcacgcacacggcgatatcatgtccatctacaccaacgacattgataccctgcgccagatgatcagccagagctttccgcagctgctttccagtgtgatcaccatcgtcagtgttcttgtaagtatgctgatcctgaatgttccgcttactgtagttactctgcttatggttgccattatgatgactgccagccggaagcttgcaggcttaagcggaaaatatttcctggagcagcagaccaaccttggtattgtcaatggttatatcgaagagatgatggagggtcagaaggttgtcaaggtcttctgccatgaggacgaaagcatccggaaatttgatgaactgaacgaccagcttttcaccagcgcagacaatgcaaaccgtttcgccaacatcctgatgcctgtggtcgcacagcttggaaatgtcagctatgtgatctgcgccatggtgggcggtatccttgctatcaacggcatcggcaacttcacacttggcgggcttgccagcttcctgaccttcaataagagcttcaacatgcctatcaaccaggtcagccagcagttcaacagtattgttatggctcttgcaggtgcaaaacgtatctttgatcttctggatgaaaagccggaagtggatgaaggctacgttactctcgtcaatgcaaaagaggaaaatggtgttcttaccgaatccgacaaacgtaccggccgctgggcatggaagcatttccacaaagctgagggtaccactgattatatcgagctgaagggtgatatggtcctggaggatgtagactttggttataattccaacaagatcgttctccatgacatcaacatgtatgcacagccaggccagaagatcgcttttgtaggctctaccggcgccggaaaaaccaccatcaccaatcttctgaaccgtttttacgacattcagaagggtaagatccgttatgacggcatcaacatcaccaaaatcaaaaaagatgatctcagacgctccatgggcatcgttcttcaggataccaacctgttcacagcaaccgttatggaaaatatccgctacggaaagctggatgccacagatgaggaggttatcgcagcagcaaagcttgccaacgccgacggtttcatccgcaggcttccgcagggttataatacccttctccgcggaaacggttcaaacctaagtcagggccagcgacagcttctctccattgcccgtgcagccgttgcagacccacccgtcctgatcctggacgaggccaccagctccattgatacccgtaccgaaaagcttgtacaggatggtatgga

SEQ ID NO: 232 - DNA, 94674 bp, Unknown
  gut microbiota DNA sequence
cgccatgttttgaggcacttacgtatattagacgagagatttaaataacgggagggataaacctatgtgtggaatcattggttttacaggaaaacggccggcagcaccgatcctgctggacggtctgtcgaaactggaatatagaggatatgactcagctggactggctgtccgtgatggagagtcgctggcagaggtcgtgaaggcaaagggccgtctgacgaatctggtcgagaaaacagattcaggtaaagcgttaaaaggagcctgtggtattggacatacccgctgggctacacatggtgagcccagccagatcaatgcacatcctcatgtatccggtaactgcagtaaatcaggttccggtgcagtggagtctgaggttgtttgtgtacataacggcatcattgagaattacacggaattgaaagagaagctgctgaagcacggctacactttttacagtcagacagatacagaggtggttgttaagctggttgattactattataaaaagtacaaccttggtcctatcgatgccattgcgaagacaatggtccgtgtccgaggttcttatgctcttgagctgatgttccgtgattatccgggcgagatctgggtggcgcgtaaggatagtccgatgatcattggtattgcagatggcgagacctatgtggcttccgatgtcccggcaatcctgaaatatacgagaaatgtatattatatcggtaatcttgagttcgcaaagctgacaccgggcgaggctcatttttatgatctgaacggtgacgagatcgagaagcagactacagaaatcaagtgggatgcagaggctgctgaaaagggtggctttgaacatttcatgatgaaagaaatccacgagcagccgaaggccgtccaggatacccttaattctgtgatcaggaatggtgctattgatctgtccagcgtggagatcaatgaggacgagattaagagctttgagcagatttatattgttgcctgcggttctgcatggcatgttggtatggctgctcaatatgtgctggaagatatggcagatatcccggtacgtgtggaacttgcgtctgagtttcgctatcgcaaaatgccggttgaccagaaagctctcgtgatcgttgtcagccagtctggtgaaacagcagatacactggcagcactgcgccttgcaaaggaaaagggtatcgccacgatggcgatcgtcaatgtggttggcagcagtattgcccgtgaagcagataaagtgttctacacacttgctggtccggaaatctctgttgctacgaccaaggcatacagcgcacagcttgcagctatgtactgcttggctgtccagtttgcaaaagtcagaggaaaaatcacagacgagcagtatggttactatatctctgagctgcagaccattccggagaagatgcagaaggtcctggaagataaagaacgtatccagtggtttgctgcaaagtatgccaatgcccatgatgtattctttgtggggcgtggtattgactatgcagtttgcctggagggcagtttgaagttgaaggaaatcagctatatccattctgaagcatacgcagcaggtgagctgaaacatggcacgatcagtctgatcgagcagggaacgttggtcattggtgtattgactcagagcggactgtatgagaagactgtaagcaatatgttagagtgcaagagccgcggatcctacctgatggggctgactacatatggcaaatacgagatcgaggatcaggtgaacttcactgtgtatgtgccgaaggtagatgagcatttcgtgggcagtctggcagtgattcctctgcaacttctgggatattatgtttctgttgctaagggtctggatgtcgataagccgagaaatcttgcaaagagtgttacagtggagtaaaaaatacgtgtacaaggctgatttatttgcagatttgtgatatactaaaatgcgagtgaaagactgaaataaaaataatgccgtgtgtgaaacacatgctccttcagagccaaagcacacacggtatattttaaataccgctatatagtttataacgaaaataagacaaactaaaaaggagtacaaaaaaatgaacttatctaaaatacaccacatcgccatcatcgtatccaactacgaagccgccaaggatttctacgtaaacaagcttggcttctctgttatcagagaaaactaccgtccggagcgtaaggactggaagctggatctgcgtgtggatgaacacacggagctggagatttttgcagaaccaaatccaccgaagcgggtgagccgtccagaggcttgtggtctgcgtcatcttgctttctgtgtggagagcgtggagcagacggtgaaagagctggcggaggtcgggatcgaatgtgagccgatccgtgtggatgattttaccggtaagaagatgacgttttttcatgatccggatggactgccgctggagttgcatgagtaaggggagatgaaacaaatgatatttcgtaaggcagtaaaagatgattttgacaacataaaatctctgtactgggagctgatcgatcaggagcagggagatccatcgtttccacattggaagaagggtatccatccttctgatgaaatgctgcataacagtattggtaaggaagagatgtatgtactggcagatggcagcgagattgcggcctgtgcgatagttaatgatgaaaaggtggatggctacgcagatgtgccgtggcagattgattcggatgaggttatggtcgttcatgttctggcagtgcatccggagcagcgtggtaagggtctggcccggaatttgatggagcacattgtaggatcggaaagaaaagccggaaagaaagcgctgaggcttgatgtgatcgagaacaatacagcagcggaaggtctgtatcagaaactgggttttcggtatatccagactaagacacttttttatgaggtggttggcgagatgaccttcaaaatgtatgagctggttttgtgatctatgggtgagaaaagagcgtataaaccaagaaggcctggtggtggccgcaggaaatctaagccggagtatgatgccgggaagatccttaaggaactgatgaatccgtctgttgtgctttatgaagaggggatgtctttgcaggccattgcagatgagctgggactgaatccaatcaaggttcggaagctgcttatcacggccggtgtgtatgtatcggatatggcggagaaggtgcaggagacctttgatgatttcagaaaaacacaggatcataaagctgctgtcctttcaactgcaaatgctcttggcctgtccaggtcctctgttacttcatatcttccgtacaaaaagggtgtgtattttccaggtacagcaccggcagataagatcagtgttggagccgagcggcagcggaggtacagagcgatgaagcgttggaggaatgccccaacagaagtagtatcaggagctgttcgtataacagcgagatcaaaatgaaataatggttgacagaaccgggaaagagcgtactgttcgagtgggatttgcatatgttgcacaaagaaaaacagccatcaacttgttatttgttctatgaaatgataaaatcaaaataaaacaggtgagttgtaacctcgtgcttgaggaacagcttcagaaaggagtctgaaaagcatgggaagatttgtgaacccggacaacagtgcatttcaggttgctcttaactccagaatatatgtggataagactggcctgatcgagtatacaaacagtgttcttgatacaacaaatgcctatatttgcaatagtcggccgcgtcggttcggaaaatcttatgcagctaatatgttggctgcgtattatagtaaaggcgcagattctgagcagatgttttctggattgcagataagcagggaggccgactttaaaaagcatcttaacaagtatgatgtgatccatatcgatattcagtggtttctggcaaactgtgatgatgcggataatatagtgaagcatgtcacggaggcggttctggatgaattgcgggaagtttatccggatgttctgccacttgaagtatctggcttgccggatgcactttcaagaatcaaagataaggtgggacagaagtttatcgtcatcattgatgaatgggacgtactgattcgtgatgaggcggccaataaaaaagcacaggaagattatatatatttcctgcgaggaatgttcaaaggaatagaacctacaaagtatattcaactggcgtaccttacaggtattcttcccataaagaaggaaaaaacacagtcagctctgaataactttgatgagttttctatgctgagcccaggcagtctcgcaccgtatgtcggttttactgagaatgaagtgcagaaactggcagaagaatatcatcaggattttgatgaggtaaagcgttggtatgatggatatctgctgaatggtcatcaggtttataatcctcgagcagttgttggcgtgatgcttcggggagaattcaagagctattggtcagaaacagcttcgtatgacgtgattgttccgctgatcaacatgaattatggtggtttgaaaacagctattattgaaatgatctctggtgcagaggttaaagtaaacacagcaacctttaagaacgatacggtaagcatcaaaagtaaggatgatgtgttaacatacatgattcacctgggttattttggatataaccccaaattaaagactgcctttgtgccgaatgaagagattcgacaagaacttacagctgctgttgaaagtaagcagtggaatgagatgctggaattccagaaaaattcggaacatttacttgatgctacgttggacatggatggagtagaagttgctgcacagattgaaaaaatccacaacgagtatgcgtcttccattcaatataacaatgagaattcactgagcagtgttttggcaattgcatatttaagtgcaatgcagtactattttaaacctgtccgggaactgccgacaggccgtggatttgctgattttgtgtttatcccaaagatagagtactgttcatcttatccggcgttgatcgtagagctgaagtggaatcaaaatgcccagactgccgtgatgcagattaaagataaaaaatatccttcttcaattctggattacacaggtgaaatcctgcttgttgggatcaactatgataaaaccagtaaggaacatcaatgtttgatcgaaaaatatgaaaaagagtgactttggaacataattgtataataaaaaaacacaaaatagaaagactgccgcaggtttcgcgcctgcggcattttgcagtttgtacaaaaaacacagaaaatatattggaaaaagagcgggaaaagggtataatgtcagagaaagtgtgattgataaaatacagacgttttttttctgctttgtcaggtcataaataagtgaggcgggggatgtaacaatggaacagcagcatatgtttaccaaccggatgatccgtaatcttctggtgccggtagtgctggaacagattttgaattcgataatgggaaccgcagataccatgatggtcagcaatgtgggatctgcggctctttctgcggtatcgctggtggattccatcaatgtgcttctgatccaggctttttcggcgctggcagcgggaggcgccattgtctgtgcccagtatatcggacagaggaattatgagaaggcgaacatgtctgccaggcaggtgctttttatcatcacagcaatctctgtagtggtgtctgcagtctgtctgatctttcagaagccgcttttgaggctgatcttcggtgcggtggatgcggatgttatgcgtgcatcggaaacctatttctttttcacggcactgtcattcccctttattgcggcttatgattctgcggcttcgatctttcgtgcccaggagaataccaaggggcctatgaccatctccatgatctccaatatcatgaatattggtggaaatgcggttctgatctgggttttccaccttggtgttgcaggagcggcaatctccacactggtttcccgtattttctgtgcagtggttgttctctggcagctgcgtaaggatcgccagcctgtcgttgtgaaggattacctgaagatccgtccggactggagcatgatcggacgtatcctgggacttgggatcccttcgggaattgagaacagtatgtttcagcttggaaagcttgccatccagtctacggtttccacactgggaacagcagctatcgcagctcaggcaatgaccaatatcctcgagaacctaaatggtatcgcagccatcggagtaggtgtgggcctgatgactatcgtaggccagtgtcttggcgccggtcgaaaggatgaggcggtctattacataaaaaaactctgcgtcattgcagaggcagttattatcgtaagctgtctgattgtgtatattttggtcagaccggtgacgatccttggcggaatggagagtaccagtgcggaaatgtgcatccacatgatcacatggatcaccatcgtaaagcctgtggtatggacaatggcgttcgtgccggggtatggtcttcgtgcagccggtgatgtgaagttttccatgatcacctcctgctgtaccatgtgggcgtgcaggttctgtctctgtgttttcctgatccgtgtcctgggcttcgggcctatgggtgtctggatcggaatgtttgcggactggactgttcgtgggattattttcacctggcgtttccacagccggaaatggctggagcacaaggtaatttaaaaaggagggcgtcgcatatatgaagaacggactggaagaccagtatgtcataaaaaacaacaagcgcctccgctacggctacacaacaggctcctgtgcagccggggcagccaggggtgcagtccggatgctgctttcgggagagactctttccgaggtagagcttgataccccaaaggggatcaccctcacattacagcttcacgatattacccgaggtgaagtgtatgtctcctgtgctgtgcagaaggatgcaggtgatgatccggataccaccaacgggatcctggtctatgtaaaagcggagaagttttctgtttcagcggcagaacaggctgggcaggaacggaaaacagagaaatcccggcctcagatcatcctggacggaggaatcggggtgggtcgtgtcaccaagccgggactttcccagaaagtgggcgaggcggcgatcaatccggttcccagagccatgatcctgcgggaggccgaggaggcggcccaggaatatgactacgaaggcggtctgaagcttaccgtatccgttccccagggggaggagattgccaaaaaaacctttaatccccgtcttggcattctgggcgggatttccatacttggaaccagcgggatcgtagagcctatgagtgagaaggctctgatcgaaagcatccacgtggagatgaagcagcatttctgccagggagaaaattatatcctggtgacaccggggaattacggtgcggactatctcagggagcatatgtccattccctttgagaacaatatcaagtgcagcaactatgtaggagagaccattgacatggccattgatatgggcgtaaagggcattctttttgtggctcacatcggtaagtttgtaaaggttgccgccgggatcatgaatacgcattcccactgtgctgacggaaggatggaggttctctgtgcaagtgccatccgtgcagggggctctctggaatgtgccagagagatcctgaaggcggggactaccgatgaggcgctggctgttcttgacagctatggtatcctgaaagagactatggctgtggtcatggagaagatccagttttatctggaccacaggtcctatgagcagatccttttgggcgctgtggtgttttccaatgtatacggactgctggggcagactcgggatgcagaagagctgatccataagatacaggagcaggcagtccgggtggatgatatttcatgacaggaaccccggtccgaatggaatctttaaagagcaggacaaaagttgataaaaataacagacaggttttatcctgtctggaaaatatagctaggaggaaagaaatatggcaggtaaattatatggtgtaggtgttggaccgggagatccggagcttcttaccttaaaagcacttcgtcttgtaaaggaggcagaggtgatcgcacttccgggacagattccggaggatacggtagcatttaagatcgtggagggcgcttatccggagcttggaaagaaggagcttcttgcagttccttttccaatgtccaaagatcctgaggtgctgaagagctatcacgatgcaggagcagataaagtcaaggctgtcctggaccaggggaaagatgtggtatttctcacactgggagatcctaccgtgtattccacatatctctatattcatcacagacttgtggctcagggctatgagacggagatcgtttgtggcatcacatccttctgtgcagtttccgcccgtctgaacaccggacttgtggagaaggcagagcctcttcacgtgatcccggcttcctatcagatcgaggatgcgctgaagctttccggtaccaaggtccttatgaaggctggaaagaaaatgaaggatgtgaaggcggagcttctttcccagggggcagaggccatgatgatcgaaaactgcggaatgccggatgaaaagatctaccggaccgtggaggagatccctgaggatgcaggatattattccctgatcattatcaaagaaaacaaagatagaagagaggaatagattatggtacattttgtaggagcaggtccgggagcaccggatcttatcacagtaagaggtaaacagtatctggaagaggcagatgtgatcatctatgcgggatctcttgtaaatccccagcttctggagtattccaaggatgtgtgcaccatccataacagtgcaaagatgacccttgaggaagtgatctctgttatggagagagcagaggctgaaggtaagatgaccgttcgtctccacaccggcgatccatgtatctatggtgcgatccgtgagcagatggatatcctggatgaaaaggggatcccctatgattcctgcccgggtgtcagtgccttctgcggagctgcatctgcactgaacctggagtatacacttccggatatttcccagagtgtgatcatcacaagaatggaaggaaggacaccggtgccggcaaaagagagcattcagtcctttgccgctcataatgcgactatggttattttcctcagtacaggtatgctggaggagctgagccgcagactggtggagggcggataccgtgaggatacaccggctgccatcgtctacaaggcaacctggcccgatgagaagaagtttatctgtacagtgggtactctggcccagacagcaaaagagaacaagatcacaaaaacagctcttatgctggtaggcgatgcggtcaatgctgcaagctatgacagatccaagctgtatgatccgggctttaccacagagttccgtgaggctacgaaataaaatatgaacatttccatcatttgcttcagtatgacagggctggagacaggggaaaggcttcagagggctctggaaaaagagggtgagaatgtcacccttgcaaaaaagagccggtaccttccggatccgatctctgtttccacctcccagtgggcaggggaacagttccaggcaggaaaagagggcgtgatctttgttggcgcctgcgggatcgcagtgcgcagtatcgcaccttacattgccggaaaaaagacggatccggctgtgctggtgatcgatgaatgcggaaaatttgtcattgctcttctttccggacatcttggcggagccaatgagctggcacttcgctgtgccggatatcttaaggcagtgccggttgtgacaacagccacagatcttcacagtcgttttgcagtggatgtttttgcaaaaaagaatggttgtgctatttttcatatgaaggctgcgaaggaggcttctgcggcccttcttgcaggagagagcgttggcttctacagtgagtttccatgggacggagagctgccggagggtctggtgctttgcggaaaagacggaaggccctcagctgcagcggatccggagaatggtgagaaagccgatgaggcaccggaaacaggtattgcggtgacgatccacagaggctgcctgccctttaaaaatacagtccatgtggtgccgcccgctgcagttctgggaatgggctgccgcaggggaaaggatgcagtctccatccagaaggcggcagaggaatgtctgaaggaatcagatgtttacagagaagcactgagagctgttgccagtattgatctgaagaaagaagaggtgggacttctttctctggcagaagcctggcagcttccgtttctgacctttacagaggaagagctgaaggcagtgcagggtgaatttaccccgtcacaatttgtaaaaaagataacaggtgtagagaatgtctgtgagagaagcgcggttctgggttgcggacagggtacactgatcagaaaaaaaacaggccgggacggtgtgaccaccgcccttgcagccggaaatcggaggatacgttttgagtaagatttatgttgtaggaattggcccgggtgcgtatgaccagatgactggaagagcgatccgtgcattaaatgaaagtgatgtgatcatcggttacaccgtatatgtggatcttgtaaaggagtattttgcaggtaaagagttcatgaccacatcgatgaaaaaagaggtagaccgctgtgtacttgcttttgatgaggcaaaaaaaggaaaaaccgtttccatgatctgcagtggggatgccggtgtttacggtatggcaggtctgatgtatgaggtaggtgaaaactatccggatgtggagctgatcattatcccgggtgtgacagcagctacaggcggcgccgcagtgctgggtgcaccgctgatccatgacttctgcctgatcagcttaagtgatcttctgactccgtgggagaagatcgaggcaaggcttctggcagcagcacaggcggattttgtggtatgcctttacaatccgtccagcagaaaacgtaaggattatcttcagaaggcctgtgatctgatgatgaaatacaagtccccggacactgtctgcggcacggtcgcccagatcgcacgtgacggcgagactgcacaggttatgacactgaaggagcttcgtgatacagaagtggatatgtttactaccgtatttgtgggaaattcacagactaagaatgtaaacggcaagatggtaacaccaaggggatataagaatgtataaagccattgtttttgcagggaccaccgagggctacgcactctgtgagttccttgcggaaaatcatgttccggtctatgcctgtgcagctacggaatatggcggatcccttctgaaggaaaatgaatttctccatgtcagcgccggaaggctgaaaatcgaagatatggaggagcttttccggagggaagcgccggagatcgttctggatgccactcatccctatgcggcagaggtgacaaaaaatatccggtctgcctgtgagaacgaaaatatccgttatcagcgtgttcttcgcccggagggagagaagaaccgtgaagccatctacgtggaaagcacggagaaggcggcagaatttctttccggcacagaggggaacatttttcttaccacaggaagcaaggagctgtctaaatttacagtgatcccggattaccaggagaggctttttgcccgggtgctgtccatcccttctgtgattagctcctgtgcggagctggggatcgagggaaagcatctcatcggtatgcaggggccattttccacagagatcaacgaagcgatgcttcgtcagttccagtgcagctatctggtcaccaaggataccggtctggcaggtggatttccggaaaagatggaggcctgtcagcgctgcggcgccacacctgtgatcatcggaagacctttgcaggaggaggggctgtccctgccggaagcaagggtatttctggcaaagctgttcggccttaccctgtcacagagggtttctcttgtgggcatcggcatgggtgcggaaaaaaccctgaccctggaaggaaagaaggcctttgatgaggcggagcttctgatcggtgcaaagcgtatgacagatgccgtacagaggcccggacagatggttctccatgagtaccgcagtgataagatcgtggagtatatcaaggcacatccacagtaccgtaccgttgccattgccctttccggagatgtgggcttctacagcggcgcaaggaagctgatggatcttctggatggcgatgtccaggtgatctgtgggatttcttctgttgtttattttatggcgaagatcggtctttcctgggatgatgccaggatcgtcagcgctcatggaagagactgcaatctgatctcactgatccgacataaccccaaggtcttttccattctgggaacagaggatggggtagctcgtctggcttctcgtctggttgagtatggaatgggtgatgtgaccctttatgtaggcgaaaatctttcctacgaaaatgaaaagatctttcatgccagggcagcagatcttacagaataccggggagatgcattaagcgtggtaactgcgtgcaatgaaaaggcagtacctttgcccgcagttcacgggatctgtgatgaggaatttctccgtgggaaggcgcctatgacaaaggaagaggtgcgtacggtttctctgtccaagcttcgtcttcaggaggattctgtctgctatgatgtgggagcgggcacaggctcggtttccgttgagatggcgctgcgtgcctggaaggggcaggtctatgccatcgagaaaaaggaggatgcccttgctcttcttaaggagaacaagcggaaatttgccgcagataatctggagatcgtatcgggtactgcaccggaagctatggtggagctacctgctccgacacatgcttttatcggcgggtcttccggaaacatgaatgagatcatccggcttcttctggacaaaaatccggaagtacggatcgtgatcaactgtatcactctggagaccgtgacagaagccatgaatgccatacgagatttcagcctgacagatgtggatatcgtacagctgtctgcggcaagatcaaaatctatcggaaggtatcatatgatgatgggtgagaatccgatctatatcatttcctgcagcggaagaggggaggagatttaggtgaagatcccgagaatacttcttgcggcaggtgccagcggaagcggaaaaaccctgatcacctgcgggcttcttcaggcgctggtgaaccgtggccttaaggtagcttcttttaaatgcggcccggattacatagatcccatgttccacagccgcgtgatcggtacaagatcccgaaacctggatacgttttttacagatggagacaggacccggtatcttctggtaaagaacgcatcggactgtgaaattgcagtgatggagggagtcatggggtactatgacggtgtaggagggatcacctccagagccagtgcctatgatctggcctccaccacagatacaccggtgatcctgatcgtaaacagccgtggcatgagtgtttccctggctgcctatgtaaagggctttctggaatacaaaaaggacagccatatctgcggcgtgatctttaaccagatgtctcccatgctgtatcccagaatgaaaaagcttctggaagaggagctttccgtaaaggtactgggatatgttccgaaggtggaggactgtgtgattgaaagccgtcatctgggactggtgcttccggaggagatcccggagctgaaaagccgtctgcagaagctttccgaggtgctggagaaaacgttggatatcgatgggatcctggagcttgcagggggagcaccggagcttgcggcgccggagccagaaatgcttatacagaaggatactgccttcgggtaccggacagaggaaaaggtacggatcggtgtggcggatgatgaagccttctgctttttctatgcggataatttaaatcttctggagcagatgggagcggagctggtgcgtttttcacccattcatgacagagagcttccggaggatctggacgggcttcttttaagcggcggttacccggaattaaacggggaggcgctggaagaaaatcaggaaatgtgcacccggatccgggaagtcatccgggacggaatgccctgtctggcagaatgcggcggattcatgtatcttcatcaggagatggaggatatggaaggaaagcagcgcagagtctgcggggtgatccctggaagggcttaccggacaccgaagctgaaccggttcggctatatcacccttacggaaaaacaggataccggacttggtgagatcccggctcatgaattccattattttgattccacagattgcggagaggattttcatgcggcaaagccggcatctaaaagaggatgggattgtatccatgaccggggcaggctgatggcaggatttcctcatctttattattacggaaatcccagggttccggcacgctttctgaagaacgcactggaatataagaaagaacggaggcagaaaaaaagatgctgaaatatagtcttcctgcactggtcataggatttgtgctggatcttctgatcggagatcccagatggctttatcatccgatctgtgtcatcggcaatctgatcgcagtgctggaaaaggtgatccggaagatttttccgaaaaatcacggcggtgagctgacaggaggctttctgatcgtagtacttgtctgtttgttcagcggcggggtgccgcttctggtgctttattatctttaccggtatctgccggtggccggatttgtgctggaggttttctggtgctatcagcttcttgccacccgttccctgaaggatgagagtatgaaggtttatgaccggctgaaaaacgggactctggacgaggcacgctatgcggtgtccatgatcgtaggccgtgataccagagagcttacggaaaccggcgtgacaaaggctgctgtggaaaccgttgcggaaaatgcatccgacggcgtgatcgcccccatgctttatatggctatcggcggggtgccgctgatgtttttgtataagggtatcaataccatggattccatgcttggatataaaaatgacaaatatctttatttcggccgtattgcggcaaagctggatgatgtggccaattatatccctgccaggatctccggatggctgatggtggcaggaactgtttttacaggaatggatacaaaaaacgcggcaaagatctacaaacgtgacaggaggaatcatgcaagccccaactctgctcagacagaggctgccatggccggagcgctggatgtacagcttgcgggaaatgcatattatttcgggaaattatatgaaaaacccacgatcggggatccgatccgcccggtggagccggaggatatcaaaagagctaaccggctgatgtacgcggcatccatactgggtgtgattgtatttggactgctcagtgcggggatccggttcgggttattaaggtaacaataaatacagacaggagaatgaccaatgacaaaacacatacatggaggagacgtatataaacataaagactgcctggatttttcggcaaatctgaatcctttgggaacaccggaaagtgtgaagcaggccattatccacagtctggatcatattgcacaatatccccaggtgggatgcggcgttctcagggaaaggatcgcagaatcggaaggggtaaaagcggaagaggtaatatgcggtaacggagcagcagaagtaatctttacgctctgtcatgcagtaaagccaaagcgggctctgatcccggcgcctacttttgcggaatacggacaggctctggccagcactggctgtgagctggaatattacatgctgacggaaaatgacggttttgtgctcagtgaagcatatctggatatcctccataagggactggatatggcttttttatgtaaccccaacaatcctaccggcatgctgatctcccacaggcttctgaaaaggatcctggaaaaatgcagaaagctggatatcctgttggtggtagatgaatgtttccttgattttgtaaaggaaccggaagagtattctctgaagcattctctttccgggttcaataatctttttatcctgaaagcatttacaaaaagatatgccatggccggtgtgcggctgggctatggcctctgttctgacagaaagctgatggaaaggatggagctctgcgttcagccgtggaatgtttccaccatggcccaggcagccgggctccaggcacttacagagacggaatatgtagaggagggaagacagcttgtttttcgggaggcacagtggctgaaggatgagctggtccgcattgggtataaagtatttccgtcggaagcaaattatattttctttaaaggaccggaggagctctttgacttctgtctgcgcaagcggatcctgatccgtgactgcagcaattatccgggtcttacaaaggggtattaccggatcgcggtaaagcgccatgaagaaaatgtaaaactgatcgaagtacttgagggaggtatattatggcaaaagcaataatggtacagggaaccatgtccaatgccggaaaaagcctgctggctgcggggctttgcaggatctttaagcaggatgggtatcgtgtggctccttttaaatcacaaaatatggcactgaattcctttatcacagaggatggtcttgagatgggacgggcccaggtcatgcaggcagaggcagccgggatccgaccgtctgtcctgatgaatcccatccttctgaagcctaccaatgatgtaggctcccaggtgatcgttaacggagaagttcttggaaccatgagtgccagggattatttcaaatataagaagaccctggttccggatgtgatgaaggcatacaacgctcttgcagcggaaaacgatatcattgtcatcgaaggtgcgggaagtcctgccgagatcaatctcaaggatgaggatattgtaaatatgggtatggcaaagatggccaaggcaccggtccttcttgtgggagatattgaccgtggaggtgtttttgcccagctgatcggtacggtggagcttctggaggacgatgagaaggctatggtaaaggggctgatcatcaacaaattccgcggagataagactattctggaccctggtgttgtcatgcttgaggaaagaagcgggatcccggtggtgggtgtggcgccttatctggatatccaggtggaggatgaggacagcctgacggagcgttttgaccggaagcaggaagccggtgtcattgatatcgcagtggtccgtacaccaaggatttccaactttacggattttaatccttttgagagcattcccggagtttctctccgctatgtaaaacacccgagagatcttcactctccggatatgatcatccttcctggaactaagaacaccatgggcgatctgatctggatgcgggaaagcggaatggaggcagcagttctcaaggaagcctccagaggcaagctgatctttggtgtctgcggtggctatcagatgctgggtgaaaccttaagcgaccctcatggagttgaaaatggcggttccatgaaaggaatgggacttcttcccatggaaacggtatttgccgaaaagaaaaccaggaccagggtgcaggggcatttcggtcagctgtccggtgtgtttgctcctctttccggtgcggagatcgagggctatgagattcatatgggcgaaagcatcctgaaggacaatgcaggaacagccacgaggatcacagacagcgtcagcggtaagaaaaaagaagagggtgcttttgcgggaaatgtgtgcggaacctatatccacggcgttttcgataaggaagcatctgcagaggcgatcatccgtgtgatcggcgagaaaaaagggattgatgtggaaaatatgacaggcgtggattttgcggcatttaaggaacagcagtatgatatcctggctgcagagctgcggaagcatctggatatgaaaaaaatctatgagatactggaaaacgggattacggaggaagaatagaaatgaaagttgagcttgaaaatgtaaaacccatggagatcgaaaaaagaagctttgagatcatcacagaagagctgggggatactcccctgattccgggaacagagctgatcgtaaaacgctgcatccacacaagcgcagattttgattatgcaaaaaatctctgcttctcggagggggcggtggagatggccatggacgccatccgcaatggcgcctgcatcgtcacagatacccagatggcaaaggccgggatcaacaagcgtgcacttgcccgctacggcggtgaggcttactgcttcatgtccgatgaggatgtggctgcccttgcaaaaaagaacgggactaccagagccacagccagcatggacaaggcagcagagatggataaaaagctgatctttgccattggaaacgcacctaccgcactggtacgtctttatgagcttattgagaacggaaagctttctcctgagctgatcatcggtgtgccggtaggctttgtgaatgttgtgcagtccaaggagctgatcatgcacgcagatgtgccttatattgtggcaaaaggacgcaagggtggaagcaatattgctgcgtgcattgtaaatgccctgctctacatgatcgataaccggagagattaggagccggtaacctccttcagaagctgacaggcaggcagaaaatccttggatggaatggaggagcaggagaggaccagggtgacctcggctccgttttctctgagaacctccagtcccagaccacggttcctggctctgtctgtcagttcactgcctgtgagagaacagggaagagtaagggcaaggctggttcctgcggctcctgtttggatctggcagtcctggccgaaggtttcccggacagcctgggaaagagccttcagcttctgggaataaaggcggcggagctttcttgtctgggaagccagatgcccgtcgcggataaactggcagagcgcgatctgttctgccttggaagcagtctgattataaaaggctgctttttttgtatatttttcccggagagagcgcggcagtaccatgaagctgacacggatggagggcagcagcagcctggaaaaggaaccgatatagacaacgttttcaccacctgcaagaccgaaaagtgaaggcgtcggcttctggaaataaacaaattcgttttcgaaatcatcctcaatgatcagatggtcattgatctctgcatgacggatcagctccaggcgtcgttttaccggcatgatctcgccccatttcgtcatgtgagcaggagaaacatagatcacatcgcagcttttgtcccggtaatggacatcaaagccgtaatcctgaaagatggtgctgcatgtggtgaaggacggtgtggggaacgaaacggttttccgttcatggatcagaggacagaggatctggagaaggggctggagaccggcccctactacaatgtcatccggggagcagatcacatttctgcgttcccggatatagtctgcgagaacctcccggaaatcgctttcgccctggggttcgccataagaaagcatacggtcgccctggcggagggcgcttttgatgtaacgctgccacagatcaaaacggaagctttcccggtcaacaccggaagaggcaaaatcataaaggcagggcgtgatatccttatcctgtttttcgggggtaagcagatgctgcttggaagcaatgccggtgacataatagccgctctgtgccctggcgatgatatagccgtctgctgcaagcagaagataggcattttcgatggtggtacggctcagcttcagctcctgggcgcatttgcggagggagggcattttgcttccgggaaggagacggccttccaggatcagcttccggtaatagtggtaaacctccagataaaggtgttcttttttgtgttctgcagatatatttaacataagtatgatgatttccttccaaaaatgattgcgtaaacctgacagttcattctataatattacagaaaaaaactcaagactggagaattaccatgaaaaaaatagcagtgatcaatgatctttccgggctggggaaatgttcactgacagcagcgatcccggtgatctcggtgatgggggtccaggcgtgtccacttcccaccgctgttttaagcaaccagaccggttatgaaagttatttctgtgaagatttcacagagcatatggaaccatatatggagcagtggaaaaaaagaggatttttcccggatgggatctatacaggatttctttctgacgataagcaggcagacaggattctgaaatttatggatgcgtttgcagggaaggatactctgatccttacagatccggttatgggggatgacggcgcggtttatccgatctatacagaagagcttcgcagccggttctgcgaactgacacgtcgttcctatgtgatcacaccgaaccttacggaagccctccttcttctctatggaaaagaaaaaatggaggagatctggaaggaactgcaaaaggcatcagaggcccggcggatggaagagatccgggagatcgggtgcggacttgcccggaaattttcacttcctgccgttgtgatcaccggagtggatcacagggaggaggggcagcctctgaaaatggggaatcttgtcctggaaaacggaaacagctcctgggtatttgcagagaaatcaggaggaagctattctgggacaggagatctttttgcatccgtgctcagtgcagggctggtaaaaagatattccatgaaaacctgtgcagagctggccgtggattttatctcggcatcgatccgggatgcggtggaggaaggaacagaccgtaacgatggtgtatgctttgaacagcatctcggcatgctgcttccataaaaacataaggggataaaaaagagctgaccgtcaggccagctcttcccatttttcataaagctcttccagttcttcagcgatggctgctttttcgcggctcagctttgtacattccgctacattggtgcagacatccggaaggaccatggtttcgtcgatctcgctgtctcttgtttccagctcttcgatacgggcttcgacttttttcagctcggcttcccgttttcgtttctttgcttgttcttccttcatctgctgccaggaaagcttgttctcggaaaccgctttttcttcggcaggtgcctccggagaagtgcttcccggtgcataggtactggtcagctcctccttcttttccagatagtaatcataatcaccgatgtaatttaccactgcctggtttgtcagctccatgatcctggtcgcagtctgattgataaagtaacggtcatgggatacataaaggactgtaccggtgtagctgaccagtgcttcctccaggatctccttggaggcaatatccagatggttggtaggctcgtcaaggatcaggaagttggcttcggaaagcatcagctttgcaagggaaacacggcctctttctccaccagaaagtgcggagatctccttgaaaacatcatctccggtaaagagaaatgcggcaagcatatttcggatctcggtctctgtgagagtcggataagtatcggaaatctcctggaaaattgtcttgtccatatgcagaacatgatgttcctgatcgtaataaccgatctgcaccttggaaccaagggaaaatttgccggcatctgcctcaataagaccgttgatgatcttcagcatggtggtctttccggttccgttgtttccgatcagcgccacacgctcgccgcgtttgatatcaaaggagatatcggagaacagggtctgtcccggaaaggccttggaaagcgcttccacgtggagcacatcgtttccgcttaacacccgtggttccagcgagatacgcatccggtcctggagctcaagaggcttttcgatcctctgtacacggtccagcattttttcacggctttccgcacgcttgatggatttttcacggttaaaggatttcagcttggcgataacggcttcctgatgcttgatatcccgctgctgatttaagtatgccttgtactgtgcgtcacgaagctgagccttcttgagagcataggcagagtagttgccgctgtatacgcgggtctgtccggcttcgatctcaatgaccttggtgaccaccttatccagaaaataacggtcatgggagacgataaaaacagctcccggataattcagaagataagtttccagccaggagatgctttccatatccaggtgattggttggctcatccagaagcaggatatccggcttggaaagaagcatcttgcccagcgccacgcgtgttttctgaccgccggaaagagtttcgatctgcttgtcataatcttcctccgtgaagccgagaccctttaagacaccggtcagctcacttttgtaagcgtatccgttctccagctcaaactgatgggtcaggcgggtataggtttccatcagacggttcagctcatcaccggtcaccgtgttcatttcctgttccatattgcggatacggcgttccatatcgatgatgtgctgcttggtggtaagaagctcttcgtagatggtatgatgtccgtggatatcctggtactgggcaagatagccgatatttttatcccgggcaagcaccacggtaccggaatctgcagaaagctcctgcatgatgatccgcagcagtgtggtctttcctgcaccgttgcatccgatcagagcagccttttcacggtcttcaatgtgaaaggatgcatcatttaaaattactttttcgccaaaggccttgcatatattctgacatgataaaatcataaaaactgtcctcctgtataaagaatcacccctgtttatgcctgaacagggaaaaatcctccacctattataacggaaactgccgggatttcaaagaaaaaatcaattattagaaaaattataaagaaatttgtacagaatagacaactttaattgacaggaaaatgtcaattcgttataattaacctagtgtaaggtaaggaggaaaactatcgtggagacaaaacaaatctcgaaagcggtgattaagcgtctgccacgctattaccgctacttaggagagctgatggaagacaatgtagaacgtatttcttccaatgagttaagtaagaagatgcataccacagcttctcagatccgtcaggatcttaataatttcggcggttttgggcagcaggggtatggctataatgtacattatctttatacagagatcggtaagatcctgggactggataccgttcatccgatgatcattctgggtgctggtaatctgggacaggcacttgccaattatgtggattttgagaagcgtggcttcaggctggttggtatctttgacgtaaatcctgtgcttgagggcatcgcagtccgtggacttgagatccagatgctcagtgagcttccgtttttcctgagagagaataacgtggagatcgcgattctgacacttcccaagaataaagccaaggaaatggcagatatcctggtggagaacgggatcaaggcaatctggaattttgcacatctcgatcttgagacaccggatgatgtgatcgtagagaacgttcatctttccgagagtctgatgacactgtcttataatctcagtaaatacaggcaggaacatgtggataagtaagaattgttaagctgccggaaacggcagctttctctatgatagaggggaggcagaagacagaatgaagaagcttgttacctgcaaagaaatgaaggatctggactccacaacgatccgtgagatcggagttccatccgaggttctgatggagcgggcagcactgaaggtggtagaggaaacagaaaagtatctccagaaggacgaaaggatcctggtagtttgcggaagcggaaataatggcggtgacggtatcgctgttgccagattgttccatctgaagggaatccgggtagagttttatatggtcggaaacaaagataaaatgaccagagagacagctcttcagtataagatcgcttccggttatcgtgtcccggaggtgaataacccgcagtggagtgaatatactactatagtagatgccgtgtttggggtaggcctgacgcgtccgatcgaggggcattatgctgatatcatccatgagatgaacagtgcgagggccaaaaagatcgcagttgacatcccgtcaggagtgaacggagatactggcctggaaatgggaattgccttcagcgccgatctgactgtcacatttacctaccggaaaagaggcctttgcttttatccgggaagactgtatgcaggaaggatcgttaccgccgatatcgggatctatgagcaggaagctgtgactgcatctgccgcctgtctggaaaataaagatctgaagctgtttccggaacgtgatcccggcggaaacaagggtaccttcggaaaagtgctctttgtgaccggaagtgagggaatgtgcggagctgcttatttaagcgccagtgcagcacttcgtgccggtgcgggaatggtaaagatccagactgtggaagccaacaggatcccactgcagatactccttccggaggctatggtctgcagccgctttgatcaggaatccaatgaacagcttctatcctggtgtgatgtgatcgtgatcggaccgggacttggaacctcagtggccagccgtgagagagaacagtggtttctcacggcggctgcccgggagaaaaagccgctgatcctggatgcggacggcctgaaccttctggctgcacatccacagtggtatcagtatctgggagagcatgtagtcctgacaccgcatatcggagaaatgagccggctcagtggcagaacgatccaggagatccagcatgagatcgcagatactgcactgaaatgtgctgcggaaacaggctctgtgtgcgtattgaaggatgcatgtacggtgatcgcagatgagaaaggccagatgtatctgaatctttccggtaattccggaatggcaactgcaggaagcggagatgtgctttccgggatcctggcagcagtgttatgtatgtatctgaaaacggaggaacagcctcccatggttttaaaggccgcgttaggtgtttatcttcacggactttgcggtgatcttgcagccgctgaaaaaggaaagcgcagtatgctggcaggagatatcatagaatatctgcccaaggcattagctataggtgaagaggagtcgggattatgaaaaaatacgagagagtaaaagcactggtatcactggatgccattgcccacaattttgaggaaatgcataaaaatgtcaaagaagggacaaagatcatcgctgtgatcaaggcggacggttatggtcatggtgccagagctattgcccgtctaatccaggactatgactatatctggggatttgcaacagctacggcagaggaggcactggagcttcggcatgcagggatcaccaagcctgtcctgatccttggccttgtatttgaggaatattatgaggagcttgcagccaatgatatccggatcaccatatcggatcttaatacagcggcagaatatgcaaaagcaggtgcacgcattggaaaaaatgtacatattcatctggctctggatacgggaatgacaaggatcggatatgcggatattccggaaaatgcgataaagatcgaaaaaatctcaaaaatcccgaatctggtgatcgagggaatgtttacccattttgccagggcggatgagaccgaccgttctcctgcactggtgcagctggaccgttatctccgttttgcagagcttctggaaaaaagaggtgttcatattccggtacgtcactgctccaacagtgcaggtatcatccgtgttccggaagcaaatctcaatgtcgttcgtgccggcatcaccatttacggtatttatccgtcagaggaggtagaacgtgatattgtgaagctgacacctgcaatggagctgaaaagtcatgtatcctatgtgaaaaatgtggaacgtggaacagcggtaagctatggaggaacgtttgttacagaacgctttaccagaatggcaacgatccccgtaggttatgcagatggctatccgagacagctttccaataagggctgggtcctgatccggggcaaaaaagctccgatcctcggacgtgtctgcatggatcagtttatggttgatgtcacagatatcccggaggtgaaggccggggatgaggtcaccctgatgggaagagatggagaggaatttatcagtgtggagacactgggagatctttccggaagattttcctatgaatttgtctgcgggatcagtaaacgtgttccgcgggtttatatcaaagacggtaaggaatgtggagaagaggagagctttttccagtagatccgtaaatacccggatccggaaaacgccaggtcagacataaggccggtaaaaaagtaccacgcatggtatacacaaagaaattgtggaaatacttatctgtaaaaaggaatacggcttgcaaataagccggaccagaatcggagtgtgaattgtgtggttataaaaagaggggatattttttatgcggacttaagacctgtagtgggcagtgaacagggcggcatccgtccggtgctgatcatccagaacgatgtgggcaaccgtcacagtcccacagtgatctgtgcggcaattacatcaaaaatgaataaggcaaagctgccgacacatattgagattgatgcatccgcctacgggatcgaaaaggattccgtgatccttctggaacagctccgcaccatcgacaagcggcgtctgaaggataaggtgtgtcatctggacagtgctatgcttgataaggtgaatcatgcgcttgagatcagtctggaactgactttttaggggaacatgaggaattttgaccggtttgttttctgattcttgacgaaatctttcataagtgctatattaaaccgagttgcaattatgtaaaacggtacccaaaatgagcagggcacgaaagaaaatatacggtaacaaggagaggaagataccatgtcaggacattcaaaatttgccaacatcaaacataagaaagagaaaaatgatgccaagaagggtaagatcttcacagtcatcggccgtgagatcgttatggcagtaaaggccggcggcccggatcctgcaaacaacagcaagcttcgtgatgtcatcgcaaaagcaaaagcgaacaacatgccgaacgatacgatcgatcgtggaatcaagaaggcagcaggtgcggattctgcagacagctacgagaaggctgtatatgagggatatggtccgaacggtgttgctattatcgtagagactcttacagataacaagaaccgtactgcaggtaatgtacgtaacgcgtttaccaagggtaacggaagcatcggaacacagggatgcgtatcctttatgttcgaccagaagggccagatcatcatcgacaaggaagaacttgaggatgagtgcggcgagatggatgcggacgagctgatgatgacagctctggatgcaggtgctgaggacttcaacgaggaagaggacagctttgagatcatcacagcaccggacgatttcagtgctgtacgtgaggctcttgagaaagccggaatcccgcttgtagaagcacagatcgccatgatcccgcagacctatgtggagctgacggatgatcaggctatcaaggatcttcacagaacactggatcttcttgatgatgacgacgacgttactgacgtatggacaaactgggacgaatgatctctgaatagaaagtaatattttgcatataatacctccagaatttcagattccggaggtatttttttatggaaaaacagagcgaagagagaaaacagaaggaactggaccgggaagcgagccagaacgaacagatccgggaaaccgggcaggcagtgctcgatggaaattcccggaagcataaagtggagcttctgacggtgatcggggaaatcgaaggtcatgaatccgcgccgtctcacagcaaaacaaccaagtatgagcatgtactgccaaagctggctctcattgaggacgatgaggagatcgaggggcttctgatccttttaaatacggtaggaggagatgtggaggcagggcttgccattgcggagatgatcgcgtctctgagtatccctacggtttccctggtgctgggcgggggacattccataggtgtacccatggcggtatcagcagattattcctttatcgtgccaagtgctaccatggtggtccatccggtgcgccagaacggaatgttcatcggcgtggcgcagtcctaccgcaatatggaaaagatccaggaccggatcattgcctttgtatccggacattcacatatcacggcagaacggatggaggagctgatgctggatacctctcagcttgtaaaagatgtggggactatgctggagggtgaggaagcggtaaaggaaggactcatcgatgaagtaggagggatccgggaggcactggaccgattgtatactcttatcgaaaggaaaaaaacacagaaataaccagttttgtatgtggcttttgatgatactagttgcataagactaacatggttgcgctgtgctgtggtaaagaaatttgacagaaattgtaaatctactcttgtcatatgctgatttttagcgtattattaataaaggtttataatttgcgcgaggaggaagaccatgtataaggttttaaaagctgaaacgctggcagctaagatccatcttatggttgtgcatgcaccacgtgtggcaagccactgtctgccaggacaatttatcattgtgaaacttgacgaaaagggagagaggatcccgcttaccatctgcgattacgatcgcgaggccggtacagttaccatcgtattccaggagatcggagcatctaccattaagatgtccgcactgaaggcgggagattcattccgtgatttcgtaggacctctgggatgtccgtctgagttcgttcatgaggatatcgaagaacttaagaagaaaaaaatggtattcgtagccggtggtgtcggtaccgcacctgtttatccgcaggttaaatggctccatgagcacggcatcacagcggatgttatccttggttccaagactaaggatatggttatccttgagaaagagcttggcgctgtttccaatctttatgttacaacagatgacggttcctatggccgttccggtatggtaacaaagactcttgaggatcttgtgacaaacgagggcaagcattatgacgtctgtgtagcgatcggaccgatgatcatgatgaaatttgtctgtcttcttaccaagaagcttggtatccacacaattgtcagcatgaacccgatcatggttgacggaaccggtatgtgcggcgcttgtcgtctccaggtcggtgatgagatcaaatttgcctgcgtagacggaccggagttcgacggacatctcgttgatttcgatcaggctatgaagagaagccagatgtataagacccaggagggccgtgcattactgaagcttcaggaaggcgatacccaccacggtggatgcggacattgcggaggtgacaactaatggcagatgcaaaaatgttaaaaaaagttcctgtaagagagcaggatccgaaggtacgtgcgacaaacttcgaggaagtatgtcttggatataatcaggaagaagcaatggaagaggcacagagatgccttggctgtaagaaaccgaaatgtgtagagggatgtccggtgtccatcaatattccgggatttatcgagcacatcaaagaaggcaacatggaagaggcttacaaggtgatcggtttatcttccgcacttccggctatctgtggtcgtgtatgtccgcaggaatcccagtgtgagggacagtgtatccgcggtaagaagggcgaggctgtttctatcggtaagctggagagattcgttgcagactatgctctggagcatgatatcaaacctgcaggagcagaggttaagaacggacataaggttgcagtgatcggttccggtccatccggacttacctgtgcaggtgaccttgcaaaggcaggatacgatgtaactgtattcgaagctcttcatgagcttggcggtgttcttgtttacggtattccggagttccgtcttccgaagcagaaggttgttaagaaagagatcgagaaggtcaaagagcttggcgttaaattcgagacaaacgttgtcatcggtaaatccactaccatcgatcagctgatcgaggatgagggatttgaggctgtattcatcggttccggtgcaggacttccgatgttcatgggtatcccgggtgagaatgcaagcggtgtattctccgcaaacgagtacctgacaagaagcaacctcatgaaagcattcgatgattcctatgatacaccgatcgcagcaggcaaaaaggttgcagttgtcggcggtggtaacgttgccatggatgctgcaagaacagcgctgagacttggcgctgaggtacatatcgtatacagaagaagtgaggcagagcttcctgcacgagcagaggaagttcatcacgctaaggaagagggcatcatctttgatcttcttacaaatccgaaggagatcctcgttgatgagaacggccacgtaaacggtatgaaggttgtcaagatggagcttggtgagccggatgcatccggaagaagacgtccggtagagattcctggttccgagtatgatatggatgtagatactgtcatcatgtctcttggtacttcaccgaacccgctgatctcttccacaaccaagggccttgacatcaacaagagaagatgtatcgttgccgaggaagaaaccggtaagacatccaaggacggcgtatatgccggtggtgatgccgttacaggtgcagctaccgtaatccttgccatgggtgcaggtaaagctggtgcaaaaggtatcgacgaatatctgaaaaataaataagcagaaagtctgtttataaacagatcctccgactgtgttttctgatgcagccggaggattttttttcgtgcagataaaaaagaacatttgtttgagacttttaccaagtgaagattgtaagttttactcagttatgctataatgtgttggaaaaaatttaagaaaaggaaatatcattatgtcagtgatacatgcgattatattgggaatcattcagggaatcaccgaatttctgccggtgagcagcttcggacatctctgtggagtgcaggatcttttgggcggtaccagaggctccggtgtgctttttgaagtgatgctccatctgggaactatgatagctctgatccttgtttttctgaaggacatcaagaagatcgggatcgagctgatcggaatgatactggatctgatcggaaatgccaatatttttctctataaccgtaggactgggaaagagcttacctacgcaaagatcataagcggaacttaccggaagcttactgccctgatcatggtatccaccattcctacagtcctgatcggatatcagtgcaaacgacttgttgtgcgaagcgcatcctcacacatgttttccgggatcggaatccttcttacaggtgtgatcctccttgttgtggactacagtaatgtcaatggcagcaagggaacaaaagaaaccagcttcggagatgctatgtggatgggtatctgccagggtctttctgtgtttccgggactttccaggcttggacttaccatgagcgcaggacttttctgcggcctcggacggaagtttgcagtgaaatattcgctgctgatgagcattccggctgtggtgggagctttttttgtggagatgggagagttcacttctgttcatatgactgttggccagggatttacttatgttcttggaatgatcgtggccgggatcacaggctatctggtgatccgttttatgcttaagctttcgaatcaggtcagactgcgttattttgcattttattcttttgcagccggaatccttattctggcagcgaattatatttgatatcaactgggaggagtctgacaatggcagcttcaaaaacgacaaaaaaaagaaaaagaaaacctgcggcgaagcagcagcctgtcggtaaccgctttcagacagagatcctgatccttgtgatgtttgcggcctgcctgatcctgatgatcagtgcatttggtatgggagggatcgtaggaaatgccatcagtgccgtatgctttggcatcatgggactttgtgcatatattttcccgatcctgctttttgccggagttacgttcctgatcgtgaacaataccaaccgccttgcctacaaaaaggtactggcgggcgtggtattttttgtgttcctctgcggctttcttcagctgatcacagagggctatacgccaagtaccacgttttcggattattattcactgagttcggaataccgtaccggcggtggagtattcggtggtgcagtatgtatttccacagcatccgcttttggcgttgtgggcggaactgtgatcatcgttctggtgcttcttgtgtctctcatcatcataacacagagatccttcttcggatttatgaataagatcctggacttttttacagatgcagcaagagagggcagagaagcttatcttgagggacagccggacagagaaaagcagaaggagcttcgcagaaagatccgtgcggaaaaaagagcggagaagatccgccggctggaagaagagctggaggaagaagaacttgcccttacagagaaagatccggaaaatatctcaaaaaaacaaaagaaaaaaacaagaagatcgcagaaagaaagacaggctgcggtgaaggcgaaccgggagggagaatttaatcttccttctttcctcgatgaacaaaaggctgtacttccggcagatacagatctgacagaagaggatccagggcctgatgagaagccggaggagcatgctcagccgctggaattccagatccaccgttcacagccgcagccggcccgggaagagtcggaggagccggatttcgaaagagaaatgcaggtagccgaagaggaagatgcctattccggttatgaggatgtggatattcccgagatgcagcaggtcctgccgtcaaagacagctgcagcagcaaaagcttcccgggaagcaggaaaggcagccgttcctgctgagataaaggaggatcctcagccggaagctgaacagaaggcatcccatcagccctccagaaacccgaagtcatctcagacagagatcgagcatgggatcagaaatatccagcatgagatcagccagggagaagctccggagaagaaaccatatcagtatccgccgctgaagcttctgaagcgcggagatggtagatctcagggagattccgatgcacatctgcgtaaaacggcacagaagcttcaggaaaccctgcataatttcggcgtcaatgtaaccgttaccaatgtgagctgcggacctaccgttacccgctatgagctgcagccggaaatgggtgtgaaggtcagcaagatcgttggtctttccgatgatatcaagctgaatcttgctacaccggatatccgcatcgaagcaccgataccgggaaaggcagccgtggggatcgaggtcccgaacaaggagaacagcccggtcatgctgcgggatcttcttcagtcagaggagtttaaaaatgcaaaatccaagctgtcttttgcagcaggtaaggatattgccggaaaaccggtagtggcagatattgccaagatgccgcatcttcttatcgccggagcaaccggctccggaaaatccgtctgcatcaatacgctgatcatcagcatcctttataaggctacaccggatgaggtgcgtctgatcatgatcgatccgaaggtggtggagctcagtgtatacaacgggatcccgcacctgttcattccggtggtcacagatccgaagaaagcggccggtgcgttgaactgggctgtttccgagatgaccagccgttacaatgcctttgcggaatatggggtacgtaatcttggagaatataacaaaaaggttgccaatatgcgtgtcccggagggagaaaaggcacctgagaagatgccgcagatcgtgatcatcgtggacgagcttgcggatcttatgatggttgcgccgggagaagttgaggatgcgatctgccgtctggcccagctggcacgtgcagcaggtatccatctgatcattgctacccagaggccatcggtcaatgtcatcacaggtctgatcaaggccaatatgccgtccaggatcgcattttccgtatcttccggtgtggattccaggacgatcctggatatgaacggtgccgagaagcttcttggcaagggcgatatgctgttttatccgcaggggtatcagaagccggccagactgcagggtgcttttgtttccgatgaggaggtcagtgcagtcgtagaatatgtttctgacaaaaatcagggtgctgtttatgatacctccatcgagaagcaggtcaatacagccggtgtcccgggaggagccggcggcggtgacagagatgtctattttacagaagccggtaaatttatcattgagaaggaaaaggcctccatcggtatgctccagcgtatgttcaagatcggatttaaccgtgcggcaaggatcatggatcagctttgtgacgcaggagtggtaggtccggaggaaggaaccaagccaaggaaggttttgatgtcagcagaagaatttgagaattatctggaggagaacggcggatgaaaataagtatcctgacagtagggaagatcaaggaaaaatatctgcgggatgccattgcggagtattccaagcgcctcgggcgttactgcaagctggagatcatagaagtgtccgacgaaaaaacgccggataatgccagcgaaacagtagaagatgccattcggaacaaggaaggggagcgtcttcttaaatatatccgggatgatgcgtttgtgatcactctagagatcggaggcgaacagctgacctctgagaacttcgcacggaagatcaacgagctgggaatacgtgggaccagccatatccagtttgtgatcggcggctctatcggtcttggaaaagaagtactgaagagatcagactatgctttaagcttttcgaagatgacatttcctcatcagctgatgcgtgtgattcttctggaacagatctaccgcagctatcgtatcatcagcggagagccctatcataaataatatcatactacatatccgcaaatatcttgacaattttcggatatgtagtatgataaaaaaagagtagcactcggagcttaagagtgctaataatcacagaaagaaggaaatgaatatggcattaaaaccagttgcagacagagttatcgtaaaatattttgagacagaagacaaaaccgcatccggcatcgtacttccggaaagctccaaggagaaaacccagcaggcagaggttatcgcagtaggtggcggtaaggtcgtagacggtaaagaagtaccggtacaggtaaagccgggcgaccgtgtgatctacggaaaatacacaggaaccgagatcaaatatgagggtgagaaatatctggtgatcaacgcagatgatatcattgccatcgtaaaagactgatgaagaatttttatcgtaattttctgaaattatgctccatgttggtgttgcagaatgtagtgaccttaagcgtcaatcttgctgacaacattatgcttggagccttcagtgaaactgcattatccggtgtgactaccgtaaatcaggtacagttcgtctttcagcagctgcttatggctctgggagacggacttgtcatattcggaagtcagtactggggaaagaaagagacagagccggtaagaaagatcagtgcctgggccatgcgcacaggcttttttattgcccttgtgctgtttatcctggccagtctttttccaacacagctgctggggctttttacaacagaccaggcgattattgaagccggtctttcctacctggcgatcatccggtttacttactttttctttgcagtgacgcagatcctgcttgctacactgcgctgtgtggaaattgcaggggttgccttcgggctttcggtaatgacttaagtgtagtaatggtaggaatgtcctatcagatgccgacaaacggtggtatcatccggggaagcggaagcattgcttattccatgaaggtggacctgatcagtacctggtggatcgtgatccctctgtccatgtttatggcatttgtagtcaaggcatctccggcagtggtggtatgctgcctgaatgcagatcagatctttaaatgcgtgcctgcatttttgaagtgcaattacggacactggatcaaaaatatgacgaattaaggaaatatatatatagcagaggcaagatacagaaaatttatcttgacgcctgtgtgatctgtatgtagaataaatacaagctttaacgaaatgcagtaaaaaaatctctgaagagccagggacagcttgacaaaggtaatatggtatagtattatcttacctatatcatattaaactggtaggaaaagaggaatactcactgaaacacaggaggaacaggaaatgagaaaaaaagtactggcagcgcttctggcagctgcagtggcaggaacaactgttatgtcaggaatgactgtttttgcagcagaaacagaaggaaccaaggcggaaggcggaaatattaccattgcagaaacagcagatccgcagaacatcaatccgctttatgttgtggatcagacaagcttcgatatgatgcaggcactgtacagcccgttttttgagatcgtgaacggagagatgtattacggaaacggactttgcgaaagtgtaacagccaatgatgatgccagcgaattcacactgaagctcaaagacggactgaaatggcatgatggtcagccgatcacagccgatgatgtggtattcaccatgcaggtgctggtagatgagaagcagaatgttccgtactcttcttacggatacgttaatgacaaggcagtagaggcagagaaggttgatgaccttacagtcaagctttcccttggatcatcttccgcaggatttcttggcggactgagccaggtttactgtattccgaagcatatttatgatggcgtggagaatatcggagaaagtgatctcaacaatgaaccggtgggaagtggcccttttaagttcgaggaatacaaatccggagagtattataaagtaacaaaattcgatgactattttgatgatgtaaatctggattccatcaccttcaagatcgtaaaggattccagctccgccaatgcggcacttgcaagcggagatctggatgcacgtctgatcagcgcggatgattacgataccgtcagtgcttacgataacgtaaacatcaatacctataattccggacgtgtcaacgccatgttcatgaatgagctgaacgaagatcttcaggatgtaaaggtacgtcaggcgattgcatacgcactgaataaagaggagttctgtcagtttgctttcctttccgaggattatgcggagcctgcagattctattttcacaccggatacactctactatacaaaaccggacaacacctacgacaatgatccggctaaagcacaggagctcctttccgaagcaggaaagacaaatctttctctgaacctgatgtatatctccacagataagacaatggagagtgaggctctgtatgtacagtctgcccttgcaaatgtaggaatcaccatcaatcttcttcctacagatgagtctaccttcaagaataagacaaaggatccggagtgcacagattatgatctggtactgagcttctatactctgggagaagagccgagcctttacgcagacatgagttcttccgacagccgttccaactattccaggatcaaggatacagatctggatgcattgtgggaagatggcaacagcactgcagatgagacaaaacgtggtgagatttataaggagatccagaatacgatcaatgataacatgtatatctatccgatcgcttattccaatggtttctatgcggtaagtaaagatttcggaggctttgatgaatgtctgttaaaaactatttattatgattattccaagatctacacattggagaaataaataattttatagcggatgaataccggaaacagaaagaggctgacgcgtttttgcgccagccgatttcctgttttcggggaaaataaaggaggtacattttgaagaagatcgtaaaccgtctgatacagtgtattctgacactgtttattgtctctgttctctgctttgcactgacaaaagcagcgcccggagatcctgtcctgacttatgtggaaccaaatatgagtgaggaatatatccagaacctgagagaaagccttggacttacaaagcctctctatgaacagtactttctgtggctgggaaggatccttcacgggaatttcggaaactccctgatgaataaccgtccggtcctgacacagatgctggagaggcttcctgcaaccgtgatcctcatgggaaccagcatgctgcttggttttctcattgccattgtactgggcctgtattccggaaagaataaaaatggtgttctggataagatcaccagcatgttctgttatgtaggtatctccattcctacgttctggttcggtatcatgctgatctatctcttcagtgtgcatctccatatcctgccaagtatcggtatgcattcagacggcaaccgttccttaggagatctgatcctgcatatggtcatgccctgcgcagttctgacctttgcaaatgcttcacagtacatccggtatttaagaagcagtaccattacggaaatgtcctccgattatgttatggtgcagaaggcttatggaatgaaagagtctggaatccttttccggcatgtactgaaaaatgctatgcttcctatgattacagttctcggaatgagcctgcagtctctggtttctggtgccattatcaccgagcaggtttttgcatggccgggaatcggtcagctggcagtgaccgctgttatgcagtatgattatcccctgatcatgggaatcaccatgtttaccgcgcttctcgtggtgctcggaaatcttctggcagatatcctgtatgctgtctttgatccgaggatccgcaaagcaggatgttaggaggtaaagggacatgagagaaaatatctggaaaaatatcaaacttggttttaagacaaataaacttgcagtggcaggtgcagcagcgatcatcctgctggcactgatctccatttttgcctttttgtatccggtagatcccaatgccatcagcgccacagagcgactgaatgctccatccatggcacaccttttcggtacggatgatatgggacgggattatctggcccgctgtatttacggaggaagagcatcccttctggtgggcttcctttccatggtgctttctacagcccttggtgtgatcatcggttccatcagcggttttgtgggaggaacggtggatgcagtgctgatgcgtctggtggatgcgctgatgagccttccgacattcctgatcatgatcgttatgaatgccttcctgaaaccgggacttcagaacattgtcctgatcatcggctttctgacctggatgaatattgccaggatcgtccgtggcgagaccatttccctgaacgagagagagtatgtcatctatgcaaagatctccggacagaagaaattctccaccattgtacatcatatcctgcctaacatcatgcctaccattatcgtggctgcaaccatgaacattgccaatgccatcctgatggaatctgcactgagctttttcggcctgggtatccagccgcctacggcttcctggggaagtatgctgagcaatgcacagcgctatatccagcaggcaccgtatctggctattttccccggaatcctgatcctgatcacggtcgtcagcttcaattatctgggagaagtattaagaaaagtattcgagcccaagtaaggaggacatttacatatggaaaaattactggaagtaaaagatctgaaggtgtctttctttacagaccttggagagacacaggcagtaaaaggtgcaggctttgccatcggtgagggggattttttcgggatcgtaggagagtccggaagcggaaaaagcgtgaccaccaaatccattctccgtctcggaccatccaactgtaagatcatgggtggtgagatcctgttccggggagaagatatcctgaaaaaaaatgaagcagcgctccgtgagatccgcggtggtgagattgccatgatctttcaggattctctttccgcactgaatccggtttacactgttggcaataagatggtagagctgatccggcgccataccaatatgaataaaaaagaagcaaaggcccgggtgctggagcttctcacagccgttggcatcacagacccggaaaaggctatgaacagctatcctcacgagctttccggcggtatgcgccagcgtgtgatgattgccatggccatgagcagtgatccgaaggtcctgatcgcagatgagcccaccacagccctggatgttacgatccaggcgcagatccttcatctgcttctggaacttcagaaaaaaaacaatatgagcatcatcctgatcacccatgatctgggcgttgtagcgcagacctgtaaacgggtagctgtcatgtgtggtggatacgtggtggaagagggaactgtagaagagatctttcttcatccgggacatccctatacacaggcactgatcgcaagcatgccgcgggtgggaggtacctttgaacagtttctggagagagatctttcggacggaaacggtgatctgtgtcctttcctgaatcgctgtaaatatgcggacaaaacctgtgaagcttgtcttccgaaatattatgaggcttcagagggacacaggatattctgtcacagaagggaggagaagagatgagcaagcccttaattgaagtaaaagatctgaaagtatattttaaacagaaatctccgaagcttctgtcctttaagccgggcatactgaaggctgtggatcaggtaagcttttcgattgaaaaggggaaaaccttcggtctggtaggagaatccggaagcggaaaatctaccatcggaaaggcaatcctacgttatcataaacccacaggcggtgagattttttatgaaggaacagagatcggagccatgggggaaaaagaactgcttccataccgcaaaaaaatgcagtccgtttttcaggatccctattcctctctggacccaagccatacagtgcaggatatcatctgtgagcctatggcaatccataaaatgtacactccaaaagaacgtaaggagcgtgcaaaagaactgatccgcgtggttggcctcaaagagcaggatcttctgaagtatcctcatgagttttccggcggacagcgtcagaggatttccattgcaagggcactttccgtacagccggaatttgtagtctgcgatgaacccatttctgcgctggatgtttccctgcaggcccagatcgttcagatgcttcaggatcttcaggaaaagtacgggttgacctatctgttcatcagccatcagctgcaggtggtccagaagatctgtgatgagatcggggtgctttatcttggaaatctcatggagatcgcagatgcagataagctctattccaatccgctgcatccttatacaaaaatgctgatctcctcgattccggttccggacccgagagtcaaaactctggatcagatcgttacggataccggagtacagtccagatctatcgggggctgtcgcttccataaccgctgtccgtggtgtgaggaacgctgcagacaggaaaccccggcacttcgtcaggtggagccgggacatatggtagcatgtcataaatatcaggaaaagaaataatcataaaatacgggaaggtaaataaaaaagtggacaaaaatatatataaaaactatctggcgatcctccgtgaggagatgatcccggctatgggatgtacagaaccgatcgctctggcctatggtgcggcaagagcaagagagatccttgggaaagagccggagcgtatcgtagcaaaatgttccggaaatatcatcaaaaatgtgcgttgtgtgatcatccccaattccgggggattaaagggaattcctgcaggtgtgatccttggggcggtagcaggagatgcttctctggatatggaggttctttccaaagtcgatgaaaagggcagggcacgctgccgtgaacttctggaggcagatatctgtaaggtagagcttctggatacgccggtggtccttcacattatcatcgaaatgtatgccggtgaagatgccgtcagcctggagatcaaatacgaccatattaacgtgaccaggatcagcaaaaacggagagatcctccttgatgcagataaagcagtggaagaaaaggaagagacggaccgcggcctgttaaatctggaggatattcgggaatttgcagataccgtagagctttccgatgtaaaggagcttctggatgcgcagatcagaagcaatatggccattgctcatgagggaatgaccggaaaatacggcctgggtatcgggcgcgtgatccgtgaaaattattctcacgatatgctcaccagaatgagaagtcttactgcagcggcttctgaggcacgtatgggtggctgtgatatgccggttgtcatcaattccggaagcggaaatcagggaattgcatgctctgttccgctgatcgtctatgcaagagagatggagctgccggattacagcctctacagggctctggtgttttccaatctcctcacagtttatcagaagcaatatatagggaagctgtctgccttctgcggtgcggtatcggcctcctgtgcagccggagctgccattacctatatggtaggcggagatatttccctgatcaaaaaaacgatcgagaatacccttgccaatattccgggaatcatctgtgatggggccaagatttcctgtgctgccaagatcgcagcctgtcttgacgcagccttcctggcgcatcatcttgccatgaacgggcagtcttatgcaccttatacaggaattctccaggaagaaaccgcagagaccatcagctgtgtgggacagatcggaaaagacggtatgaaggaaacagacagagagatcctcaagatcatgctggagcattgatccgcatcggagacggcacagattaaacagaaaaggttggatttatggacaacgaattaagaattgcaatactgatcgatgcagataatgtatcagacaaatacatcaagatcatcgtggatgaagtggcaaacatcggcatagccacctacaaacggatctatggagactggaccagtgcacggctttcctcctggaaaaaggttcttctggaggattccatcatccctatccagcagtacagctataccaccggaaaaaacgccaccgattcggcgatgatcattgatgccatggatattctgtattccggaaatgtggatggatattgtattgtttcttcggacagtgatttcacccgtttggcagcaagactccgggaatccggaatgctggtcctgggtatgggagaggagaagacgccgaagccgtttatttccgcatgcaaccagtttaaatatctggatcttctctatcgcaaccaacaggaggaagagaagaaggaagatctggctactgcagcagaagctaaaaaatccggaaacaatagcaaacagagcagctccggctccaggaagaacaaagatctcaagcgtgtgcgcaaggccattaatgccatcatcgagaaattttctgacgaagagggatggctttcctccggacagctgggcgatcagctaggcaaacgacttccggattttgatgtgcgtaattacggatattccaagctgaccccctttatcaaatctctgggaaattatgagacaggcaggatccccacaggaagcggagggagaaagcagatctatttccggatgaaggaggataaacaatgaagaattatctggcacctatggagggcgtaaccaactgggtttaccggaatgcatatcatgactgtttttatcccatggataaatactttactcccttcatcactgccaagcccaataaacgtctcagcagcaaggagatcaaagaggtatcaccggaaaccaacggagatcttccggtgattccccagatcctgaccaacaatgcggaggattttgtgaaaacagcccatatcttccgggatgaatacggacacagggaagtgaatctcaatctgggatgcccctcgggaactgtcacagccaagggaaagggtgccggtttcctgggcgagccggataagctggaacgttttctggatgagatcttcgaaaagaccgggatggagatctccataaaaacgagagtgggaacggattatgaggaagactgggaacggcttcttgaggtctacgacagatatccgctgaaggagctgatcatccatccacgccttctgaaggatcattataagggagttcccagatatggcctgtatgaggaggcaagggaaaagctgaaggttcctctgggatataacggggatattttttcagtggaggcttatcaggaaatccgggagaaatttccggatgcagacagcgtcatgtacggaagaggcctggtcgcaaggccctatcttctggatgccattatgcaaaaagaagacggagaggatcaccgggaagaataccggaaaaagctacggcagttccatgaccgtctttaccgggattatcaggaatatctttcaggagaacgaaatgtacttttccgcatgaaggaattgtggagttatatggcaccgggctttaccaattatgccagatatctgaaaaagatcaaaaaatcccagcattttggtgactatgaggcagcagttatgagcctttttggagaacaggagatcttaaaggtatgaacagtataaaagaaaaatttgatgagtttatttcccagtatcccatttttgagtatcgtgtgctggataccggggatattaaagtacagtcacgtgtgcgtacgatctgtaaacaggaatgtgaacgttatgggagtacatgggcctgtcctccggcagtgggagagctgtcagaatgcgaaaagaagatccggagctatccgaaagcagttttcttttccagcgttgcggaggtatcggatatcatgaacatgaaggagatgctttccacaagaatggaacacgaagcgcttacagagaaggtacgtgattttctggagggagagggctatgagacctttacgctttccacggaatcctgtgacttctgtgaacgctgtgcctatctggacggaaaaccatgccgttttccggagcatatgcatccatgtctggaaagctatggcgtggtagtcagtgaaatcgtagaaaaggaagctatggaatacaatctgggtggaaataccattctctggttttccatggtgctgatccgcagataaaagacaaaaagcagatacagtgaaagatacataagaagaaatcctccggcatagattaatgataaaagccggaggatttttttttatgggaaaaatgtcagcttttctggaacttcccggggaaccggcatttcgggaggtgcaggtgatacttacgggaaaacgccgggcagtgatcgaaaattaccggaatatccagagttatacaagggagaagatcctgatattgacaccttccggcagacttgtgatccgtgggaaaaaccttgtgatcccctgctatacaacccttgaactatgtatccgcgggcagatcgaaagcattacgctggaggagggaaataagtaatgatcccaggttttgtgcgggtttctgttaaggggcagcagtgccagcggtttgtgaatctgtgcagaggcagggaaatggatctgaaaaggatcatccgcaccggtgagacggagcttcagctgactatgaaggtagcggattttctgcagatctcgccactgcggagaaaaaccggggtacatatccacatcctgaaaaaaagaggacctttgttttttctgcttttctgtaaaagaagaaaaatgatccccgcggggtttctggcagttttctgcctccttttttttctgtcaggcagagtgtggaacgttgagatccggggaaatattttaaatcccacaccccagctgatgagctttctgaaagagcagggggtctgtttcggagtatccagaaaaaagatcagctgcagtgtacttgcagcttccctgcgaagagaatttccggagatcacctgggtgtctgctggattttcgggaacgggcttgcgttttgatatccgggagggaactgccggagaaaaagcagagccggaagaaaaatcctgcagtctgttttcaactctggacggtgtgatcgattccatggtcacacggcagggaactcctcttgtcagggccggggatgaaataaaaaaaggccaggaactggtttccgggatcgtggacatcaccgatgacagccaggaggtcatccgctatgcatatgttcaggcagatgcggatatttacatccgacataccattgcctattacgatacctttccgttggacatagagaaaaaggtacggtccggtaaaaagaaaacaaggcttttttttcagctgggaagctggtttctggacttttcctctcctctgaaacaaaatgaggaacgcctcgtcagccgggaacctcttttcagtatcgggatttttcgttctcctgttaccctggggatcgctgcgatcggaaagtacgaagtacagaaagagcagctgacagaggatgccgcaaaaaaacaggccatacaaaggctttatgcctatgaagaaaaattaatagaaaaaggggttcaaatatctgaaaataatgttaaaatagaaataaatcaccaggactgcgtcagcagaggcacttttaccgtcattgaaaggaccggaagagaagcccccacagaaaaaaagacgcagccaaaagaaaggacaccagaggatggctagcagcattatcgaattatatgtggatgtgccggcagaccgccaggcgaatattttcggacagtttgacgagcatctgaagctgatcgaacgtactctgaacgtaaccatgattttccgtgacggttctcttaagatcctgggaagccaggagggagccacacaggccagggcgatcgtggaggaactgaacacacttgcgggcagaggcaataccatcacacagcagaatgtgaattacgcactttcccttgccatggagaagatcggctccgtgatggaggagatcgacaaggattttatctgtaataccatacagggcagacccatcaagcccaagactctcggacagaaggactatgtggaacagatccgtaagaagatgatcgtgttcggcgtgggacctgccggaaccggcaaaacctatcttgccatggctatggcagtaactgcttttcgcaatgaggaggtttccaggatcattcttaccagaccggccattgaggcaggcgagaagctgggattccttcctggcgatctccagagcaaggtcgatccctatctgcgtcctctttatgacgcattgtatcagatcatgggcgcagacagctttgccaaaaacatggagaaggggctcatcgaggttgcccctcttgcctatatgagaggacgtacactggataatgcctttatcatcctggatgaggcgcagaataccacacctgcccagatgaagatgttcctgaccaggatcggcttcggttccaaggtgatcatcacaggcgatgcatcccagaaggaccttcccagggacaccacgtccggtctggatgtggcgatgaaggtgctgaagaagatcgatgacatcggattctgtcagctgaccagcaaggatgttgtacgtcatccacttgtacagcagatcgtgcaggcctatgacgattatgaaaaaaaacagaagcctgacaaatccaggaaggatgacaggtatgctgtgaaaaataaggagtacagaagatgaccataaatatcgaatatgagacagatcaggagttaggcattgactatgctgcccttgcatcccaggttgcggacaaggttcttgaaatggagaaatgcccctatgacggacaggtcaatcttgtcctgacagacaatgaggagatcaagagggtaaatacggaattccggaatatccaggctcctacggatgtgctgtcatttcctatgatcccctttgagacaccggcggattattccgttgtggaagaggatgagtcctattttgatctggacagtgatgaactccttcttggagatatcatgatctccgtgcccaaggtttttgcccaggcagaggaatacggacatagtgtgacaagggaattctgtttcctggtggcacacagtatgctgcatcttctgggctatgatcatatgacagaggatgaggcaaaggtcatggaagccaagcaggcagcggcactgaaggagctggggatcaaccgctagacgggctgtcccacggaaaagctaagcggaaaactcttccgctttaagaaaaggaggtaatatatgagaatgaaaaagacaggtatcctggcaggtatcacagctgcatgcatctgcattgcccagactgttcccgcttttggagcagggcaggatctggtaggctttgtccccaatgaggagaaacaggaagaaactcaggtaaagagttatcttaccggcgaaaatgtttcggagagcattggacggagaagaccggttgccgtgatgatgggcaacaacagtgtcggagctccccagagtggtatcggacatgccggtgttgtctacgaagcgccggtggaaggtaatattacccgtcttatgggcattctcgaagattacgatgagctggaacggatcggttccgttcgcagctgccgtgactattatctcttttatgctaatgaatttaatgcgatctatgcccactacggacaggctgcctatgcactgccttatctggagcagcatgtgatcgataacctcaacgggatccagatcggcaagctggcttttttccgcacaacagacaggaaggcacctcacaatgcttacacagatgccagtcaccttcaggcaggcatagatgccatgggatacagccaggaatataaagaagaatataccggacattatttttttgcagaagatggtacagagactgtaccggatgggatcacagccagccttgtgaagctggataattttactgacaatcatccctggtatgaatacgatgaagagacaaaggaatataagagattccagtttggcaaggaacatgtggatcagctggataatgaaccgcttacctgcgacaatatcatccttcagtattcatcctgcccggcctacgatggaaacggctatctgaatattgatgccatttccggcggagagggcaagtttattaccagaggcagagccattgatatccgctgggagaaggattctccatgggggatcacgcattattacgacggaaatgaacaggagatccgcctgaatccgggtactacctgggtggagatcgtacagaatgaccggatcgattccgttacttatcagtaagactaaaatacaggtatcaggagaaacaaaaaacatgaacgcaaattacagggaacgactgaaagacaagaaacgcattgttatcaagatcggatcatcatcactgatccacgcagaaacaggaagactggatttccgtaagctggagatcctggccagagagctcagcgaccttcacaatcaggggaaagacgtagtgctggtatcctccggagccattgcggtaggtgcagctgcactggggatgcagggaaagccggcagagcttgagaaaaagcaggcctgtgcagctgtgggacaggccaggctaatgaccatttatcagaagcttttcggggaatacaatcagatggtggcacagatcctgatgaccaagaataccatggtcaacaataccaaccgcaggaatgcccagaataccttccagcagcttctggcagaaaaggtgatccctattgtaaatgagaacgactcggtatcctcctacgaattccagaacctggtaaaattcggagacaacgataccctttcctctgtggttgctgcattgatcgatgcggatcttctgatcctcatgtccgatattgacggtctttttacagacgatcccaattccaatccggatgcacagtttatcgacattgtagaaaacatggatgacaatatgcgtaagcttggcaaatcctccacaggaagcaatgtcggcaccggcggaatggcgaccaagcttaccgctgcgatcatcgccactgcggcaggggccgacatggtcattgccaacggaaacgacttccacaacatccacaggatcgtggaaggcaggagctgcggaacattatttgtaggaaacaagaaggaagaattcttcctcattgattatatcgaaaaactgctttaaggagaataacattatgatggacaatatcaagatcgacaggatcaacgcactggcacataaacagaaaagtgtaggtcttaccgaggaagaaaaggtggaacaggcgaagcttcggagagaatatctggatgcagtgaaaggaaatctccgtgcgcatctgaataatatcgatatcaaagaaaaggatggcagcatcaccaatcttggagaaaaatatggaagaaaaaaaggaaattagaaaaaagatcttcaaagccagaaaagaacataccgatgactggatccgggaaaacagtctccggatcacagaggccctgacacagcttccggaataccggaacgcagaacggatcatggcatacgcagattataaccatgaagtgatcacacgctacatcatcgagcaggcctggaaagacggcaaggaagtggcagtgccaaaggttttcggaaaggatatggtattttacagactgaccgatttcagtcagctagaatccggctacttcgggatccctgagccaaaggaagacggagaaacggtttcctgggaagaagccatgatggtcatgccaggggtggcttttgacataaattgcaaccgggtaggctatggcggcggtttttatgaccgttttctggaaaaacatccggaggtctgccgcgttgcagtaggattttccttccagatccttccggaagttcccacagagcctacggatatccgtccgcaggtcattgtgacggaagagaatatataccgcgatgcacggtaagatattgctgtaaagacagaaagaaaggcaggaatatttggaaatgaatgaaatgcttgaaaaattgggacagaatgcgaaagatgcggagatagtccttcgaaatctttccacaaatgacaaaaataaaaccctggaagctgtggcaaaggctcttgtcgctcataccgatgagatcctgaaggccaatgccctggatgtggaaaacggcaaaaagaatcagatgccggaaggactgatcgaccgtctgatgctgacaccggagaggatcgaaggaatggcagacggacttcgtcagcttaccggtcttgaagatcccatcggggaagttaccggtatgaaaaaacgtcccaacggacttctgatcgggcagaaacgtgttcccttaggtgtgatcggcattatttacgaagcacgtcccaatgttacctcagatgcattcggtctttgcttcaaaaccggaaatgtcgtgatcctgaagggtggaagcgacgcgattcattccaatactgccattgtcaactgtatccgtgaggcattaaaagcctgcagcattaccgaggatgctatccagctgatccaggatacctccagagaaacggctgcggaatttatgaagctgaaccggtatgtggatgtactgatcccacgtggcggaagaggactgatcaaagcagtggtaaaccagagtacgatccctgtcatcgagaccggaaccggaaactgccatatctatgtggacgagactgcagatcttcagatggcagcggatattgttatcaatgcaaagacccagcgtgtgggcgtgtgcaatgcatgcgagtcccttcttgtaaaccgcaaggtgaaggacgatttcctgccggtactggccggacgccttaaggagaagcatgtggaggtccgtgcagatgaagcggcaaaagctctgatgccgggagcagttcctgcaacagaagaggactggggaactgaatatcttgactatatcctttctgtaaaggtagtggattccgtggaggaagccattgcacatatcaataaatataatacaaagcattcggaggctatcattaccaatgattatacacatgcccagaaattcctggatgaggtagatgcagcggcagtttatgtgaacgcttctaccagattcaccgatggaaatgagttcggattcggtgcagagatcgggatcagtacccagaagctccatgcaagaggcccaatgggactccttgcactgaccaccaccaagtatatcatttatggcaatggacaggtacgtccgtaacacaaaaaagtaaagcgggtttttcggtccgctttacttttttgaagtgttgtgctatacttttttgtaattggatttaaaaagactaactcataacaggaggacttataaatgaaaaaaaagcagctttttgcagtcctgcttgcaggttccatgactgttggaatggcacctgccgcagcgtttgccgctgaagataccggagcggtaacagaggcagaagcaccgactgcagacgagaatacagaaacaccagatgatggagcagctgtggatgaccagtcccagagtgaagccgacgcccaggcagcagcagaagcccaggcagcagctcaggcccaggcggaagcagaagctcaggcagcagcccaggcccaggcagaagcagaggcccaggcagcagctcaggcccaggcggaagcagaggcccaggcagcagcccaggctcaggcggaagaggcgcagcaggagcagacggaaactgtaacaggaacaacagtaaccgatgaagctggattagcagcagctattgcggccgcttctgacattgacattaataatgttaataaagacaatcttacgacgatcgttatcagtggaacagttcagattacagcacccgtaacgattccggcaaataaaggtgttttgatcgttggaaaagacgatacatccatgatacagcgtgcagccggctttacgggtaatctgtttgacgtaagcggtgtactttatatgcttgacaatagcgacagcacacttgttgttgatggtggctctgtcaatggtgtaccggcagcaggatctttgatccatgtagccagtggcgcaaaattttcaatgtcaacaggtatcacgcttactaacaataaggtcgtagcagatgcaacaacagcagatacaacagctgcagctatttttaacgaaggtggaatcgttcatatttcaggcggtacgattgagaataacagttcagataaaggtgctgtctatagtacaggaaaagtttttattgagaaaattgaaaatacagcagaaacagaaccggttattactaataacacaaaagcggatggaacaacacctgccaatattattcttgctggagaaggccagcttgctgtaaacagtgctatagcagatcctcagattggattttctgtggaaaatgctgaagagaggctgcggaattcatctgcggtaattgtaaagggtgaggactgtcgtaatgaagattatccacaggcactccgtgtactggctggaaaatatgaagatgttaattataaagttaatccagagaatggtcagcttgtttccaacagaccagtcgttaccgttactgctaagagtgaaaaagcaaatacggttactgcaagtattaaatctgacaaggccggtacatattactataaatgtgtggcaaaaaataccgaagctccgaccattggtggagctatcaaaggtgaaaaagttgaagccgaaaaagcagtttctctgaatcttactgaggttaaagacacgtccattgatctttatgtatgggtaatagcagatgacggatctgtcggtgaagctgaaaaacagacgattgatgtaacacagccacagaagccagacgatccgaaaccggcagcaccaaaggttacaaaaatcagcgcagaaagtaaaactgcaacaactgcagaagtagttcttcagtccgataagagtggtacatgctattataaatgggtggcaaagggagcggataaaccttccattagcacaactaaagacagcaagattgagatcactgaaaacaaagattttaagattgatctgaaaaacctgaaaggtgatgcgattgatctctatgtgcaggtagtagcgaaagatggatcaaagacagcagtgaccaagattgcagatgttactttgaaagtaacacctgcgaagatttccaacgtaagttataaatggaaaggtcatacatctgctactgtaactatgcgttctgataaagcaggtgtgtactattatgaatgtgtaaaacgtggttccaaagctccgtcagctgataaaatgagcaagggaaaagatgtttctgcaaataaggatttcacgatcagtttgaaagatttggatgcaaacaatgcaattgatgtttatgtgagcatcaaaggaactgatggaactgtaagtacaccaaagaagattgcattggatgaagctaagcgtccggcaaatgtcagatgggttggattttcatggatcaaccatacatctgcgaatgttactcttatttcgaataagagcggtacctgttattataaatgggtttctcgtaacagtaatggtacgtccgccactccgaaagatcttacatctaccggaaaacagacaacgtttactgctgataagaaatttaatatcggtcttgaggatttagactctgacaatccaattgatctttatatccagatcaaagataagaatggtgttttgacgaatccattgaaaatagcatttaaagaagattccagaccgaaagttgcagatccaactccgactaacacaccgaatgcattcatcccggatgtaaaagagagcatagtacagggactggacaaggcaattcagttctatccgaatcagttctatgaatttactgtgatcggtgcaggaacaaccaaccaggatccaaatgagggtgatgtgaagtgggttccggtttactggagtacagctgcaaacccaacccaaagccagatgcatacagcatggaagattggttccgccaagggaatcaacaaagacgctacatacaacctgtatgtattcttccagaaatacgtctacaccggtggtcagtggcagcagacagatactattgaatctgcggtatatcagtttaaatctgcaaaactgacacctaccggaactccgggagcagacggttcatatggcggcggtcagacaggctctgatccgaacgcaaccataacaggagaggcatccgcaacatcctccaacggaggcaacggaaccagatctaagaatgcagtatcaacagccgataactcaccggtcggaaccatgtccgcactggcagtggcatcacttcttgcaggtggatatgtgattgtgagaagaagaaaaaaagatatttaaacgcacaatagccaaagtagcataagaaataaaaaatcaccggttttccgaaagaacaggaaagccggtgtttttttgtaaagataaatttacagattttttttcttatagataaaccaggaagctgcaatgctgaatgcaattagatagactgtcaggatcaggacactgaggtaattgactccaccgccggaagcaatggtacggatcagatgactggtctgtgacagtggaagagcagctacaaaattcccaagaaagcccgggatcttctctgtagagaagaaggtgttgcacaaaaaagccattggcataatgatatagttggaaaaacgaggtacatccgcatggtttttggcaaggaaagaaaccacaacaccgatggctgaaaatacagcaccgttgaggaacatcaccagcaatgaccatccgttgaacacaagaccggttccgatcggcatggtcagaagaaggatgatccctcctgcataaagcccacggagactgcctccgatgatctgtccggcaataaactgccacagaggtgtcggagatatcataacctggtcaaaggctttctcgtaaagacgctgtacattcagattctgtgcgatagcattaaagcttccgttcattgtagtcagtgaaactacaccagggatcaggaaattcagataaggctccccatgtgaggaggtctggatccccattccaaaaacgatcagatacatcagcggcgcgatcatggccgccagcgtgatcttatagaaatcccttcggaactccacccatttttcccataaaatagtaagtattcccatgataattcatcgtccattctgttaaattataagataactgtggctgacgccggcttatcgctgcatcagatgcctgcctgcgcgctccacaaaaacatcctccagagttgtctcgcgaagggtgcactgtccgtccagagaggacagaaaagagatggcttcttcccggctgtggaagtagtggctttttgccccttccggtgtttcctgatctacggtgtatttgcccaggccgtcgatcaggcccgatggagtattgatctcctccagctttccgtgatccataagagctacccggttgcaaagagactgtgcctcttccatatagtgggttgtcagaagaatggtcagattttttccgttcagctgacggagaagattccacatctgtcgtctggatagcgcgtccatgccagcagtgggctcgtccagaagaaggatctccggacttgtgagaagtgcccggcataccataagctttcgtttcataccaccggaaagcttccttacagtccgcttacggaagggaagaagtccgcagaaatccagaagctcttcggttttccgtttgatttcttgtcgtggcatgaaataaagacggccctgatattccatgatctcatccatgttcatatcctggcgcatggagtattcctgagtgatcacgctgatcttgcgtttcagatccggtcggttgcgtccaagtgtctgcccgtcaatgaggatttcgccctctgtgggcaggagcagagtggaaagcagactgatcgtggtggtttttccggcaccgttgggccccagcagaccaaaaaattcgccggtttctatgcgaagatccagagaatccacagccgtaaaactgtcgaatttttttgtgagattttttgtttcgatcatctctgttcatttcctttcgtttgtatgcaaatttcattctattatactggaaaagaagagacatttcaacaactctgagatgttctttacagaaaaggaacgttgtgctatagtgatacgaaggaaaaacagaaaacggagagaaaaccatgaaacacaggatgagaacaataatgctgattcttctgactatgctgctgctatgccctatacaggttctggctgcagatggagagaacgcagtgaagacagatctggaggacggagaatattccatacaggtggagctggaaggcggaagcggaaaggccagcgtttcttctcccacgctgatgctggtaaaagaggggaagatgtatgcacggctccagtggagcagctccaactatgattatatgatcgtagatggggaaaaatatctcaatgagagtgaggaaggcagaaattctgtttttactgtcccggtaactgtcctggatgataagatggaagtgatcgcagatacactggctatgggtgcccctcatgagatcgattatacactgaccttttatgaggcttctattggctccaagggccagctacctcaggaggcagcgaaaagagtggttgcagttgcgctggtgatcatcatcggcggcggtatcctgaattattttgtaaacaaaaggaatcggtgttaaaccggttctttttttatgccctttcgcataatatacataataatgaacatgtataaagacggaaggaagggaacatcatggatacagtacaggataaaacctacgaagcaatttattattcactgtgggaggctgccaggcgttacagcggctttacgcagtttcgggtgatcggaaaaagccacgatgaccggatgatccctatgctggagatcggacatggagatgcctgtattttctgtgtggccggcttttccggaacggatggacagatgacggacaggcttaccaggatggcactggagctttgcaggatatatgaatgcaactggactgtggacgagctttatgaggtaaaaaagctcctggatcagaccaggctttgtatcataccggtggtcaatccggatggatatgagatctgccggaagggctacaatactgtgcgaaatcccattttccgtcagatgctgaaaatgcaggatgttccctgtgatgaattcgaggggaatgcaagaggaatggatactgcacggaattttcccaccaccttctgcagcagaaaaaagatccatcagcagcctgccagtgaaaatgagacacgggcgctgatccggatctttcaggaatacggaggacgtggcctgctggttttctgcggatatgggaaaaaggtggtttattaccggcgggatcagaatttttccactggtcagagatgctaccgtcttgcacgtcacttaaaaaaatgtaccaggggaaagctggagcagctggcaatagaaagagaagtgcagaacgggcgaaggagcacaggcaggccggaacagtattacggagaaatgatccgtcagccggctttccggatcgaattgccggtaaattccggaaataaagaagaggaagaacgggaaatccgtgatctgctgctccttccattggaatatatttactctctggtacagctgtaaaaaaatctggcgttgtgcggatgcagggtctgtcagcttatgaagaatagggtggcagacatacccgctgagaaaccagtgtcgaatcctgtcggacgaatttgattgacttccggggctgcgaatcctataataacatcatctgaaacaaatcttttttaacaaatgttgcaggaattctttcatctctgtatgtgatgagaggaactgcacatctgagcatatctgctcgaataatttccattcagtatttttgctgtattatcattttgatcatgcttgtccccacttcaagatctgggagtttaagtgatgggagcatgttgcgaactgccatattaactgctatacagggaggacttttttatggctcaatttatgtggagcaggtctccgccggaatttttctgatgtccgaacactgtttctttccctgcagagggaagtgatcatcaaatatcgtatatagaacagaatacaggaatgaaaatattttttcgatgtatcggcaacacggttcttgggctgatgctggtgacagcattggtacttttaattcccggatttttcgggatccggccctatgtggtctattccggctccatggaacctgagattccaaccggagctgtggtttttacaaaggaaggagagttttctccgaaaaagggagatatcattacttttcataacggagataccgttgtaacccacagagtggtaaaaaaagaaaaggatatctttatcacaaaaggtgacgccaacaagacagaagatcctgttcccgcagaggcgtcacagatcatcgggcgggtagtctttcacctgccttatctgggctacgtgatccattttctgaaagcccggatcccttttgccgcagtttgcattgcggcatgtctgtcagtactctttgatctggcatataccccaaaaaagaaaaaaatacagggaggaatttaatcatgatgaaaaacagaaaactggtaaaaggaatcgcacttgctgctgtgatcactgcactggcagccggaggaacagcggcatatcttacggattttgaaacggcaaccaacagctttaccgtagggaaagtggatatcgacctggatgagcctaactggaaaccggaggacaatacagatctggttcctactcaggtgatccggaaggacccctatgtatcaaataaaggagtaaatgaagcatttgtatatctggaagtttctgttccggtccgaaatgtgatcacggcagccaaggatggcaccaggaatgcgcttgcaaaaacagagctgttcagcttcaccaaaaacaaggactggacacagctggagcggaccgaagtggggcagaatatggtctatacctatgcatataaccacatcctgaagccgggaacaaagacaacaactctttttgatacagtaacctttgccaatatcatcgaaggtcagctggatacacagcagatcgatatgccggtacgggcttatgcgatccaagctaccaataccggggatgacaagactacggttctggagcaggcaactgctgcttaccagaaatatgtaaatcagaataaaggacaggccggtggtgtcacgaaatgaataaattaaaaagacccgttttccttctcctgacaacagggctcctgtgcgcaacagggactgcggcgtatttttcagacttcgaaaaaaagataaattctgctgcagtggggtatgtgacaacggagatcgaggaagattttccggatcctacacctacgcctatggagaatggcccgtcctacagaaaagagatccggatcggaaatttttccggcagtgtgaaagggttccaggcagactgctatgtgaggatgtccctttcctactccaatgacgatatcggcagaggcgtgaaattaacaggtctggatacggcaaactgggtgtataacagtcaggacggctattattactaccggaaaaaaatatccgagggtgaaaaaacaactcctctgtgtaccggatttcagatcgatccccaaaagatcgatgatacttatagggacagcattaaagattttgagatcaatgtttatgaggaagctgtacaggcagaaggattttcagattatgaaagtgcgtggaggtatttttcagatccggtttctgctcaggcagaaaggagggggaatgcttgaaaaaacaccttaaaaccctgctggcaggtgctgctgtggcaggcagtatcctggcgtgtacggctgcttatgccagattttcagattccgtgacagtgaccaatcacatatcagtgggagatatcaatatttctcttcgggaactggaaaaaaaggacggccgagaaatgaaatatcaggatcgccggatcgttcttccgggagatgaaatatccaagatccccaggatcaccaatcactcagagccatgctgggtaagggtgaagatctcttatacagatgatttggatggtttggatggtctggatgacaggaatcttacaggaatgtcaccgagatggatccggaagggagagtatttttattataccaggaagctggaacagggagacagcgtggatatttttaccggtgtgactgtaccatcccaatgggatgaatcctaccaggataagaagctggggatcaccatcgtggcggatgctgtccaggcggcaaattttgcaccggatttccgtgccatgtcaccctggggaaatcagaagatcttaagatgtatccacgataccgatggtcttgtggttcagaaaaaaagtccggtggatctgaaggtggagtttgaaggaaatgcgcacaaactgatcgctgctccggaagactttttttccggattttccacggcaatgccgggagatgtttttcatgattctgtagagatccgtaatacaacggagcatgcagcagagatcttcttccgcacatcaccggaatgtaaatcggtaaaggatcaggaatttctgaaaaagctgaagctggtgatcaccatgaatgataaaaagctgtattccggggatcttctggctgcatctctcaataaggccgtgtccctgggggaattttccagcggagaaaaaggaaacatgagatttgaggttacggttccggcagagctggataatttatatgctcttcgagctgcagatgtgaaatggatcttttctgtggaggaggatcaggagacggcagataccagccctgttccacgccggaatggcaggaaagaagccacagaaagagcttccggaaataacagttcttcgataaggacaacaccagtgaagaccggagatgaatctcctgtgatcctgtttgcactgatggctggtatggcgctgcttacctgcagtctgacgctatggaaaggaggacgaaaaaattgaaaagaagaatgatcggtgcatggatggcattgatgatcacagcttcttctcttgtggtttcggccagtcctgcagcagatatgagttcggtatcagcagatctgcagcaggaacagacagaaccggaggaagaagaggaggccccggatattccggtaacagatcagcctggggaggctgagatgccggttccgacagccttgcctgaaccggaaacggtggaggaagcttttgaagaaggtaaagataatactgaaaatgcggacagtgatgagctgatcgaaccggaagctgtttcaaaagaaggagaaaatatagctctaacagagataccggagcagacagaggatccgggatttactgtattcacggaagaaaacgcggaaatccttacaggagaaagtgaagaggatcaggaactgatccaggatatcgaaaacggagagattattgctctttcggcagcacttcccggggagttccgggaagctggcagtgcggaagtaatctcagaaggagaggatgctatcgcagctacagcactttccccgtcccagtattatctggacagctggaccagggtttactgcgatgagatctggacagctgccaatgattttcttggttccggaaataaaacccgtatgggatgtacgtatcgttctgtacattatattgatgatacaggagaggaaaaggtttcacctctgtattgcctgaaagcaactcaggatggactggacagtatgacgctgaagaatgaggcagtaaaagcactgactaattctgtgatccagaagcttttgtactttggttacggaggaccgggggatctgggaaccggatacgacccctcctgcagtcacatagactggtcaaaatggcagaaccgttatgtatttacgcatattgcgctgtcaaaggtatattttaatgactgtggatatgccacagcagcagaagtagaacatacaggaataaaccgtctgatcgataagatccagacattgacgatccctgcaagaaacaaggcagccgtttatgtttccgaagacggttcctgggcagcagcatccggaaagacgatcccgttaagtgtattccgaagcagacctgcaggttttccctttgttccggacagtatgaaggacggatttcagatgagtactcttatgaaagtaacagatggagcaaaagcagggaacgggatcaccataacaagaggagccacagaaaaatggcagctggcctactggacgagcgcagcggattataattcacagaaaaccaatcctaaaatgatgtcggggacaagcctgagtctgaaggatggagcatatttttttctgatctttccgttaaatacatctgcgacaaagaagttttcctgcaaaatgctgcttcagccggtttcctatatcctggttgacggaagtgcccaggcaggaaaagatggagtacaggattttggtgcttacgtataccagggaacaagaggaagcctttcgttttcagtaaagccatcggtttacggcaatgcaaagctggtcaagaaggaacccaacacgggaaaactgatccagggagcgcagtacggactgtttgcagcagaagctctgacctccggatatcgtactatgtacagtaaggatcagaaagtttcaaccggaacaacaaacgctggtggagagatccttttttcaaagctgcttcccggaaaatattatgtgaaagaaacgaaaaccgctgccggatacaagctgaacaccgttatcaaaaatcttacagtaaccggtggaaagacaacaaccgtcaacgtaacggatatcatggatatcagcggaacagtatccatcagaaagaaagacggaaataccggtgatccactggcaggagctgaattcaccctgtatcagtggagtaaaaaaagcaaaagctatgtaaccttaaaaaaactgacttatgatggacagaaacgtatctattattccgggaaatttaattataccgaagacaatcagggaaaattccgtgtgcgtgagacaaaagctcctcccaattacaccggaaactggcagaagaattttacgctggaaaagccgggagaaaagcaggaatttctgtttgaagcagtgaactaccagaacgaaaaacgaaggatagaggttcgtaagatcgatgcgaagaccggtgaggtcctgaagggtgcggaatttacactttatgaatacagtgcagccaaaaaagcctataaagaaaaaggaactcttctggattatgacatctccagtgaactttatgtaagtggtgaacttttaaagacttcggataatgagggaaaatataagatcgtggaaacaaagactccgcccggatatacaggaagctgggaagaagaggtggatatcacagacaaggatgcacgcctttcctttgaagttgtcaatgaaaaggaaaaggaatataaaggggtgatccgtctgagaaaaacagacatctatacaggggaagttctggaagatgcggaatttaccgtgcttcagtggaatagagggaagcagacttaccagaatgacctgggcgtgcagagcatcctgaagtttgacataaaaaccggatggtactctacggaagagctggtgcttacagatgctaatcagggaaggttcaaagtagtggaaacaaaaaatccggaaaactatacaggcaaatacgaaaaggaggtaatcttccagaaaaaagaaaatacagatacggatactgtggatctgaaagcagagaatactccggtaacacttccgctgggaaatatcaccatcataaaaaagatcaaagaggaggatattacctgggctcatggaaatccaaccttttcctttgtggcagaaggtacggatctatccggaaatcctcacagatatgaggattatgtgacctttaccagaggaagctatgaaaccgataaaaatggctatgcaacattatcggtcacgctcaggaatgtcccgctggggcagtatacggtctgggaaaaaccggtactacgctactatctgaaagatgtacgggcaaatacagagaatgtccgcatcataaaaggcgctgcacctgcatatggtacagatccccggaagattgcttccggtacggctgctctgacaatgcaaaacaaaaatgcatcgctgacttttgtaaatgagaaatccagatatgatcgatattcccataatgacagcataaaaaataccatacccgtatcattttcctgaaaaaaatacagaggggcaggagtaatcctgcccttagctgcgtattttatatagtaaaaaacaaactgtaaaaagaaataaaaaaactacatatatacccaaagatatggtatacttttttacaaatactgtgaactcaagaactctctggggggcgatgatgaaaacagacgaaaaaaatcccgtttttgatattcgggatacattggaaaaatacgcttgcatttatcgaaatactacactgaagatttttcagtactgtcaggagacggacacatatgaacgtctggatgaatacctgagacctgtaaaaaatattacggattttaagaacagtggacagaaatacagcaatgtttataaagacgactggaagtttctgacggattttctgacatcccgggaaggcgggacgatagaagttcggtgtatcaataaagacggtaatgcgggtcttatgacagtacggggatttatagcacaggacaaaaatactggatatcattattttataggaagctccagagatatcaccagggagaagctacaggaagaatttcttgaggaacgtgcccaaaaagatcctctgaccggactgtataaccgctttttcggaaaagaactgatcgatgaataccttgcatccagaaatccctatgcaggatgcgggatgatggtgcttgatgtggattattttaaaaatgtaaatgatacttacggacatatgttcggtgatgaagtcctgaaacgttttgcagagctgtttgtggctttgctcgacatcaatgatgtgatcatgcgcctgggtggcgatgaatttgtgatctttttgaaggacatcggacatgccactatcatgaaaaaggcaggaaagctgatccgggaagtgcagaaactcaaatttcccggaaccacatatctggcaacctgcagtgtagggatctgctttcttccggaaaatgtttccggatatacatatcagcagctctttgaaaatgcagactgggcactttaccaggcaaagaaaaatggaaaaaaccgctatgctttctgtgataatctgagacattttgaggataagacagagaaaaagcaggaattatatgagggtgttgagatagatgccagatatcttcataatgatattgtttctactgcatttgaaatatttgaaaaaatgagcagctttcagactgctattgaacttctgatgaaagtgatcggtctgaaattccgacttaaccggatcacaatcctgcgtactgaagtggcagagcagaaaacagaccggatttttcaatgggtttcggaagaggactacagacttttgatagatgagatccattttttaaaaagtgattttatcacattatttcgccataacgatgaatatggtactgtggtccttcaggagagcgatctggctgattattcggaacagggaagaaagaatgtgttacaaggtggagcaaaaaccgtagtctgtgctgccatgtactgtgaaggaagctatacaggaactattgtatatgtgacctgccgggaaaaaagactctggtccagagaagaccgtaaactgctgggagaagttaccaagatcatttccgcgcattatgccaagaaccaggcatttaacagtgtttatcgtggcattgctgcagaatccggatgggatcagcttaccggattgtcttctttttcaagatttcgagaagatgtggagaaaatgctgatcggaggttacggtccgggacatgcagtgatatataccgattttgaaaaatttaaacgtatcaatgcaaaatacggataccgtgtgggagatcagatcctgcggcagttttccgagtatgtgataagcactcttaaaacagatatggatacatattttaccagggcgatctctgatcattttatcctcttcactccctgtgatatggatggtgatctggaaacagttgctttaaagatcaatcaggaattcttacggcagatgaaagagaaatacccggatatgaagctctgtgtccgcacggggatctatctgatcaccaaagaatgtgccaatgcatctgaggcaatcgatgcagcgaattatgcaagaaaatatgctgctgaaaattgcgaaacaggtgttaagctgtatgacgaagaactgaaaaaacaaagcgatgcagagtgaaagacacaggaatacggaccggaatccatgatttttcagaatttcaggaataaactttcaggaaagcttttacaatagaacagagatgttttcggcaggagtgagcttatgaacagaagtgttccggaaagccttttaatctgcatcttagtcttatgcctggctctgacacctgttggtgtcaggggggaaactgaggatagcagaaaagcacagcagctgatcgaagcgccgggtgcagttcttatggaaaaagaaaccggtacagtgatctattccagggatcctgacacccgaagaagcccggccagtattacaaagatcatgacgctgatcctgatctttgatgctatccgtgagggaacactgcatttggaggataccattaccaccagtgcctatgccagatccatgggagggtcgcaggtatttctggaagagggagagacacagaatgcggaaaccatgatcaaatgtattgtgatcgcgtccggaaatgacgccagtgtagccatggcagagcatgttgcgggaacagaacaggcctttgtggagaggatgaacgagagggcgaatgatcttggaatgaaaaatactcattttgtggattgctgcgggctgacggaatcacaggagcattatacaacgccctatgacattgcacttatgagcagggagctcatcagcagatatccggaagttcttacatattcatctgtctggatggaggatatcacacacgttaccagaaaaggttcctcaaaattcacactgaccaacaccaataaactgctgcgcagctatgaggggtgtatgggacttaaaacaggcagcaccagtattgcaaaatactgcctcagtgctgtggcagaacgaaacgggatcacactgatcgcctccgtgatggccgcaccggacccgaaaacaagattccgggatgcagcagctcttttaaattacggcttttctaaatgcacattgtatctggatgatgctctggagccactgaaacctctgaagctccgcaaaggagtcaaagagcaggtttcgcttgtatatagagggaaattccgatatatcagcacagatggaacgaaacctgacaatgttaagaaaaagttgatcctccccaaagaacaaagtgcgccggtgaaaaaagggcagaaagcaggggcacaggaatactatcaggatgggaaaaagatcggtagtctggatatcctgtacggggaaacaataaaaaaggccggataccatgactggctggaaagaacctgtcaggcatttcttttgtgatgcctgcaacatattttgacaaaaagggcagactggatgtataatacaacggattgaagaaatagcagaacagggaagggattttggatgaaagagatcagaacagaagatgcagtgggacacattctgtgccatgatatcacgcagatcataaaagatgagaaaaaaggcgttcttttcaaaaaggggcatgtagtgaaagaagaggatataccactgctgctctctgtaggaaaagaacacctttttgtgtgggagaaaaaaccggggattcttcacgaaaatgaagctgcagagatcctttacaaaatctgtgccggaaactcttccaaagtacatggaactgagatcaaagaaggtaagatcgaggtggtatcaaagatcgatggtattctgaaaatacgtcgagatgcacttgtggctgtgaattctctgggagaaatgatgattgcttccagacatggcgattttccgataaaaaaaggtgataaggttgcaggaaccaggatcattccgcttgtgatcgagaaagagaaaatggatgcagcagagaaggcagcaggaaatcttccgatctttgacattctcccttaccagcagaaaaaagtagggatcgtcacaaccggaagtgagatcaaaaaaggactgatccaggataccttcacaccggtactccgggaaaagctttccgggtttccgaccgaagtgacaggccaggtgatgccgggagatgataagaaagagatcacaaaggcaattctttctttcgcagatgcaggagcagatctgatcatctgtaccggcggaatgagtgtagatcccgatgatcgtactccgggcgggatccgggataccggagcaaagatcgtaacctatggagcacctgtacttccgggagctatgctgcttgtggcatatcttgagaggaacggaagatccataccggtacttggacttccgggctgcgtcatgtacgcaaaaagaacagtatttgatctgatcctgcccagagtgatggcagatgatgagatcaaggcagaggagattgccgcgctgggagaaggcggactatgtctgaactgtccggtttgtactttcccgaactgcggatttggaaaataatatgaaaaaattcagaatcaaacaatatgagatccatatggacaagatccatgctccacagggcgtgcggatgatccttcttgcggatcttcacgggatatcctacggaaaagacaatatacggctgacagagacgatccgaaaacttgccccggacgtgatcctttctgccggcgacatggctgtacgcacagaaacgaatactctggtaactgcatgtaagctgctgacagagcttgccggagattttcccgtgtattatgcacttggcaatcatgaatataaaatgttcctttccgaagaataccggccatattatgcaaaatacgaaagagcactgaaaaaagccggtgtgcatattttaaggaacggacgtgaagatatggtcctgcagggagaacacttctgtttctggggattggagcttcccatcgaatattatcacaaaccaagatcaccgaagctgaaaaaagaagtgatggaagaactgatcggaaaacctgaagataaagggatgcagatcctgctggcacataatccgaaatacggaaaaacctattttgaatggggcgcggatctgatcctgtccggacattatcacggaggcgttgtccgtctcagcgaacattacggcctttcatctcctcaatatctgtttcttccgccgttttgctgcggagactttcacaaaggggatcagcatatgatcgtcagtgctggacttggagaacataccatcccccttcggatccataatccaagggaactgctggtgatcgatataaaaccttccgaaaaaatgaaatgaggaaaccctatggcattatctgttaagctgaatgtatttgaaggccctctggatcttctgcttcacctgatcgacaaaaacaagatcgatatctatgatattcccattgtggagatcacagatcagtatatggaatatctgcattccatggaaaaagaagatctggggatcatgagtgaatttcttgtcatggcagctactcttctggatatcaaatgtaaaatgcttcttccgaaagaagtgaatgaggaaggagaagaggaggaccccagagcagagcttgtgcagaagctgctggaatataagatgtacaaatatatgtcctatgaattacgggacaggcttggagatgcggcaggggtttattaccgaaaacaggatcttccggaagaagtgctgcagtatactccaccgtctgatccccaggaacttctccggggtctgacactggagcggatgagtgcgatctaccaggctttgatccgcagacaggaaaataagatcgatccgatccgaagtaaattcggaaggatcgaaaaagaggaaatatcactttccgataaattgctggaaatgaaggaatatgcaaaagctcaccggaaattcagctttcgcaggctgatggaaaaccagcattccaaaatacagctgatcgtgacctttctggcaattctggaattgatgaaaatgggacatgttcatgcagaacaggaagatctttttgatgatattcatgtggaagttatcacggatccggacacatggaagaatctgacagagttcgcagatgaataatatagtaggaatgaggacaataagtggaaatcaaacgaattgaaggagaaatcgaagccatcctgtttgcaatgggagaagcagtggaattaccccgtattgccagagcgatccgtcaggatccgacaacaacggaaaatatcatccgaaatatgatgatccgttatcaggaagaagagcgggggatccagatcatagagctcgaaaactcctttcagctttgtacaaaaaaagaatactatgattctcttatccggatcgcagcgcagccaaagaaacccacgctgacagacgttatgcttgaaaccctttcgatcattgcctacaaacagcccgttacaaaagcagagatcgaaaagatccgaggggtaaaatgtgatcatgccatcaataaactgatggattatgatctggtgagagaacttggacgtctggatgctccgggtcgcccgatcctcctgggaaccaccgaagaatttctgcgctgctttggtgtccaggggctggaagatcttccggaaatggatccggtccagctggaggatttcaaggcggaagcagaggaagagatccagctgaagctggacgtataacaaataacacggacagatgccggtttacgggacctgtcggacagatcagaaaacagaagaggagtgacgaaaatgcccacaacatacgcacatgatctttttggaaaaagggtttaccggaaactttccgcaaaattacagcatctgatccgaagcaacggaaatctgtaccggatcggacagcatggtccggatatcctgttttattattttatatccaaaaatccggtgacacagtacggagtgcagatgcatggacggaaagcaagagaattctttgaaaagggcatggcgaaggtccgggaggaaaaaaatcctgcactgatggcttacctgctggggttcggatgtcattatatcctggattctacctgtcatccttacgtcaatcaggtagctgccgaggggaaagtctcacatacgctctttgagaaggaatttgatcgtatgctgatgtatgaaaccggcaaagatccattgcgtttttatccgtctcatgggatccgtgccagttttctcagcgcatggacgatacaccaggtactgccggcgatccgtacctggaacatttatctgtcattgaaaatgatgaagatattcacctgtattttggtatgtgatgatggaggaaggaagagacgcctttcggaacatgccctttcccccgcaggaaaaaagatatctgcgtttattaccgaattttttatgagcccggagccggagatcgactgtaaggaggagcttcttaaactggacagtctgatggaagaggcacttgccaaggcgccggatatgctggaagagcttgctgcacttgcagtcaggccaggacatctttctgacagatgggatctgacctttaacggatgatcgatcccggcagacaatagatacaagtgatatctgaatgctatccccgcataaaattaaatataacagttactgtaaacagttatatgaaccgtgtacggggtgatgcattatgagcaaacggcgtatggccgctgtcgtgctggtgacagcggtccttattatttgtcagatctttccggtaaaggcggcagatgacgaaaatctatatgcactttctgcagttcttatggatggggagaatggccgtgtgctgtacggaaaagaagcatacaaaggacggccgaatgccagcaccacaaaggtaatgacctgtattcttgctctggagctggcaaagggagatgattacgtacaggtttccgggaatgcggcatctcagccacagacacgtcttggcatgcgggaaggccagcagttttatctggaggatcttctctattcactgatgctgaaaagccataatgattccgcagtggccatcgcggaacatatcggcggctccgtagaaggttttgcagagaagatgaatgaaaaagcaaaagaactgggatgtaaggacacacattttgttacacccaatggtctggatggagaagatgaaggcggtatccatcatacaacagcacgggatcttgccttgatcatggcgtatgcaataaaaaatgcaacatttgtccatattacccagactagagattatactttcacggatatctcaggaaaaaagcattattcggtacataataccaatgctttcctggatatggaaacaggagtgatctccggaaaaacaggatttacaggaaatgccggatattgttatgtctgcgcagtccgacaggacgagcgattatttatcgtggctcttctgggatgcggatggcccggaaataaaaattataaatggagcgatactaagaagcttctttcctatggcagggaaaattatcagtatgtgatgctgccggagcttccgcagctgcctgagatcccggtaacagaagcagcaccgggaaaagaagatccatatccgcaaaagtccgatcgttccggatatcctcccaaacaggttatgctgaaaatacacgcagtactttctgaaaaagatcgtgagaaaagatatcttctgaaaaaaacagaaacgatcacatgggaaacggagcttccggataagctcccggcaccaatacagaaaaaccagaagatcggtacactccatgcaaagctcaacggaaaagaactcctttcctgccttgtaaccgccgatgacaaaatcgacagaattacctataaatggtatgtggataaagtatttaaggattatttccattaatttagcgacccctggcatatgtcaggggttaattttttaacgttcgtgacgaaaagtattgaattttctgcaaaaaaaaggtacaattatactcggctgaatttttggttatattaataaaaaaatggagggcatagtataatgagtaatgcgacacaaagcgtagcggctgcaaggatcaattccctgcttgacgccaacagttttgttgagatcggacaggctgtcacagccagagctacagatttcaacatgactgaaaaaaaagcaccttcagacggtgtgatcaccggatatggtgtgattgacggcagtctggtgtatgtatacagccaggatgcatctgtactgaacggaacagttggtgagatgcatgccaaaaagatcgccaaaatttatgatctcgctctgaaagttggagcacctgttatcggtcttgtagactgtgcgggacttcgtcttcaggaggctaccgatgcacttgaggcatttggtgagatctatctgaaacagacactggcatccggtgttattccacagatcactgctgttttcggaacatgcggcggtggaatggcagttgtaccggctcttacagactttacatttgtagaggagaagaagggcagactgtttgtaaacactccaaatgcactggaaggaaacagagtggaaaaatgcgattcagcttccgcacagttccagagtgaggagacaggacttgttgacggcatcggaacagaagaggagatccttggacagatccgtacactggtcagcatgcttccggagaataatgaagataatgacagcttcaaggaatgcacagatgacctgaacagagtatgtgatgatatcgcaggctgcacaggcgacacagttattgcgctttcaagaatcgctgatgatggtgagttcttcgagacaaaggcagcttacggccaggatgtcgtaacaggcttccttcgtctgaacggagctaccgttggcgctgttgcaaacagaagcgaatcttacgatgctgatggcaataagacagagatttccgacggaactctttctgcaagaggtgcaagaaaagcagcagacttcgtaaaattctgtgatgcttttgagattccggtacttactcttactaatgtaacaggatttaaagctacactctgcaatgagaagatgatggctaaatccgtaggtgagatggtacatgcttttgcatctgcaactgtaccgaaggtaaatgttgtaattggtaaagcatacggaactgcatacgttgccatgaacagcaaatctgtcggagcagatatggtttatgcatgggatacagctgagatcggtatgatggatgcttcccttgcagcaaagatcatgtatgagggagctgacgcttctacactgaatgagaaggcagctgagtacaaagaactccagaacggtatcgcatctgcagcagcaagaggatatgtggatactgtgatcaaagcagaagatacaagaaaatatgtaatcggtgcttttgagatgctgttcacaaaaagggaagaccgtccatccaaaaagcatggaacagtctaagtgaggtgagcgtatgagacagttttataaaaagatctcttctgtctgcatggcacttctttgcgtggctgcacttctgatcggatgcacagctactgcatgggctgctgatgagattgatgattctgtaaagagtcagcttgtcacaacaaccaagggcctgacggatgcgatcatcgcaatgtccgaggatgatatccagggatatctggaatcagaggatgctttcacacagagtgctgcaagtgcatgggatggctccagagaagagcttggtgagaaaaaaggtgatatcgaggagaaagatatcacagtggagtattccgatgatcagtataccgttgttgttccggtatccttcgagaaaaacaaagcgaatttcacttatgtatttgataaatcaggaaccccgacttctcttacagttgatgtgaattatacactggcacagaacatggagaaggcagcgatgaatacagtgatgggtctcggaacagtatttgtgatcctggtattcctgatcttcgtgatctctcttttcaaatatattcccggacttgtggaaggaaagaaaaaagagagcaaaccggctccggcagccgcagcaccggctccggttgcagcaccagttgctgagcctgctgttgaggatgtgacagatgatggtgagcttattgccgtgatcgctgcaacgatcgctgcttctgaaggcaaaacaagcacagacggattcgtagtacgttccatccgcaaagtcaaccgcagaaaaagataatcattatttaggaggattttaaaatgaagagttatacaattactgttaacggaacagcatatgaagttactgtagaagagaacggaaacgcagcagctccagttgcagcagcaccaaaagcagcagctccggctcctaaggcagctccggcagcagctcctaaggcagcagctccggcagcaggcgcaggttctgttaaagtttccgcagccgttcctggaaaagttgtaaaaatcgttgcatctgttggacagagcgtaaaagctggtgacagcgtagtgatcgttgagtccatgaagatggagatcccggttgttgctcctcaggacggaacaatcgccagcatcgatgttgcagagggtgctgccgttgaaaatggagatactcttgcaacaatgaactaaacaggaggtagacaaatgtcttatgtaacaaataccctgtcaaacctgatccatcagacagcatttttcaaccttacctggggaaactacctgatgatcgcagtggcatgtgtgttcttatatcttgccattaaacatggttttgagccgctgctgttggttccgatcgcttttggtatgcttctggtaaatatttatccggacattatgctgagcattgaggattcatccaatggcgttggcggacttcttcattatttttacttaatggatgagtggagtattcttccttcactgatcttcctgggtgtcggtgcgatgacagacttcggtccgctgatcgcaaacccgatcagcttcctgatgggagcagctgcacagcttggtatttaccttgcatacttccttgcaattttccttggatttaatggtaaagcagcagcagcgatctctatcattggtggtgctgacggcccgacttccattttccttgcaggtaagcttggacagtcttctcttatgggaccgatcgcagtggcagcatattcctatatgtccctggtaccgatcatccagcctccgatcatgaaggcattcacaacagagaaagagcgtaagatcaaaatggcgcagctccgtcctgttacaaaacttgagaagatccttttcccgatcgttatcacaatcgttgtttgcctgatccttccgacaacagctccccttgttggtatgctgatgctcggaaacctgttccgtgagtccggagttgttaaacagctttctgaaacagcttccaacgctcttatgtacatcgtagtaatccttctcggaacatctgtaggtgcttccacaagtgctgaggcgttcctgaacgtagatacactgaagatcgtagttcttggtcttgttgcctttgcctgcggtacttttggtggtgttatgcttggtaagcttctctgcaaggttactcacggaaagatcaatcctctgatcggatcagccggtgtttctgccgttcctatggcagcccgtgtatcccagaaggttggtgctgaggcagatcctacaaacttcctgctgatgcatgcgatgggaccgaacgttgctggtgttatcggtacagcggttgctgccggtacattcatggcgatctttggtgtctaacccattgtcttataaaaatttgtaaggagaataattatggcagaaatagagaaaaaacctgtgaaagttgtggaaacgatcctgcgtgacgctcatcagtccctgatcgctacacgtatgagcacagagcagatgcttccgatcattgagaagcttgacaaagtcggctactatgcagtagagtgctggggcggtgctactttcgatgcttccttacgtttcctgaaagaggatccgtgggaaagacttcgtaaacttcgtgacggtttcaaaaacacaaagcttcagatgctgttccgtggacagaacatccttggatatcgtccatatgcagatgatgtagtagagtattttgtacagaaatccgcagctaacggtatcgatatcatccgtatctttgactgtatgaatgaccttcgtaaccttcagacagctgtaaaagcagcaaacaaggagaaagcacatgcacaggttgcaatggcttacacacttggtgatgcttacacacttgattactggacagatcttgcaaaacgtatcgaggatatgggtgcagattccatctgtatcaaagatatggcaggacttcttgttccgtacaaagctacagagcttgttcaggctctcaaagagactgttaagatcccgatcgatcttcattctcactatacatccggtgttgcttccatgacatatatgaaggcagtagaggcaggtgttgatatcatcgacacagcaatgtctccgtttgctcttggaacatcccagccggcaacagaggttatggttgagaccttcaagggaacaccatatgatacaggatttgatcagcagcttctcgctgagatcgctgactacttccgtccgatgcgtgatgaggctcttgatacaggtcttctcaatccgaagaaccttggtgtaaacatcaagactcttctgtatcaggtaccaggcggaatgctttccaacctgacatcacagctgaaagagcagcatgccgaggataaattctacgaagtacttgaggaagttccgcgtgtacgtaaagaccttggtgagccaccgcttgttacaccgtcctctcagatcgttggtacacaggctgtatttaacgtgatcatgggcgagcgttacaaggttgtcacaaaagagacaaaagacgtgttaagtggtaagtatggcgcaacagccagaccgttcaatccggaagtacagaaaaaatgtatcggagatattgaaccgatcacatgccgtccggcagatcttctggaggatgagcttgataagcttgagagcgagatggcacagtacaaggagcaggatgaggatgttctcacatatgcactgttcccgcaggttgccatggacttctttaaatatcgccaggctcagaagaccaaagttgatgagactgtagcagataccaagaacggcgcatacccggtataaagcacacatagaaatgcagatgcatttcaaaacaggaaaaggagcttgctgtatgcaggctcctttgtgcataaaaaagataaaaaaggcaggataacaggtaatgtccaaagttgcgatcataggcggcggtgccgccggaatgctctgcggtgtatatgctgcgcgcagaggacaccaggttcacatactggaaaaaaatgagaaactcggaaaaaagcttttcatcaccggaaagggacgatgcaacgtcaccaatgattcagataccgaagaactttttccggcagtgatgtcaaaccgcaaatttctttacagtgctttctacacctatggaagcagagatgtgatggaattttttgaggaggcaggagtgccgctgaaaacagagcgtggaaaccgggtttttccggtatcggatcattcatcagatattatccgtgcgcttgagcgggaactgaaaaaagccggagcgcagatccatcttcatacagaggtaaaggaagtttgtacacaggatgaaaaagttaccggtgtattactttcggacggtaccttttttgaagcagatactgtggtagttgccacaggagggctttcctacccgtccacaggttccacaggagatggatatcgttttgctgctgaaacgggacataaagttgtttcccagtcaccatcactggtaccactggtggcaaaagaagattatgttgccaaacttcagggcctttcccttcggaatgtggagcttacagtaaaatccggcaaaaaagttctctataaagatttcggcgagatgatgtttactcatttcggagtgacaggaccgctgatcctttccgccagtgcacagatcggcaaaaagttggaaaaggagcctttggaggctttcctggatctgaagccggcgcttgatgcagaacagcttgatgcccggatcctgcgtgaatttgatgcaaatcataacaagcagtttaaaaatgtgatcggtgttctttttccgtcttctctgactccgatcatgatcgaaattggcggtatccccggggaaaaaacggtacatgagatctccagggaagagcgtcaggcttttggccgtctgatcaaggcttttccgtttacgatcacgggaatgggagagtttaaggaagcgatcatcacaagaggcggtgtgtcagtaaaagagatacagccatccacaatggaatccaaaaaaataaaaaatctgtattttacaggtgaagtactggatctggatgcagtgaccggtggctataatcttcagatcgcatggtctacagcgtatgcggcagctcaggcgatagaataacagaaaagaggaaggagcaacgattatgggtattaatattgcaattgacggaccggcaggtgcaggaaaaagcacaattgcaaaaaaagtggcaaaggagctgtcctttatttatgtagatacaggggcaatgtatcgtgccatggcactttatcttctggaaaaagggatcagcggtgacgaaaaaatctctgaagcctgtcacgatgcggatatctctatccgttatgagaacggtgagcagcaggtgatccttaacggaaagaatgtaactgcgttcctccgtaaggaagaggtaggaaatatggcatctgtaagctctgcaaatccggaggtgcgtgcacatcttctgaagctgcagcgcaatcttgcagccgagaataatgtagttatggacggaagagatatcggaaccaccattcttcccaatgcggaagtgaagatctttctgactgcaagtgccaaaacccgcgcaaacagacgatatctggaacttacagagaagggggaagcctgcgatatggatgagatcctgaaagatatcgttgacagagatgagagagatatgaaccgcactgtttccccgcttaaaaaagcagaggatgctgttcttgttgattcatctgagatgggaattgacgaagtggttgagagtatcctttccgtatacagaaaaagggtgaatggatgaacgtaaaagttgcagaaactgccggcttctgtttcggcgtacaaagagcagttgaccgtgtttatgagctgatcggttccgatgcagcaccgatttatacactgggcccgatcatccataatgaggaggttgtctcagatctcgaaaaaaaaggtgtggctgtgatctgtgagaaggatcttggcagcctgaagggcggcactgttgtgatccgttcccatggagtaggccgcagggtttataacacgatcaaaaaatatggtctcggatatgtagatgttacctgtccttttgtgctgaagatccacaagatcgttgagagagaaagctccagaggtgcccatattgtgatcatcggtgatccgggccatccggaagtacaggggatctgcggatggtgtcagggaccatatacagtgattagaaatgctgaggatgctgagaaattcaatatttctccggaaaaagaagtatgtgtagtgtcccagacgacatttaattacaacaaatttcaagaattagttgaaattctccgcaaaaagagttatgataataatgttttaaatattttaaatattttaaacactatttgtaatgctaccgaagaacggcagaaagaagctaaagcgatagccggagaggtagacactatgctggtcgtaggtggccgacatagttccaatactcaaaagctgtttgaaatatgtaaaaaggaatgtggaaatacttactatatacaaacacctgtagacttggattctgaaatgttccaatgcagtagttgtgtaggtattacagcaggggcttccaccccaaagaaaattattgaggaggttcaagaacatgtcagagttaagttttgaacagatgctggaagattccgtaaaaacaatcagaaatggagagatcgtacagggtaccgtcatcgatgttaaagatgatgagatcatcctgaatatcggctataaagcagacggtatcatcacaaagaacgagtacacaaacgattcaagcgttgtgcttacagacgttgttaaacctggcgataccatggaagcaaaggttctcaaagtaaacgacggagagggacaggttacacttacctacaaacgtcttgcagcagagaaaggcaacaaacgtcttgaggaggcattcgagaaccaggaggttctgaaggctcctgtaacacaggtacttgacggtggtctttgtgtcaatgttgaggaagcaagagtattcattcctgcaagccttgtatctgacacatatgagaaagatctttccaaatatgcagatcaggagatcgagttcgttatcacagagttcaacccaagaagacgccgtatcatcggtaaccgcaaacagcttcttcttgctgagaaagctgagaaacagaaagagcttcttgctaagatcaacgtaggcgataaagttgagggcgttgttaagaatgttacagatttcggtgcattcatcgacctcggcggagcagacggacttcttcacatctctgagatgtcctggggcagagtagagaacccgaagaaggtattcaatgtaggtgataaagttacagttcttatcaaagatatcaacggagacaagatcgcactttcccttaaattcccggaggagaacccatggcttacagctgctgaggacttcgcagtaggaaacgtagtaaagggcaaagttgcacgtatgacagattttggtgcatttgttgagcttgcacctggagtagatgctcttcttcatgtatctcagatctccagagagcacgttgcgaaaccatctgatgtactttccatcggtcaggagatcgaggctaaggttgttgatttcaatggcgaagacagaaagatcagcctcagcatgaaagcactcgaggataattctgcagagcagacagaggagtaatttctcagaagctgtacagcagatgaatattttgaatttcagaggccgtcacatttattgtgacggcctttttttgattggaattgcgtaacagagatattatttaagaacagaaagataatatggcaggcagtgtttcagatagattttctgttttaaaggatcatgcagaaaagcttctgttacaggaaaccaggtataacagttgtcccttttggcaggccttcggagctttttatccatgcaggcacttaaggcttttggtatggcagtgtcttcggaagggatgtaatcgtaatccttataattggagtagtattgctttaaacgtccattttgagactttacaagaagacggacacagttattctgtccaattatgtagaattcttcactatgatttgaaaatttaacaggcagatcgtaattagttttaatggtaaaggccaattgatcgtcttgaatttcacaatccagtgcttcgtaatcttcattgaaaagagcaagataggacagcattgagaaaatttttccaagtcctagaagatcttcccggttatgccccataacgatctctgccgcttccggtttctttccggaagcgaattgtttgtagaggcggatgcaggcacctccatcacagtagttccgttcagtgataccgagaaatgattccatagaaggctgattcatccgtgaaagctttagaagtcccttgagcggctttagttcccggtaaaggtccagagaaggcagctttgcaaaaggggaaggcagtccgtagatctgatatcgcgcatccagataaggctggtcaaagctgtcaccgttatactggatcgtacatgaaaaatcctgaaggaatccagaaaatgtttttagaagttcaggttcttcctcttcgttttcaatcatccactggtacatctgccagttgttttcttcgtaggctacagcaccgatcagatacagaaaagtggaatttcgtgatagtcctgtagtttcaatatcatagaaaagcggtacaaaacgctctgaaaatctatgatttttagtcaattttttaacagtctcaaggtctggaaacccttgtaaaatcggcatttttttaacgatcatgttaattttctcctttatggattgtatctgattatacacaaaaaaattgcttttcaatagtgcaatttaaagtgaaatgagttatagttattagtagagttgatgataaaaaacaggaaatggtactggatttatgtagggattgacagtgaaaaaaatgactattatcgcttcataaattagttattcatttacagctttttatgagctggtgaatatcttctaccgaagtatatcacaggatcgtgtctggattcaatctttcatacatatcttgctcaaagcagaagctattttgttactgttcgctggtaatgtttcgcgaaatgatttatgggagcgaaatagatcttgtttgtcttgtatgaaataagaaaaggaaaatcagaaacatagaatcaactttaaaaaagagtatatgcgcaacacagaaataccatgtacatgtacttgcaaaaataaaggaggagatgagatctatggcatttttaaccttcaggggtggtatccatccttatgacggcaaagatttgtcaaaaaactgtcctgtcgagaagtatctgccgaagggagatctggcaattcttgtttctcagcacatcggagctccggccaagccgatcgtaaaaaaaggtgatcatgtgcttgcaggacagaaaatcgcagaagcaggaggatttgtttccgcaccgatacactcgtctgtatcaggaaccgtaaagggaatcgagaaacgtctgaccgcagtaggcgccatgggtgatgcgatcatcattgagaatgacggtctgtacgaatctgtggaatatgcacctgcaaagctttcggatctttccaaggaggatatcctgaaaaggattcaggaaggcggagttgttggtcagggtggtgcaggtttcccgacacatgtaaagctttcaccaaaggaacctgacaagatcgatcatatcctggtcaacggtgcggaatgtgagccttatatcaccagtgactaccgaaggatgatggaagaaccggaaagcattgttggtggtctggaagtaatcctgaaagctttcccgaaggcagtgggatgtatctgtatcgaggacaacaaaccggattgtattgccaggatgaaagaagccatcaaaggcaaagagcgtatggaagtaaaagagcttaagaccaaatacccacagggtggtgaacgtacgctgatctatgcggtaacaggcagagagatcaattccaccatgcttccggcagatgtaggatgcgtggttgataacgtagagactgttacttctgtttataaggcagtgatcctcggacagccggtcatcagccgtaatgtaacggttaccggagacggaatccgcacaccgaagaacttttccgttcttacaggaacagatctgtctgaactggtagatgctgcaggcggactgaaggaaaagatcgcaaaagcaatctccggcggaccgatgatgggatttgcgctgtatgatcttcatattccatgtacgaagacaacttcttccctgcttttcctggagcgtgacgcagtttccgaggcgaagcagatccagactgcatgtatcaattgcggacgttgtgtaagcgtctgtccgggccatgtggttccggcccgccttgcaactcttgcagaacacggtgatatggcaggcttcgaaaaaatggatggtatggaatgctgcgagtgcggctgctgcagttacatctgtccggccaaacgacctctgactcagagtattaaatctatgagaaaaatggttcttgcagagcgcaagaaaaagaaatagggggaggaataacaatggaacaaatgtataacgtatcatctaatccccatatcagggataaaatgaccaccagccgtattatgcagctggtagtgatcgcacttctgccgacaacacttttcggtatctggaactttggagtgcatgcactccttgtagtgctggcgacggttgcatccagtgtgttttttgaatggctgtatgaccgactgatgcataaaaagaatacaactactgatttcagtgcagttgtaacaggacttctgcttgcactgaacatgccgccccagatcccgatctggatgccgatccttggcagtgcttttgcgatcattgttgtaaaacagctgttcggtggacttggacagaactttatgaacccggctcttgcaggaagatgtttccttatgatctcttttgccggaaaaatgactaactttgcagtttccaaaagctcccatgctgttgtagatgcggttacacaggcaacacctctggcagcgcttaaaagccagggattcattgaggggacttctattcctgtaaagaatctcttccttggtaatatccagggtaccatcggtgagacttctgccctggcgattctcatcggtgcagtgatccttctcgcatttaagatcatcgatctgaaggtacctcttacatatattggaagttttgcagtatttgtcattttctatatgttgggaacaggcaaaggctttgatgtaaactatcttttcagtcatatctttggaggcggtctgatgcttggtgcctggtttatggcaaccgattatgtgacgactccgatcactccgaaaggtcagctggtatatggctgctgcctcggtatcgtgacagcggtattccgtctctttggtggttccgcagagggcgtttcctatgcgattattttctgcaatcttctggttccgcttattgaaaaagtaacaaaaccggttgcttttggaaaaggaggcaagaaataatgggtaagattatcagaaatacattgatccttacgatcattacagtagttgccggccttggccttggactggtttacgaagttaccaaagaacccattgcaagaaccgaggaacaggcaaaaaaagaagcatggcagactgtattcagtgatgtaagcctggaagattttaaagctgtagatgtagacaaggaagcagcagataaaacggctgcagatcttggaatcaaagcaaccgtagatgaagtctgtgaagcagcagatgaaggctatgtggtaactgtaaccgataaagagggttacggcggtgatatccagatcacagttggtgtaacaaaagacggtaccgtcagcggcgtttccattctttccatcagtgagactgccggacttggaatgcgtgctacagaagcgaagttccagaaacagtatgttggaaagaataccgataaattctatgtatccaaggacggcggcgaaggtgagcctattgatgctatcagtggtgcgaccatcacatccagagcttttaccggtgcagtcaatacagctatcggctattgcaaaaacgcattttaggagggtagttgaatatgaataattgtggtgaaagattaaaaaacggcattataaccgaaaatccgattttcgtcctgatgcttggtatgtgtcctacccttgcggtaacgacttctgcgatcaatggtattggtatgggactttccacaaccgtagttctggttatgtcaaacatgctcatctccatgctgcgtaaggttattccagactccgtcagaatgccggcctttatcgtagttgtagcatcttttgtaactatcgtacagtttctgatggaaggctttactccttctctttatgagtcacttggaatttacattccactgattgttgttaactgtatcattctgggacgtgcagagagttatgcttccaagaaccctgtccttccgtctatctttgacggacttggaatgggtcttggcttcacagtgggcctggttgccattggtcttgtaagagagatccttggttccggaaaggctttcggagcacagatcattccggttgctgatgcagctaccggtgctgccggctataccccgatcactatctttatccttgcacctggagcatttctggttcttgccggacttgcagcaatccagaacaaagtaaagatcaacatggcaaagaagggcaaagatgtttccaagatccagtctggctgtggctccaattgtgcgacctgcggcggatgtccttccgacaaagaataaaaagggggaatagaaaatggcaagcttgatgttgattgcaattggttctgcgctttgcagtaacgttgtattgagtcagttcctgggaatctgttctttccttggagtttccaagaaaacagaaaccgcagccggcatgggtggtgcagttgtgtttgttattactattgcatcttttgttgcaggactgctttataaattcatcctggtaccgacccattttgagtatctgaaaacgatcgtatttatcctggttatcgcggcactggtacagatcgtagaaatgtttctcaagaaatttgtaccatccctttacaaggcacttggtgtataccttcctctgatcacaacaaactgtgcagttcttggtgtagcactgaacaacgttaaatatgaatacagcattcttgaaagtgttgtcaacggatttgccacaggtgtaggttacctgatcgcaattgtattacttgcgggaatccgtgaaaaaatggaatacaacgatattccggaatccttccagggtatgccgatcgttctgcttacggcagcactgatggctattgcattctttggattctccggaattgtataggaggaagaagagcatgagtataacaggaattattatggctgcagtcattgtcggcggtactggtttattcattggtatcttcctcggacttgcagacaagaaattaaccgttaaggtagatgaaaaggaagaagccattctcggcgttcttccaggaaataactgtggtggttgtggatatccgggatgttccggactcgctgccgcaattgcaaagggagaagctcctgtagatcagtgtccggttggcggtgctcctgttgcagccaagattggcgcgatcatgggacaggaagtaaaagaaaccgcacgtcgggttgcttttgtaaaatgtgcgggaacctgtgataagacgactgtgaaatatgagtacacaggtgtggaagactgcgagatgatggctttcatccctggcagcggtgcaaaaaactgtacatttggatgtatgggcttcggaagctgtgtaaaggcatgtccgtttgatgcaatccatatagtgaatgggattgcggtcgtagatcaggaagcatgtaaagcctgtggcaaatgtgttgccaaatgtccacgtcacctgatcgagctggtaccatatgacaaacagacacgtgtagcctgcagctcccacgcaaaaggtaaggcagttacagttgcctgcgagcttggctgtatcggctgtaaaaaatgtgaaaagaattgtccgtccgaggcgatcacagttaccgatttctgtgcacacatcgattatgataagtgtacaggctgcggtaaatgtaaggaagtttgcccaagacatgtgattctgtaaaacaaaaaggactgcctgtcacggaagttttccgagtgacgtggcagttcttttttggaataaagcatgttgtgcccgataatgcataaataaaataaatacatacaaacttttggttatatttcaatgaaaaattgcagtttccggttaaaaatatttgaccggtgaatttcaaggggctataataggatataaatattcagtatacttcaaggagaacgaaattcatgagtaagattattttaactggcgaccgcccgacggggcgccttcatgtaggtcattatgttggatctctggcagagcgtgtgaagctgcagaattccggcttatatgatgagatttatattatgatcgcagatgcccaggcacttacagataatgcagagcatccggagaaagtacgtcataacattcttcaggttgctctggattatctggcatgcgggcttgatccggagaaatccaatatttttatccagtccatggttccggagctgacagaacttaccttttattatatgaatctggttacggtagcacgagtacagcgtaatcctaccgttaaatccgagattaagatgcgtaattttgaagccagcatcccggtaggctttttctgctatccgatcagtcaggctgctgatattactgctttccgtgcgacacatgtaccggtaggtgaagatcagcttccgatgcttgagcagtgcaaggagatcgtccataaattcaataccgtttacggtgatacactgacagatccggaaattgttctttcttccaataaagcatgcttacgtcttccgggaattgatggaaaggctaagatgagtaaatctctcggaaactgcatctatctgtctgatgaagaagatgttgtaaagaaaaagatcatgtccatgtttacagatccgaaccatcttcgtgttcaggatcctggtcgtgtagagggaaatccggtatttatctatctggatgccttcagccgcccggaacattttgctgaatttctgccagagtatcagaatctggatgaacttaaggctcactatcagagaggtggccttggtgatgtgaaagtcaagaagttcctgaataatgttatgcaggcagagcttggaccgatccgtgaaagaaggaaaatgtgggagcagcgaaccgaagatgtgttcgacatcctgaaagctggtacagaggttgccagagaaaaagctgctgcaacgcttcatgatgttcgttcttccatgcggatcaattattttgaggatcaggatttccttaatcagtgatagaaaacagcgagaggaatcacaggcttgtatacaggatcaacccggagattgtattccgggttgattttttttgaaaattatgttactattgcgttcatatgggaaacagatgttcagctgtttcagggaaggagccttgagatttgatttcttttgtaaaaggtaccgtagcagatatcggtgaaaattgtctggttgtggaaaatggcggaattggttatgagatttatatgacaggacaggatcttgggaaagcacggataggcgatgaaaagaagatccatacctttctctatgtgcgggaggatattctgcagctatatggttttttttcgaaggatgatcttggcatgttcaagcttctgatcggtgtcaacggagttggacctaaaggcgctctgggtatcctttccgggatcagtgcagacgagcttcgttttgcagtgctttccgatgatgtaaaaacaatctccaaggcccctggaatcgggaaaaagacagcccagaaaatgattctggagctgaaagacaagctgaagctggaagatgcttttgagatgaaactggcgcatcagcaggaagaagcagccgagggagcctctgatctgagggatagtcgtcaggaagcggtagaggcgcttgtcgcattaggatacagttctgcagatgcccttcgtgcagtacgaaaggtaccggaagatgtgccggcagatgatgtagaagcaattcttcgggctgcactgaaaaatttttaacgccgtgagtaagagctaacatgctcgcactgaaatgaaatagaacggagcatagcaaatggataacaggatcattacaacagatgttacagaagaggatttttccctggagggaaatttaaggcctcagagtctggatgaatatattggtcaacagaaaacaaaagataccctgaagatttatatcgaagcagcaaagcagcgccatgattcactggatcatgtgctgttttatggacctccggggctgggaaagactacactttccgcgatcattgccaatgagatgggaacacatatgaaggtaacatcaggtcctgcgattgaaaagccaggcgaaatggctgcgattctgaacaaccttcaggaaggagatgtgctgtttgtagatgagatacacagactgaaccgacaggtagaagaggttctttacccggccatggaagattttgctatcgatatcatgatcggcaagggagcatccgcccgttccattcgtctggacctgccgaagtttacattggtaggtgcaacaacgagggcaggtcttctttccgcaccgcttcgtgatcgttttggcgtaacacagagactggagttttatgataaaaaagaactgacgacgatcattctccgttccgctcaggtgcttggcgtggaaatcgaacccaatggagctgccgagatcgccaagcgttccagaggaaccccccgtctggccaaccgtcttctgaagagagtacgtgattttgcccaggtgaagtataacggtgtgatcacctacgatgttgcctgttttgcattggatcttctggaggtagatcagtatggcctcgataaaacggaccgccgcattctccagaccttgatcttgaatttccagggaggaccagtggggcttgaaacacttgccgcatcaatcggagaagactccggaacactggaagatgtgtatgaaccctatcttttacagacaggtttccttaacagaactccacgtggaagaatggcttccgtgctggcatatacccatcttggatatcctcgtcctgatttatcgacaaagtaaaggtcataaaaaactaaaaagcttgtatttacagg

SEQ ID NO: 233 - DNA, 56601 bp, Unknown
  gut microbiota DNA sequence
ggtagatagggcagaggtggaagtgtggtaacacatggagctgactgttactaatcgggtgagggcttgaccaaaaagcaggtcgtaattgattcaagtgattaaccatcaacaaagcatgtatgtagttttgagagtataaaaattaagcaatatttaaactattcggtttagatattgcttttttgttatatttgtttgagatatgcataattatataaacttaacgaaataaataaaaaaacggaaagttcatttctcaaaataaacagagaagaactctccgtcttttattttatcacgatattattcttccacagcaagaaatgcaataccttcttttgcttcgccaagatcaagccacgtgattccgctggcgctggtcatgatggcttttcttgtcatgttccaggtatcgatgacatcgatttttcctgtccttctgcttctacggcacctgtgactttccaggagtagactccggcttcgcgtggaagaaaacgtactttataggttccgtttccatcataaaatcctttaaccgactgagaggaattgccgtttgtgaatacagctttgatatcggcaagtgtttctgagccgtctggtttttcaccctggaaaaccagttcaaacattttgttctgaatcatatttttatctcctttgattgtttttagcacattttttataaaaaatttcaaatcatgttaaacgaattatgacaactatattttaacaacaaatcagtgttacatatatcttaattttgatatttatatctttattttgatgtttgcatctttattttgcactgtttgcgatttgagtgatattttactaacttacaaaactgtaccctaaaaaagaataaaaattgtcacttgtcatatatccactcataaagtatcataacatctgtgttattacactgacacgctaaaacaatcatacacaaaagtaataacagaacgagaggggacattattatgaacacacagaacaacacagtagtcaagcttgcagaaactgcattacttgcagcgttatgctacgtatcctttacatttttgcagatcaagatcccagtgccgggtggagatgcaacatcgatccatatcggaaatgctttctgcgtgctggcggcattacttcttggcggcgtatatggaggacttgcaggtgcgatcggaatgggaatcgcggatgtgatggatccggtttatattacaggtgcgccgaaaacttttatcctgaaattctgtatcggtctgatcgtaggtcttgtggcacataagatcgcgaagatcaatgagagcacagataagaaatatgtttttaaatggagtgtgatcgcatccatcgcaggacttgcatttaatgtaatcgctgatccgatcgtgggatatttttacaagcagtatattttagggcagccacagaagcttgcagaggcactggcaaaaatgagcgcggcggcaacctttgtcaatgcggttgtatcagtgatcctggtagcaatcatctataatgcggttcgtccggtattgatcaagagtcatctgctcacagttactaagaaaaaagaacagacagcataatttattgaattgctataagtaagttttctgcgtggttgtggcgagcaataagcagagtgctttgtccaaatccaaattcataaagaagtatataaataacagttttcaacagttattcttacgaacattttacagatgtgaaagtaagaatagctgttatttttttacactaatacgctgtaacacacatatattgtgtgcttttcataaaaataagaaagataaattgtgcaatattccagacaattccagacaaaatataaaaaacatattgacacagcaaaataaaatagttataattctaaacatttgaattataactattaacataattaaatcgaatgcttttatccgtttgattagataaaggagaggaagtgaacatacaaatgcaggattcatttcactatctggccatggtaaatcagatgatgatccagaaaaagctcatggagcagctgaaaaccacaggtcttacgctgggacagccgaaagttctggattatctgaaggatcatgacggtgccagccagaaggaaattgcggcaggatgtctgatcgaagcaggatcactgacctccatactgaaccgcatggaggagaaaggcctgatcgagagaaaaatgctcaacggaaaccgtcggacttttcatatttttatgacagaatccggtaagaaaaatcagaagcttgtggaagctgcttttgaaaaaatagaagaaacagcattttccggtatttctgaagaagaacagaaaagatttatgcagacatttgaaaagatttataaaaatcttaatgcaaaataaatgaaacaaaaagagaggagaataaataatggacaaactgaaacgatatctgatttttctggtaggactgtttgtgaactcgctgggagtcagtcttatcaccaaggcgaacctgggaacgtcgccaatctcatcgatcccgtatgtattaagccttaacttcccgtttacgctcggaaactttaccatctttttcagtatttttctgatcgtactgcagctgataatcctgagaaagaattttaaactggagcatattttacagattccggtatccattgtattcggatattttatcgatcttaccatgcttcttttttactgggtaaacccggagatgtatgtgatgaagatcgtttatcttctcatcggatgcctgatcctcggttttggtgtgtacatggaggttctggccgatgtagttatgcttccgggagaatcttttgtccgcgcgatcgtccttacctggaaaacaaatttcggaactaccaagatctgctttgatgtttccatggctgtgatcgccgcagtactgtcatttgtttttgcaggcagactggacggtgtgcgtgaaggtactgtaattgccgcactgctggttggatttatcgcgagacttttcggaaagaagtttgcttttgtaaaaacaatgctgtttccggagactgttcaggaagaacagcagagagaacaggtggctcagacacagcatggcattcagggaaaaaatgtcatcgctataggaagacagtttggaagtggcggccacgatatcggcaaggcacttgcagagaagcttggctatgatttctatgatgcagagatcattcagatggcagcaggaacaacaggctatacaccggaatttattaaaaagaatgaggagatcatgacaaacagcctcctctatgatcttgtcaatcagatgtatttaaacagtaattctcaggatgaggcaccgaaggataagatttttgcggcggagtcaaaggtagtacgtgagcttgcagaaaaaggaaactgcgtgatcgtgggacggtgtgcagattatgttcttcgaaattcagaaaactgtctgaaggtattcttctcagcacctcttgagagcagaatcaaaagagtttccaaaagacagaatatctctgaaaaagaggcaaagacagtcgtacagaaaaatgaaaagctccgtgcagacaactaccgttattacacaagaagaatgtggggagcagcaggcaattttgatctcagcttgaacactgatcttggcgaagattatatcgaaacctgtatccgcggagcgatgaaactgtaattacggagtattccgtacccggcaaaatcctatacaatttgcaaagagtctgtgttatgatgaatagcagatagacacgatacatggattttacagcatcactgattttgtgaattgccataggagagttggggaaattgcttatgggtgatcataaaaaatacatattaaacagattggctgaactgacaggcgttgatattttttgtcaggcagacgaaacgttgtcaagctatcagagaaattcagaactgaatccgattttcaggaacagccagctgagagaaggattaatgaaagaggaagacagtatttattttatctgtgtaagatcagaggaacggtattattttgcaggcccgttcagcctgggcgtgctgaacaaggtggaactgcataaatattataagcgttacgggatacacacagataaagagaaaatcctgaaaagatttcagttttcggaagtgatggacattgcacagatcatggatgcagttttaaatgaaaatacaacagaggatatggcagatcgacccgaagggactgcgctatgtactgaacactctatgggatcgttatcagaagccgcttttcatcgtggaaaacggccttggtgccatggacaagctggtgcagggtgctgatggcgagatgactgtagaggatgattaccgtatcgaatatctccgcgatcatatccgccagatggaagaggctgtcatggatggcgtagatctgatgggatatactacatggggatgcatcgaccttgtcagtgcatcgacagcagagcttcgcaagcgttacggattcatttatgtagaccgtaatgatgacggaagcggaacattgaagcgttataagaaaaagagctttcattggtataaaaaggttattgagaccaatggacgggaattataagatactgagaaaattagaatatttaagataaaaaatcttccgggagtctgtgagatacgctcccggaagattttttgttaaacgaaaataagaacgctggcctgtcagtccttggcgttctgagtgtttttccgtaccttggtaggcgtacatccgaaatgttcctgaaacattcgtcgaaacagcttgtagttggtgaaaccatgccgttccagtattatgtgaacagggtctttggtgtttataagatccttgtaaataaaagaaagccggtattcgttctgatattccagaaaagtaactcccatttttttcttgaaaaatctgcagaaatagccggtctgcaggtaagcgacaccggcaatctcgtccagagatatgggacgctgataattttcggcaatgtaattcagaacaaagttcagccggtcaagatcttttttctgctggcttagatcactgtgaaagatccggacgcggaaattgtgatacagctgaaaaagaagctcaaagatcagactgttaaaacgcaggataaaaccatctggccggatatcgtcaatgatctgaagctgctccagagtcgttttcagcatttccagttttgttctttttacgggatcttttgtatgatgatcccagataaacataaactgctgaacattcggaatatatttttccatgaaatccacaggaacctggagaacgatcgctttatttggaactgtgcatttggtggaatgaattacattggcattgatcaggatgcagtctcccgggtggatggtaaagctggtattttctatggtgacatcaagagcgccttcctgcatataaaggatctcaacagccctgtgccagtgcgacggaatgtagcttccgttgtctgtagaagtgtaaaatttaacgttggtgacacccgaataatctatgatctcataggaaatttcttttttatccataaaaccctcctgcaaaaagagaatattgacctatatattggagcttttttgacctaatagatacagaatcgttatgatagtataataccataaaacaaagcttcatggtcatggaaatgcgaaataaaacaaagggagaagtaaaaaaatatgaatcaaaagagtaaattgacctttggaaaaattgtggaacgtttttcttatggttgtggtgatttcggatgtaacattatttatacagcaatgtcagcgtttctgctgttctattatacggactatgccaatgtcagtgcgatagcagtgggaaccattatgatggtttcgcgtatttttgatggaatcagtgatattatcatgggtgtgatcgttgaccgtacaaaatccaagtatggaaaagcaaggccatggattcttcgtatgtgtattccgtttgcaatatccggaatccttctgttttccgttccggcttcctgggcatcaacaccgaagctggtgtatgtatttatcacatataatctggtatctacagtgatttatacagcgatcaatgtaccgtattctgcactgaacgcactgatgacacaggatccgtatgagcgttctgttttaagtattttccgaaatcttctggcaacagccggaacacttacgatcaatacatttacacttccgctggtggagcacttcggaaacaatgcagcagcatggactaaaacatttgtagtatttggctttgtggcaatcgtagcatttttatttactttctttggaacaaaggaacgtgtacgtgcatctgagaacagcggagagacaaaggcagaggatgtgccttttgtaacaggtatcaaagcacttttcaaaaacaaatactggatcatgatgacaggtatgcttgcccttttcttccttatgtattctgttaacggtggtgcgactgtatattatgcaaaagatattctcggcgacaaaaatctggtaggtacgatcaacggtatttttaatattgtacagatctgcggaatgttctttattgccatgatggttaagaaacttggaaagagaaatgtattttctattggtcttatcctggatatcattggaatgctggtactgaatttttccggtggttccatggcgatcattgtgatttccagtgtgatccgtggtgttggtaatgcctgtggcggtgcaactatgtgggcaatggtttccgacacgatcgattatggtgagtggaaaacaggctgccgtacagagggccttgtaaacagtgcctgcagctttggatataagatcggaaatggaataggatctgcacttctcggactgattctggaaatcggcggctatgtgggaactgcagctgtacagacagaatctgcactgacttctattaaaatctgctttgtatggattccgatcgcagtttatgtatgcggacttgtgatcatgaaattttatcatctggacaaggaatttgccggaatcatcgaagatctgaaaaagcgtacacagaagtaaaaggagagtaccggatatgaatataaaaggcgtaaatcttggaaattggctggttctggagaaatggatgaacccggccctgtttgagggaacaacagcggaagatgagtattatcttccaacgcaactttcaccggaggtatatgaagcaaggataaaaatccatcgttcggagtacatcacagaaagagattttgtaaccataaaaagaatgggaatggattctgtccgtattccggtaccatattttatatttggggacagaaagccatttatcggctgcattgaagaactggataaagcatttaactgggcggaaaagtacggacttaccattctgatcgatcttcacactgtaccgttaagccagaatggttttgataacggtggaatcagcggcgtgtgtaaatgggcacagaatccggatgaggtagaatttgttcttggagttctggaacgtctggcaaaacgatacggtcatagaaaaggtctgtttggcatacagccgttgaatgaacctgtaactgagaatatgtgggggactatggatgtgcagaaccgttatgcaccggcagatccggagctggcaaaaggctcagccccgatcaccatggaattcttaagaaaattttatctggaagcatacgatcggatcagtacttacatgccaaaggaaaaatacgttgtgctccacgacggctttgagctgatggcgtggaaggactttatgcaggaagaaaaatattccaatgtgattctggatactcatcagtatctgatggtggcagaggcaagaggctgcagtcagacgatcgagggatatctgaaatatgtgcgtgaggagctggaaccacagattacggagatggaaaaatatttcccggtgatctgcggtgaatggtgtctcttcaattcccttgcatgcggctgtgatacaaaaggcggacagagtgtgctcaacggagtggaagaaagcgaacgggaaagtctttccacagaagagaaaaaagaaatctatgcgactttggcgaaggcacagctggagctttgggataaatgcagcggatatttttactggagctataaactgcttacagataccgtgaatactccgggctggatcggctgggacagctgggatctgggacggtgcgttgattttggctggtttccggccggaaaaggagaaaaataatatgattataaatccaatacttccgggtttcaatccggatccgtgcatctgccggaaaggcgatgattactatatggcagtttctacttttgaatggtttccgggaattccggtttatcattcaaaagatctgaaaaactgggaactgtatacacatgttattacagatgacgaaaaagtagatctcaagaaacttccaagcgcaaagggaatctgggctccgtgcctgacctactgtgaggaagaggatatgttctatgttgtttacggagtaatgaattccatgaacgccagatattttgatgtggacaatttcctgatctgtgcaaaagatatccacggaccgtggagtgagccggtttatcttcattcttccggctttgatgcttctctgtttcacgataccaacggaaaaaaatatgtggtatctctggagtgggagacaagagaaggctatgagaagccaggcgctatctgtatggtagaatattctcctgagaaaaaagagatcatcggttatccgaagagaatctggcgaggtggtacagaccggggatgcattgaggcaccgcatcttacaaaacgtggggaatattattacattatgtgtgcagaaggcggtacaggttataatcactgcgtgacaatgggacggtccaaaaatgtatggggaccatatgaaaaagatccaaagaacccgattgttaccagcgttccgggagaatcctatgagcgccaggatccggatcatctgaaaccaaagtactataacccggactctgttcttcagaaatccggacacggaagctatgtggagcttcctactggagaagtgtatctggtacatctttgtgcaagaccgtttgtaccggagctccgctgtacacttggaagagaaactgcaattcagaaaatgatgtggactgaggataactggcttcgcatggcagatggaagcaatctggcgaagattgaggtgccggaaacatctcttccggaatatctggtggaaaaaactccggattttgatgattttgatggggatgaacttggaaacttttattattctccaaggattatgcctcagcgttttgcagatatgaaagcaagaaaaggctatgtgcgtcttcgtggacaggaatccagaacatctctcaacaaagtaagtatcctggccagaaagcttacaagtgtatatgcgcggatcaccacaaagatggaattcacaccggaagtacatcagcacagcgcaggcctgattctgtattacgacaacatgaattatatcaatctccggaaatattacagtgaaactctgggacagagtgcgctgtccatcatccatctggaaaacggagaaaaaacagagttcctgaataccagaattccggtagaagataaaccggtttatttgagactttatatagagggaagaaaatcctggtttgagtggagctatgacggagaaacttatgaaaagatcggacgtatctttgacaccacaagattttctgatgagtactgtaagtacggagaatttacaggaaccatggtggggatcacctgtgcagaccgcgttctacacaaaaaatgtgcggactttgactactttgaatatattgcagatgagagccgtatggtggagtaaaaagatacaaaaaaacggggatttatcgttataaagactattgaaaataaaagaagtttgtagtaaggtagtagctacaacgcttacgaaggggaagactgtttcgggtgggcagtcttctttttgtggagaattttggatgaaggaaaacgaaaaacaaggaggaagaatttatggagaaggtaaaagagaaatcttcttttttccgaaagttcgtaggagataagagattttatctgatggtcctgtctattgcggtaccgatcatggtacagaacggaatcacaaattttgtcagtcttctggacaatattatgatcggtcgtatcggtacagaacaaatgtctggagcagcgatcgtcaatcagctgatctttgtatataatctatgcattttcggcggggtgtccggagcgggaatttttacagcacagtatttcggacagaaggatcatgagggtgtccgccagacacttcgttataaattgtggatggcagtgattctgacagcgatcaccattatactgtttctgacagcagggggttcactgatcagcatgtatttaaaaggtgacgggaccgcacaggagatcagggatactcttatttatgggaaacagtatttatggatcatgcttctgggacttccgccatttatgatggtgcaggtctatgcaagtaccttacgtgaatgcggtgagaccgtacttccaatgaaggccgggatcgtggcagtgctgatcaatctgatatttaattatcttctgatctatggaaaattcggattcccggaaatgggagtaagaggtgcggctgttgccacagtgctctccagatatgtggaagcctgcattgtcctgagctggacacataagcatacagaaaagaatatttttgcacagggtctgtattcaacattaaaggttccggcgaacctgacaaagaagatacttattaagggaaccccgctgcttctgaatgagactttatgggcagccggagtggccatgctgacacagtgttattcagtccgtggactgaacgtggttgcgggattaaatatttccaataccatcaacaatgtatttaatatcgtatttatcgcacttggagattcggtagccattgttgtaggacaacttctgggggcaggtaagatgaaggaagccagagatacggacaacaagatgatcgcattttctgtgttctgctgtacctgcgtggcagctgtgatgtttgtaatggcaccactgtttccaaggctttacaataccaatactgaggcacgtactctggcgaaatattttattatgctcacagcatttttcatgccgcagaatgcattcctgcatgcaacatattttactttgcgttccggtggaaagaccatcgttacatttttgtttgacagtgtgtttatctgggtggtaagtgtaacgatcgcatttaccttaagccgttttacaggtctgcctgtacttgtgatctacgcaatggtccaggcagcggatatgatgaaatgtgtcattggatttatccttgtaaaaaaaggcgtatggcttcagaatatcgtttcatagaattttttgaaatcttccgggaggggtgcttccagggagatttcttttttgtcatttttgtcatgatgcgtggaagcccgggtgtcggaagcagattcatcaattgaaaatggaagttgaaatttaagcttccatgcgtggagtgcagcccgggaaaacgaattcgatatgtccgataaacagtacagagaatcacccaggagaggatgcccgagagatgccatgtgtacacggatctgatgggtacggccggttttcaaacggagcattacaagagaagccggagctgctgcgtcagggccggtagatttcagaacagaataaagggtttctgcatgtttgcttccgggaagcgtgccatctgtggatacgaccattttcagacggttatccgggtcaggggcaaggggaattgagatcctgtggaaagatccatattcatccacaggcatgaaaccggaaactgcagccagataggttttctctgaaagcccctccgcacgctgattttgtaatctggcggcagcagtctggttcttggcaaagagcaggataccggaagtttctttatccaatcgtccgatagaccggactttggtaggctcttccttggaccggaaataggaagccacctggttggagatactgtcactgtagtgagaaccggaagggtgagtgactattccagccggtttgtttatggcaagaatatcctggtcttcgtagaggatttccagttcaggaaaaaaatgtgaagttgaagctgataaacagcaggaatcagaattagaatatgaacaaaaggttaagtctgtagaatgatggaaacaggatttgtgacggtctgaattgacagtgaaagtcgtagattccagctgggcagaatccacatcgtccgtttccaggcatactgtgatctgatccccgggataagttgtttccgttacccggcactgctgtccgtttttccggataccaccgggacggaactttgcctggctgatctgcttttttgtaagaccagcctgagtgcgaagaaagcgggagataggcattggaacagttgctttcgggatatggatagtaagatagcggttcattgtgagaaatcctccgattatagattatagtaaaacattgaaaagacatttatatcctgtaatataggacagttgcaggtgcggcggtggatgtagccgggttttatttatgctgataataaaacacagcaacctgtgtccgatccctcagctgcagtttatccagaatggaactgagataatttcgtacagttccctcactgagaaacagttctgcggcaatctccttattgctgtatccgttggcaatcagccggataatatccagttcccgttcattgatctcccgggaagtataatcaaatccaccggaagactgcagaagctccgggatcttggacatgatctccgtgccgaatacagtctgtccggaatagactgcctgcaaagctggaaaaatgctggcataatcctgcttcagaagataaccctttgtgccaaggcggagggcttttacaatatattcatcatcggaaaaagtagtcagaagaagaattttagcctccggaaattcatccagtatctttctggaagcttccagtccgtccatttctttcatacggatatccatcagaagaatatccggaagatattctctgtacagagtacaggcttcttcaccatcagagccggtggcagtcacttcgatatccgggtttgactcaagaatggtttttaatgcacctgcaaccaggcaatcatcgtctatgattataattttcatgtcaaaatctcctgtttatgagttataaaaaattaaattacagatcagaaaaacagacgaatccaatatgccgggaaagtactttgatcaaacagggaagatttccagcagagtgagaaatatctgtctgcttcaattagaaacagatttcgggatcgtcacaaagattcgaaaaccattttcctgcgtaatttggactgtaccgcccagcgcctttgcacggtcccggatattggatagccccataccaccggaagtatttccttccttattgatgtctgcttcagtttgaatatccggaattccatttcccggtgtcccattatcctcaatgcacaactgataaagtgcaggatgctcccgcagaagaatatttacggaatctgcattactatgccgcatcacattggaaagcccttcctttgtaatactgatcagactgtatttcacctctcttggaatctgcctggacatatcataagtaagattcaccgggcagaaggtgaaatcctttacaagtccttttatggcatcttccagatctaacgcatcgtcatgaagatcatggacactggaacggatgctgttcatggcaccattcagagattcttccagatttccgagcagaggatcaagagcatcatttttgttgatggttttgcaggcagcagtcataaggatagaacgggatagtacatgtcccacattatcatggatctctctggcaattctgttacgctcacgcaatgtagctgcatagatctcgtaatcctgtttttccagaagtgccttgtttttttcagaaagaagaagcgcatgttcttcactgtcatcccggatctgatggaaatcctggtaaagagcttgatattttcctgcatagagccagagaaaaaatgagagaatgaatccaaaaatcccaagcagacaaagaactgccggaaatctgttgatctgaaaaaccagaaatccccaaagtggaagctcagccactgccagaggaaaaagcccggcagataaggtctgatacagcagcagagggaaaaacagaagaagatccgaaaaccacagggaacataatccaaagatcacatagcttcctgcaagaaccggaatgatatttccggcgggtttcaatactggcaaagaattgtgtgaacaggattctgttttacataccctgcacagataagtaatgcagcaaaggatcaccgcaaaaaggagggcaaacacaagagcctgatctgcaggcacataaaaaaatgttaaagtactgtataaaagcaatagtatggaatctgtaaaataacgcataaaaaatataccctcctttctactacagcattttccgaaagtcaggcagataaccggctaaaattatcgtatcctgttccgggagaaccccttttgctgcacaaatttctgaaatcaatgtgcctttattataatataccggttccttccctgcaaagaaaaatctatccttctgaaaaagacatgacatttgtcattcacaggtggtgacattcaacacttggagaagacagaagaaaaggatataatggcatcataaaagaaatatgaatttctgcgaaaaagacataaaagtcctgcttaacggactgtaaaaaaggaggaaaacatatgccacagagtatggtccacatagaaaatctggtaaaacgatatggtgatcttaccgcactgaatcatctggaactggatatccgggagggtgagatcttcggattacttggtcccaacggctcgggaaagacaacggccatcagctgccttttgtcacttctgaaatatgacagaggtgaaataaagatattcggagaagagatgaagccggacagttataagctcaaggaacagattgggatcgtgcttcagaatgtagccgtttttgatgagctgacagtgcaggaaaatatcgattatttctgcggcctttacatacgggacaggaaacggagaaaagagctggtagaggatgccattgaatttacaggtcttgaagatttccgcaaaatgtacccgaagaagctttctgggggccttttacgaagattgaacattgcctgcgggatcgcccacaagccaagactgatcattatggatgagccgacggtagctgtagacccacagagcagaaacaagatcctggaagggatccagacgctgaaccaccagggctccaccattatctacacatcccattacatggaagaagtggagcagatctgtaccaggatcgccatcatggatcacggaagagtcatcgctcagggaacaaaggaagaattgaagcagatgatcaaaacaggagagaccatcaccgtagaagccattgccctggaagaaaaaaatctccgggatatccgcacactggagcatgtgtttgatgtgcagtatgaaaaacaggtgctggtcgtgcgctgtaccgatgcgaagcataacctgatccgtcttcttaattatctgcaaagccaggatatttcttttggaagagtcttttccgaactgcctacattaaatgatgtctttctggagatcaccggaaaacagctgagagattaggagggatgggagatgttgcatttactgaaatacagttttctttccaagatccggaattttaacattgtattctggccgctggtctttccacttgtgcttggaacctttttttactttgcattcggaaatatcaatgaagcagattttcagacggttccggtggcagtggtgaaggaagcttctgcggatacgttttttatgacctatctggatgaagtggaaaaaagcagtccggatcttttaaaagcagaagaaatgtcggaaaaggaagcgctggaagcactgcaggataaaaaagtagaagggatttattatgtgggaaaagagccttcccttacagtagaaggaaccggcatagaagaaagtatccttcagacagttctcgacagctgtgaaaacaccagaacgactatcaccaatatcatgaaaaaaaatccgcagatggatatggaaaccatgaaacccttgttaagttccgacagcctggtaagggaaatctctcttggtggccggaccattgacggaaatgtgcagttcttttacgcactgatcgccatggcctgcctgtatggatgctttatcggatttggctctgcgatcgggatccaggtcaatatcacacctctggcagccagacggtgtgtaacgccgacccacaagctgaagctgatccttacagaccagctgacatcttttgctctgggctatgtggacgtgatcattctgatcctgtatctccggtatattctcaatctggattttcagggacagatgggaaaaatgcttgtggtatcttttttcggaagtctcatcggtgtatctatgggaatgtttataggcagcttcggaaaaatgcaggaaggcgtcagaatcgggctcatgcttggaatctctatggtaagcagctttcttgccggactgatgaacggaaatatgaaggatatcgtggaaaaaagtgttccgtttgtgaaccggatcaatcctgcatcactgatctcagatgcgttttactgtatcaatgtatatgatgatatgaccagatactatagaaatctaatcacactggcggtaatgtgcgtggtgctggtgatggcatcctttttcatggtcaggagggaacgttatgacagtatttaaaggctatatgaggatcatgaaaaaaaatacaggtctgatcctcctgtatctgggcatttttttcggagtgacaatggcacttcaggcagcggccggtaaggaaacttataccagctatgaaagcgaaaaaataaagatcggagtggtggataaagacaacggaccacttgcagaaggactggtaaaatggcttgaaggtacgcatcacgtgaccatgctggaggataacagggagaagcttcaggaagagcttttttacagaaatgtagagtacatcgtggtgattcctgaggatttttatgagagctgtatggtaaacggagagagcatttctgtgacaaaggtgcccggatcttactcggcatattatgtggatcagcaactggagagctgcctgaatacaatgcggacatatctgaaagccggtttttcccagaaggaagcggcaacagcgatcctggatgaaaaaagaggagaagtcaccatgctggatacagatgaaaacagtggtacgtccggatggctctattatttccgatatattccatatctgtttcttgcattactctgctatgtgatgggctacgtgttgatggctttcaaaaaagacgatataccaaaaagaatgcaggcatctgcggtttctgcaagacggcagagtctggaagggcttctggccatgtttatcatgggcgggggcttatggggaatcggtatggctggagccatccttatgtatggaaaaacatttctcggttcagaaaatttaggatactatgtactgaacactctggtaatgatggcagtggcactttcactttcctatctgatcggtctttttgtaaaaaacagcaatatgttaagcggaatcgcaaatatcctgtctcttggaatgtgctttctgtgtggtgtgtttgttcccatgaatattatggatagaaacgtcctgaaggtgtctcagtttcttcctgtgtactggtatgaaaacgtaaatgagactcttggaagttatagccacctaacaggtgaggcagctgtatcggtgtggaaaggcattggactggaagctatgtttgcggtagtttttgtctgcatgatcctggcagtgaccaggtatcagcggcagaaataacagaaaataatagcagatggctgttaattatggtaggatatagctgataaagatgatttgcggagaaaaacatgaaaaaaatacaagttttactaaaaccacaatgcaatgcagaaattcaaaatcagtttgcaacaaaattcggagatcagtgcgaatttacatttcagggcaaagaaactgaggatgcgatcgcagcagcagaagtagtgatcggagagccagaggaagaagaaatcctgaaagcagaaaatcttcgctggatccagctgacctgggccggtgcggacaaatatacaaaaatgaaagcattcccgacaggagttacattaaccaatgcttctggcgcttttggaaagatcatatcagaatatgtgatcgggaatatcattgcgctgtaccgtgaacttccgaactactggaagaacaaacagaaatacctctgggtacagaatcgatcatcagaaaccatatatggaaaaaacattctcatcctgggaaccggggatataggaagaaatattgcccatagaatgaaagcgtttgaaacgcatgtgactggaataaaaagaactgcagtcccggagcatttgcagcagatgaaagagtttgatgaggtatatgatctgacagcgctggatcagcagcttcagaaagcggacattgtgatcggctgtctcccgggaacaccggaaacaaaaggccttctgaattacgaacggctgtattccatgaaaaaagatgcaattctggttaatgtaggaagaggaagcctcattccaacagaagacctgatcagagtactggaggaaggccacttaaaaggagcggtcctggatgtatttgaaacagaaccattgccggagacatcacctctttggaatatggaaaacgtccttatcactccacacattgcaggaccgagtttcggtggaaacgctgaagtccaggatatgatctggaacatctgcatggaaaatatggaacgatatctgaatggaaaaaaattaaaaaatattgtccggttaaaggatgggtattaaataaaaaagatagttacaagctccttctgataaactgtgaagcagttattcggttatgagcaagtagcgaagcggatgcttttatccgcttgactaaaaatacatttatggatatttaagaaagagacagagtgcataatgataacacgccagaaactgatcgatcagatagaaaaatacaagccatataatgagcaggaagaaaaagataaaatcctgatcctggactggatcagaaataatgagaatgctttttccagggaaaatgcagtagcccatatgacagcttctgcctgggtagtaaacagagaacggacgaaagtccttatggtatatcacaacatatacaattcctggtcctggcttggaggacatgcagatggtgagacggatttactgtccgttgctgtcagagaagtaaaagaagaggcagggatttccaatgttcgtccggtgtcagaagagattttttccctggaatccctgactgtagacgaccatgtgaaaaaaggaaaatatgtatccagccatctgcactttaacttaacatatctccttgaggcagattcagaagaggctgtttccataaaagcagatgaaaacagcggtgtagcctggttttcaccggaagaagcattgatgagatcaacagaaccgtggtttgtggaacatgtttatattaagcttttgaagaaaatgaatctatgttataatgggataaagacaaaagaggtttgacattgactgagtaaatacgaaaagccggaggaggcatagaaaaataagatgaaatgtccatattgcggaggcgaaatgtgtgaaggccagatccattccttcaattcaggaatagaatggaggagcagaggtgaatctatgcgattaaacaccgaaaaaggtctgtcgaaaatgctatatggtgatcggatcgaggcttatcgctgcgagcattgtaagaagatccttatatcttatgaatgatcttcttattgtaatgcaggatatagttttgcagggatcgacgggaagcaaggttaaaataaaagaataaaggactggattgtatgaaaatgcagtcttttttttattcataaggaacagggaaactgttagctgagaaagggggaaacaaacatgaaaaattattcagaggatgcggacagacagtatcacattcaggtagcaaaaggagaagtgggacgttacgttattttaccgggagatccgaaacgctgcaaaaagatcgcacagtattttgatgatccggttttggtagcagataaccgggaatacgtaacatacactggaacactggacggagtgaaggtaagtgtgacatctactggaatcggtggaccgtccgcttctatcgcaatggaagagctttatcggtgcggggctgatacatttgtacgcatcggaacctgcggtggaatgcagccggaggtaaaaagtggtgatattgttgttgcaacgggcgcaatccgtatggagggcaccagcaaagagtatgcacctattgaattcccggcagtggcaaatctggaagtgatcaatgcacttgtggaaggagcaaagaaagaaggatgtgaattccacacaggtgtggtacaatgtaaagattccttttatggccagcatgagccggaaaccaagccggtcagctatgaactgatgaataaatgggaagcgtggaaacgtctcggctgtcttgcgtcggagatggaatccgctgctctttttatagtggcaagccatttaaaagtacgtgtgggctcctgcttcctggtgcttgcaaatcaggaaagagagaagctggggctggataatcctgtggtacatgataccgataaggcaatccaggttgcagtacaggcaatccgtgaactgatccgtgcagatcaggcacagaaaaaagaagaataacgtatacatgcctgattcaggaaaggtgggaaaattatggaagaaaaacagatcaaagaaatgatcgatctggcgatcagacagatggactattcctatgcgccatactcacattttcatgtaggggcggtacttcttgcaaaaaacggtacctattataccgggtgtaacatagaaaatgctgcctatactccaacaaactgtgcggaaagaactgcttttttcaaagcggtcagtgaaggcatgagagactttcaggcaatctgtatcgttggcggcaaggatggtgttcctacagagtatgcagcaccctgtggagtatgcagacaggttatgatggagttctgtgatccggaaacctttcagatcatactggcagtcagcagagaaaaatatgatatctttacgttaaaggaactgttgccatttggatttggaccggataatctgaagaaactgaagtgataagcgcatgtggatacgtgcagagattttcacgatatgaatgcagtgagaagtaaaatattgaaaagtgatcgcccggatgttgatatgacaggccgggcgatcactttttctgccatacaataaaaaacgctgaaaatccttaattaaggtttttcagcgattctaatagcaggggatgagagaatcgaactcccaccaaaggttttggagacccctatcataccatttgaccaatcccctatattaaattgtgttttcatcactgttgcaattatacatataaaatatacaattgtcaagggatgagagtgctttttgtataataaaatataaataaaattcttcctgtcataaatcggcagaaaagcggagatggagggatttgaaccctcgcgccggttgcccgacctaccgcatttcgagtgcggacccttcagccacttgggtacatctccggatgcaaacctttattattatataaggtatccggagaaaggtcaatcttttttaaaacttttcttttttgtattattgacgaatcttccagactataatatgataatgagataaagtgtacagacagaagtggatgtgcagaaatggagggaattatgagcgataagaaatcagcgattctcagagtggcgaagggtcttactgagaattatgcttcagaagaactttttatgccgaagagcggtagacgtctgccgaaccgttcggtgatcattgatatagtaagagatctgaaatctattgtatttccgggatatttcagtacggataccagtgctaccgtatttccggagtattatgtgggacacagactgaatgatctttatgacagattgaagaatcagatcgagatcgcacttctttatcacggagaggaaccggaagaagcagcagctcatgcagacagaactgcctgtggattttttgagcagcttcctgagatccagagactgcttctgacagatgtacaggctggttttgatggtgaccccgcagccaagagcaaggaagagatcattttttcatatccgggattatttgctatctacgtgtatcgtctggcacatgttctttataaagaagagatcccatttatcccgcgcgtgatgtcggaatatgctcatggccgtacaggaatcgatatcaacccgggagcgaccatcggagagtatttctttatcgatcatggtaccggtgtggttgtaggtgagactacagagatcggaaataatgtaaaactgtatcagggagtgacactgggagcgctttccacaagaaagggacagcagcttgccaatgtaaaacgtcatccgacgatccgtgataatgtaacgatctattctaattccacagtgctcggtggtgagacggttgtaggagagaatacgattataggtggtaatacctttatcacagaatccattcctgcaaataccaaggtcagtgccaaaagtccggagcttgtgatcaagaaaccgaaggcccaggtttctgccacaaatgtatgggagtattgataaaaaatccaataaataaaaaaattaaaaaaaataaaaaaacctgttgacaaataaaacagtatgctatatactaatcatcgttgcagcggtcaagcgatcggtaatcaccgaagcgacgatgcgcgggtgtagttcaatggtagaacaccagccttccaagctggatacgtgggttcgattcccatcacccgcttgtgcgatagtggcgtagttggtaacgcgcgaccttgccaaggtcgagaccgcgggttcgagccccgtctatcgctcttcggaactctgaggatgatcagagttcttttttgttgcgaaaaaatcctctgctttatttttatgcagcagaggatttttcgcgttatgtgttactgcgtagtttattcagttgtttcaccctgatcgatcagagtatagaaggtcagaagataaagcccgcataagcctacaagtccgtagatgatccgggagagccagctcatgcttccgaacaggaatgctaccagattaaaattaaagaagccgatcagaccccagtttatggcaccgaccacagcaatggtcagggtgaagtactgcagacatttatttgacataagtcaccatcctttcgttatacaggaaatagtttttcatagaatcgaaaaaatatacacaggaatgagaaaaagaaaaacggaaatttctgccagccatgaaaaaatcatgaaggagaaatttccgttttcctttcatatgcaagataaaatgtaaatttccggtttatcgaattgggatcgtaaatatccgccaggcgattccgatatcttacttcagcttcagaatctgagaggttgtctgtccgccgcttacattcagagtttctttgccctgaagcgttacatcactggtagtatccttcagaagaaatacctggcatacagtgacggtttttccgggatcaatggtgctcatgtagttatctacagcatcatcgctggcttccggataagttccttccagaacttctccgttctgggaagcctgcagggtgaagtctacaaatgcactggactgggaatcgccggagtttgtatagtcgtagtagatcatcagacagggatttccgccgtagtccttggaaatcgcaaactgtttgaaacggacggagaatttgtcagttgtaatatcaatggatgcacttgcacttgtgtcctcagcagaggccgtgctgcctggggtggaagaatcctctgcagcggcagaactgctatctgtgctgtcatccgtaagctgggatgatatttcgtcttttacgcttttgaagtttgcgcacataaccttgactgtggtgtcatccagagaaacgatcttccagtcgctgccgattttgatcagaggataggtaatatcgatctcactgtatttctcatcagctgtggaagcattttcggcaagaagtgcagcgagcatttcctggatatcatcctgtgtcatttcctttccggcataggctgcgacagcaaccttacgggtgtattcctgaatagttgctgcatagatattggttccgtcaatatatttcatgtgaaccgttatcctggcagttccgttctggatgtcaaatttgtttttggtgatcttgtaggtcatttttttgttgacggtagtgaagaaatctgtgtaagcagaatcacggatatctgcatcatccagagcactaagatcatgactctggagaaggttctccattgtggtaaaatccatgttctgcatgcctgtgagaaattcttctgtggcttctaccggtttatggcgctgcatcatataccaggcggttccgccggctgcggcagcgatcagaaggatgatcagacagatcacgagaggttttttgctttttttctttctgtggggagtgtcgtcttcaaaatcattggagatcaatgatctggagagctcatcgtcataaaaatcattattgtcttctgtattcattattcctccttacaataagtcattctggttttcgggtgggtaagtcagaggatatctgtttgcatttgcgggcaaacagcatcaccctatgttaccgtaacgattatatcataggtttactgtttgagaaaccccctgtgttatgatatactggaagacacagaaaaagtggttgagtacaggtgacaaagcggaatgcgaatgcccgctttatgcagcagaaaaggtgaggtgaaatatatgttacggacaattcagtattcatttccttcaaaagcagacggattggaaatttcctgcctggcagtagtgccggagttggaacgtaatgagaaataccgtgggatcatacagatcgttcacggaatgagtgagtacaaggaacgctacattccttttatggaatatatggcagagcgaaaatatataagtgtgatccatgatcaccgtggccatggaaaaagcgtacgcagtaaagaggatcttgggtatatgtacggtggtggggcggatgccatgctgcaggatatccatacggtgaactgcttgatcaaggatcatttcccgggtattccgctgatccttttcggacacagcatgggctctctggcagttcgtgcctatgcagcgcatcatgacagctgtatggatatgctgatcgtctgcggctcacccagctataatgtatttcgtccggtcggagtagctctggcaaaggcgggaaagactgttttcgggcctaaacacagtgcgggtctgatcgagatgatgtcttttggaagctatgcaatgcactttaaaaaagaaaaaaaccgtttttcctggatttgctctgatccgcaggttgtgcaggattattcggattcagaatactgtggatttacatttacggatgatgcatatctggcactttttgacctgatgaaaagagcctatgatgtgaagcactggaagtgtacaaagccggaaatgccggtgctgtttatcagtggggcggaggatccctgcatgggaaatgtgagacagtttgcgaaggctgtccgtgccatgcgttgtgcaggataccgggatgtccggggaaaattatatccgggaatgcgccacgagatcctgaatgagaaagacaaggaaaaggtttatcatgatatatttacatatatctgcaaaaaaggactttgaacgctctgtgacagagtgatataataaaaatctgagtgctcctgcagacatctgtgagagggcgcaactactgagaaaacaggaggattcgtaaattatgagagcaagtgggattttacttccggtatccagtctgccatcgaaatatgggatcggatgcttttctgaggaagcatatgagtttgtagaccagctggcaagagcaggacagaaatactggcagattcttcctctcggacctaccggatatggagattcaccataccagtctttttctacctttgcgggaaatccgtattttattgatctggaggcttttataaaagagggatatctggataaaagtgattgcgaggactgtgactggggtacaaacgagagctatgtggattatgagaagatttataattccagatttcggcttttgagaaaagcctttgaaaattatgactgtgagacagatcaggaataccgtaagtttgtaaaagaaaatgctgcctggctggaagattacagcctgtatatggcaatcaaggacagcctgaatgggatcagctggatcgaatggcctacggaactcaaaaacagagaaaaagctgcattggctgaagaaagagagaagcttgcaaaagaagtgggattttactgctttcagcagttctgcttttttaaacagtgggcagcactgaaagcttatgcaaatgctaagggagtggagatgatcggagacatcccgatctacgttgcgtttgacagtgcggatgcctgggcacagccggaattgttccagtttgataaggaaaatattccgatcggcgttgccggatgtccgccggatgctttttccgccacagggcagctctggggaaatccgctttatgactgggaatatcacaagaaaacaggctatgcatggtggacacgccgaatggcaaattgtatgaagctttatgatgtggtaaggatcgaccatttcagaggctttgatgagtattattccattccgtacggagataaaactgcggagtttggtcactgggaaaagggaccgggaatggatctgttccgtgcgcttgaaaagaatcttggaaagctggatgtgatcgcagaggatcttggtctccttacagacagtgtgatcgagatggtggaagaatccggattcccgggaatgaaggtattgcagtttgcttttgacgagaatgaggacagtccgtatctgacgcacagatatgaaaggaattgcattgtttacacaggtactcatgacaatgagacaacaagaggatggttccgcaatctgagccagcatgaccgaaattttgccagggcctatattggctgtgagggcaagcatgagactgaggcagtgtggagcatgatacgtgcggcgatgtccagtgttgcagatcgctgtgtgatcccggtacaggattatctctgccttggaaatgaggcaaggatcaatgaaccgtcaactcttggtgacaactggaagtggcgtatgaaaaaaggccagctcaatgaaacaattattcagaagatttataaaatgacaaagctttatggaagacttgtaaaagaagaaacggaagagaaggaaaaaacagaagctgacagggaaaagatatctgacaaatagagaaatataaggatatcagaaaggacagaaatacatcatggaagaacagaaaagagaaaataaggaagagctgcagcaggaaactgctgaggaaaagaattccggacagggaaattcttccacaagaagcagtcttctgtggatctttgcaggaggctatcttgtgtatacaggatatcgtctctgcgccagtgtcataagcggagcagaagactccggtgtggtatttctggcagcgggaggtatttttgttgtgatcggagcagtgcttctgatcatggcaatccgtaatcttgcaaaggctggcgcacaaaaacatgagctggaagaagctgctgcgaaaaaagcggcagaggaagcttctcaaaatccggaaaccgtggcaaagaaaaaaatgtcaattgcggagcgggcgcatcttgcggaaaatctggatgacgcaccggaggagaaagacgaaaaataaagccggatgcaggtgagagtaaaatgcctgctgagatatgacgattagtaatagcaaaaacggaacatcataaggcaaaaaatccttatgtatgttccgttttttagatcaggcagatcgcaaaacagttatctgcgtctttgcgcgtttctgcgttttttttgagatttttttctgccgggggtatgtaaggtagaccagcagaatgcctgtaccagcaaaattccgatcattgctccgcagctgtcgatccctacatcccttacggaaggtccgcgggcctctacaaaagactggtggtattcatccagtccggcaaatcccacacatacaaatccggcaaggagcatcagccagattccccgaactccgtatacatagagggggaaggaaatagatatggctagcaggcagtattctgtcatgtgagcagctttacggacataaaattcgataccggcagcttcctgggaaagctgttccaggcttttgccggaagctaatatttcgtttttggtttctacgatctggtagctgatcttgtagctcagggcaccggaaacatctccggtctgtgcggaaaaagagtagatcacgcacatcatcaggatcgcaggtgcaaaagaaaaaggttttaataaggtaatcagtattttcatggctcttaatatagcactcccgcatggaaaagtccagaaaaatacagaaaaagaacagggaaaaggaaaaacagggagagaaggttaaatgggataggaggttaaaggggaagtggacagtaaggactgaaatgtgttagaatataaaataaatttcaggggcatttttaagaaaaaagcagcccgggatcgaatagaagaaaattacaggaggaaatcaacaaatgagtcttgcagataatatattcattgacatgtgcaaagatgtcatagaaaacggaaccagcacagaaggtgagaaggtacgtcctgtgtgggaggatggaactccggcttataccatcaagagatttggtgttgtgaaccgttatgatctccggaaggagtttccggcactgactttaagaaaaacagcgttaaagagtgcaatggatgagattctatggatctggcagcagaaatccaataatatccatgatcttcacagccacatctgggacagctgggcagatgagaacggctccatcggaaaagcctacggctatcagttaggtgtgaagcatcagtataaagagggaatgatggatcaggtagacagagttctttttgatcttaagaacaatccgtacagcagaaggatcatgaccaatatttatgtacatcaggatctccacgagatgaatctttacccatgtgcctattccatgactttcaatgtaaccaaggaacccggaaaagacaagctggtccttaatgcggtgctgaaccagagatcgcaggatatcctggctgcaaacaactggaatgtgtgccagtattctcttcttctcatgatgatcgcacaggtctgcgatatggaagccggagagcttgttcatgtgatcgcagactgccatatttatgatcgtcatattccggtaattaaagaactgatctccagaaaaccgtatcctgcaccgacagtaaaactgaatccggagataaaggatttttataaattcaccaccgatgatctgatcgtggagaattatgagacatggccacagatcaaaaatattcccattgcagtataattgcataaagaaaggaagaaagaatgaatattattgttgcagcagataaaaactggggaatcggaagaaataatgaacttctggtaagtattccggcagatatgaagatgttccgtgaggaaactacaggaaaagtggttgttatgggaagaaaaacactggagtcttttccaaacggacttcctctgaaaaacagaaccaacattgtgatcaccggcaaccgggattatcaggtaaaaggtgcggtgattgttcacagcatcgaggaagcactgaaggaagtggagaaatatccggcagaggatgtgtactgtatcggcggagacagtatttacaaacagatgcttccgtactgtgatacagctcatgtgacaaaaatcgattttgcatatgaagcggatgcgtatttcccaaacctggatgaggacccggactgggagatcacagcggagagtgaagaacagacatactttgatctggaatatgcgtttgtgaaatacgagagaaaagatagataatgtgagcacagatcataaagcagaatgagaatgcccgctttgtacagaaaaacaatgaagaaataataaaaaaacagaccaccgaaaaaaatacggcggtctgtttttttgtgcttaatgttatgtataatgacgaaaattcggtaattactcgattacgtggatccatcccttcggtgcttcgatgcgtcccatctggataccggtcagtgtgtcgtacagcttctggataaccggtcccatcttctccattccgcttgggaagcagatctccttgccgtgatcattgatctttccgacaggagagataactgcagcagtaccgcaaagaccacactctgcaaaatctttaacctcatcaaagtagacctcacgctcttcagcttccagtccaaggtactcctttgcaacgtagatcagagaacgacgtgtgatggaaggaaggatgctgtcagacttcggtgttacaaccttgccgtctttagtaacgaagatgaagtttgctccgcctgtctcctcaacttttgtacgagtcttgggatcaaggtacatgttctcatcaaagccctgtttgtgagcatctacgatagcatgaaggctcattgcgtagttcaggccagccttgatgttaccggttccgcaaggtgcggcacggtcatagtcgctgacacggatcgtgatcggtttggcgccgcctttaaagtacggaccaaccggtgttgtaaggatacggaactgatattcgtcagccggtttaacaccgatcacggcgttggaaccaaacatgtacgggcgaagataaagtgttgcgccggaaccatatggcggaacccatgcagcatttgccttaacaacctgctcaacagcgtcgataaatctttccttcgggaataccggcatttcaagtcttgctgcagatgcagcgatacgctctgcgttcaggtcaggacggaaagtaacgatatgtccgtcttctgttgtgtatgccttcagaccctcgaatacactctgggaatactgaagcacaccagcacactcgttgagtacgatattagggtctgtgcttaaagtaccctcatcccattttccatctttaaaattagacacgtatctgtagtcggttggcatgtaagcgaatccgatgctggaccagtcgatgttctttttttccataacgattcctccgtttacaatttttactttttaccattgtaaaacttttacgtgatgacttcaatagttttttgttcctttttttcatttgcttgtaattttaatatgatttcgatataataaaaattatctatggactggagggaaaaatggacaatcacgaatttgaagaccttggaaaaaagatgcaggatattgtagataatgcagtgaattcaaacagctatcacgaattaagccatacgatcaaccagacagtaaataaggccattgattccggaagcgaagcgctgaaaaatgcgctgaattccgtgtttgatccgggtgctgatccggaattccgtaagaaaagctatacataccagagcccttattacggaagaagcagaaaagcaaagcagcaggctgcaaggaaacagtcggaactgctttacggaaagactaccggtgaaaatctcaaaggcatgatgatggcagtttccggtgggatacttttaagtggcatggggcttggagccatggtgcttctgatctggatgggcattggacacagcggtgcacttgcagcaggtgtgcttggagtgatgtgtgcaggcgcagcaggtggcggtgctcttttgggagcaggaacaagccgtctcggaagactgggacgtttccagaaatatatccgtgcgctgggagaccacacctactgtaattttcagaagcttgcccaggcagcaggaaagaacgagaaatttgtaaaaaaagatatcagcagaatgatccagaagggctggtttctggaaggccatgtggatgagcagggaacctgtctgatcaccagtaatgagacctatcagcagtatctggaaacacagaagcagctggagcttcgtaaacaggaagcagatcctaaggttcagctggaggagaatatgagtccggaagcccaggaagtcctgagaaaaggaaatgaatttctggtaaagatccgtgagagcaatgacgccattcccggggaagaaatttctgcaaagatttccaggatggaaatgatcgttcagaaaatttttgagcgtgcaggagagcatccggaggtgattccggatcttaagaaaatgatggattactatctgcccatgactatgaagcttctggatgcttatgaggatatggatggacagcctgtacagggcgagaatatcacggcttccaagaaagaaattgaagaaaccattgatacactgaatattgcttttgagaaacttctggattccatattccgggataccgcatgggatgtatccaccgatatttctgtgctgcatacggttctggcacaggagggactgacagatgatgatttcgaaaaaatgaaacagaatacggaaatgaaataagtacaacgagcagatcagaagctggaatacagacatctgccggaaggtacagctgatcaaggagaatgcttatgggagaagaatttaaagactttgaggtagaagcaccggtgctgactttggaaccggatctcacggaagaaaaagaagaaattgtaaaaaaagaaccggagaaaccccaggagcctgcagtagaggaaccggtgttatctccccaggaacagaaaatcgtagaagattttgcagcaaagatcgatattgaaaatacaaaccagatcctacagtacggagccggcactcagaagaagatggcggatttttctgatgcagcgctggtaaatgtgaagacacaggatcttggggaggcaggagagcttcttgcaaatgtggtaggagaattgaaggattttgatgccacagaggaaaagggatttttcggctttttcaaaaaacagacagcgaaggtggaaactctgaaaaaccgttacacaaaggccgagggaaatgtgacgaagatcacggaagctctggagcagcaccagatgcgtctgatgaaagattctgccgtgctggacaaaatgtatgagcagaaccttgcatactttaaagaactttccatgtacattcttgcgggtaaaaagaagcttagggaagtcagagaaggcaagctcaacgaattgcatcagaaggcagcggcaagcggacttccggaagatgcacaggctgccaatgatctggaaagcaaatgtgaccgctttgagaaaaagcttcatgatctggagcttaccagaaccatttctatgcagactgcaccgcagatccgcatgatccagaacaatgatacgacgatgatcgagaagatccagacaaccattgtaaataccattcctctctggaaaagccagatggtgctggctctagggatcgcgcactccacagaagccgcacaggcacaacggcaggttacggattttaccaatgaacttctgaagaaaaatgcggaaacgcttcacttggcatctgtggaaactgcaaaggaatcccagcgtggtattgtagatattgaaactctgaaaaaaaccaatcaggaactgatccagacactggatgatgtgatgaagatccagcaggaaggccgtgaaaaacgtcaggcagcagaggcagatatgagacgtatggaaaacgaactgaaaacaaagctgctggagatccgacgttaggagtaagagtaaaaagatagttcggaaaggaaaggcagggcgtttgaagacacctgcctttcaagattcataaaggagatttttatgtacagagatcatacaaaagtaataaaaattggaaatcgtgttatcggaggaggaaatccgatccttatccagtccatgaccaatacgaaaactgaagatgtagaagcaacggttgcgcagatcctttcactggaaaaagcaggctgtgatattatccgctgcgcagttcctactatggaagctgcgaaggctttatcccagatcaaaaaacagatccatattccgctggttgcggacatccattttgattatcgccttgccattgcagccatggagaacggtgcggacaagatccgtatcaatccgggaaatatcggttccaaagagaggatccaggcagttgtggatacagcaaaggaacggaatatccctattcgtgtaggagtaaacagcggttcccttgaaaaagaactggtagaaaaatatcacggtgttacagccgaaggacttgtggagagtgctcttgataaggtgcacatcattgaagagatgggatatgacaatcttgtgatcagcatcaaatcttctgatgttctcatgtgcgccagagcccatgaactgatcgcagaaaaaacacagtatcctcttcatgtgggaattacagaagcaggaactctgtattcgggaaatatcaaatcagctatcggacttgggatcatcctgtatcagggaatcggagataccatccgtgtttctctgacaggcgcgccgctggaagaagtgaaatcagccaaaaggatcctgaaaacgctgggacttcgcaaaggaggcgtggaggttgtttcctgtccgacctgcggaagaacaaaaatcgatttgatcggccttgcaaaccaggtagagaccatggtacaggatattcctcttgatatcaaggttgcggttatgggctgtgtggtaaatggaccgggagaggcgaaggaagcagatcttggaattgcaggaggcgatggtgttggtcttctgatcaggcatggagaggttgtaaaaaaagtaccggaaacggatcttctggatacacttcgtcaggaacttcttacctggaatgagcaggagtcataatggagaaagatttttttgatgtatttccgcatcttaaagtgaagaaagagctggaagaacttctggacatggtatttgtgacaaaggtttccatgaaccccggaagaactcatctgagggtttatatcgaaagcagccgctggatacacaagaagaatatttttgcgctggaagatgagatcgaacggcagtgctttccggggattcccatgactgtaacagttgtggaaaaatttcatctttccgagcagtatacaccggagaactttctggaaagctaccgttccagtatggagatggagctgcgcaactataacatgctggagtacaatctgttccacagatcaaaaatcatttttacaggaaaagataccttgcgtatggagcttccggatacggttatttccagacagaaaagcgaaatacttgttgaatattttcataaggttttctgtgaacgctgcggtatggatctgaaagtggaactggattttgtggaagtgaaagagagtaaataccggaaaaatgctgcacttcagatcaaacaggaagtggaaaatgtcctgaagcatgccaaactcagcggggatcaggaaagtgaaccgaagcaggaggatacagccaaggaagagacaaagaaaacctcaggagataagaagggcgaaaagacaaacgagaagaaatccgttgacaaaaaacagcagaaggttcagaagggagatttccgcggcagcttcggattccgcagggacagcaatccggatgtggtttacggcagagattttgatggagaaacgattccgctggagagcattaccggtgagatgggggaggttatcatccgatgtcaggttatggatgtggaagctcgtgagatccgaaatgagaaaacgatcctgatcttccctgtgaccgattttacggacagtattgttgtgaagatgtttctgcgtaacgagcaggttccggaagtgacggaaagtgtaaaaaaaggcgcattcctgaagctgaagggagttaccaccattgaccgttttgacagtgagcttactattggaaatattacaggtatcaagaaaatcgccaattttactagcacaagaatggataccagtcctcagaagcgtgtggagcttcactgtcacaccaagatgagcgatatggatggtgtcagcgatgcaaaggcattggtaaaacgtgcctatgagtggggacataaggctatcgctatcacggatcatggcgtggtgcagtccttcccggaggcaaatcactgctttgatgcctggggcggttgtgttccaaaggagtctgattttaaggtgctctatggaatggaagcgtatctggtagacgatctgaagggtatggtcaccaattccaaagggcagcggctggatggagattttgttgtttttgatattgagactacgggattctcagcactaacctgcaggatcattgagattggcgcggtaaaagtggaaaaaggacagatcacagatcgtttttccacctttgtaaacccggaagtgcccattccgttccgtattgagcagctgacaagcatcaatgattccatggtcctggatgcacctgtgatagaggaagtactgccgaaattcctggaattctgtgagggctgcgtgatggtggcccataatgcggactttgatatgagctttattattgaaaactgtaaacggcaggggatttcggatgattttacttatgtggataccgttggtatggctagattccttcttcctgccctgaaccgttttaaactggatacggtagccaaggcagtaggtgtttctcttgatcatcaccacagagctgtggatgatgcggcatgtaccgcagagatttttgtgcggtttgtaaagatgctggaagaaagagatatttttgatgtggatgagatgaacaggcagggtgcggtttcaccggataccatccgaaagctgcccacataccatgctattgtttttgcaagaaatgagaccggaaggatcaatctatacaagctggtaagccagtcccatttaaagtactatcacagaagaccaagggttcccaaaagcgtgctggaaaaatacagggaaggccttctggtgggaagtgcctgcgaggcaggagagctttatcaggcacttcttcgcaatgcaccggatcaggagatcgccagactggtaaatttttatgactatctggaaatccagcctcttgggaacaatgcgtttatgcttgcggatgaaaagcacgatatgatcaattctgaggaagacttaaaagagataaacaggaagatcgtaaaacttggagagcagttcaaaaaaccggtggttgccacctgtgatgtgcattttatggatccccaggacgaggtttaccgacggatcatcatggcaggaaacggattttctgatgcagataaccaggccccgctttatcttcgtacaacggaggaaatgctggaggaattttcctatctgggaagtgaaaaggcggaagaggtggtgatcaccaataccaataagatcgcggatatgatcgagaagatatcaccgatccatccggataaatttccaccggtcattgagaactccgagcaggatcttaaggatatctgtttcacgaaggcccacgaaatgtacggagatccgttgccgaagatcgtggaggaccgtctggacagggagctgaattctattatctccaatggttatgcggtaatgtatatcattgcacagaagcttgtgtggaagtccaatgaggacggctatctggttggatcccgtggttctgtaggttcttctctggcagcgaccatgtccggtatcacggaggtaaaccctctgccgcctcattatctctgtccgaatccggactgtaaatacagcgattttgattcccctgaggtaaaaaaatacgcgggtatggcaggatgtgatatgccggataagatctgtccgaaatgcggtaccaggatgaacaaggaaggttttgatatcccttttgagacattccttggttttaaaggtgataaggagccggatatcgacctgaacttctccggtgaatatcaggccaatgcccaccggtatacagaggttatcttcggaaaagggcagacctttaaggcgggtaccattggtacccttgcggaaaaaactgcatttggttatgtgaagaactattatgaggaacgggggcagcacaagcgctactgtgagatcaaccgtatcgtgaagggctgtaccggtgtccgccgtaccactggccagcatccgggaggtatcatcgtactgcctatgggtgaggagattgagaaatttacacctgtgcagcacccggccaatgatgtgaacagtgatatcatcaccacacattttgattaccattccattgacggaaatcttctgaaacttgatatacttggacacgatgatccgaccatgatccgtatgctggaggatctgaccggcatcagtgcaagaacagttccgctggaccagagagatgtcatgtccctgtttgcgggaacgcaggctctggggatcagcccggaggatatcggcggctgcaggctgggatgcctcgggatcccggagtttggtacagactttgccatgcagatgttgatcgataccaagccgaaatatttttccgacctggtacgtattgctggactttcccacggtacggatgtatggcttggaaatgcccaggtattgatccagaatggtacagctaccatttccacagcaatctgtacgcgagatgatattatgatctatctcatcggaaaaggagtggaaagtggtctggcgtttaccatcatggagagtgtccgtaagggaaagggtcttcgtgaggaatggatccagactatgaaagagcatgatgttccggactggtatatctggtcctgtaagctgatcaagtacatgttcccgaaagcccatgcggcagcttatgttatgatggcgtatcgtatcgcatggtataaagtgtttcatccactggcttattatgcagcatttttcagtatccgtgccacttccttttcctatgaactgatgtgcatgggaaaagaacgtctggaatattatatggcggagatccggaaaaaaggtgatgaggcatccaagaaggaacaggatacactgaaggatatgagaatcgtacaggaaatgtacgccagaggttttgattttgtgccgatcgatctttataaggcaaaggcacaccggttccagatcatcggagataaactgatgcctgctctggataccatagagggtcttggagataaggcagcagaggcagttgtggatgctgccgcaaaaggcagattcctttccaaggatgatttccgtgatcgtaccaaggtcagcaagaccgttatcgatctgatggatgatatggatctttttggagatatcccgcagtccaatcagatgtcactgtttgattttacgggttgatatatgataccggaagggcttacaataaataaaaaatactgccgtttatcctgaaggctgatctggcagtgagaactcccaggaggataccagatactatgaaaaaagaagaattaagatacctgcagcgacttgcggagctgtatcctactatagcaaaggcttcaacagagatcatcaatctgcagtctatattaaaccttccgaaaggtaccgagcatttcatgtcggacattcatggagaatacgatgcgttttcccatgttcttcggaatggatcaggggctgtacgaaaaaagatcgatgatgtattcggacataccttaagcaacagcgacaaacgttctcttgccacactgatctattatccgaaggaaaagatggaggttgtaaaaaaacaggaagaagacatggagaactggtacaagatcacactttatcgtctgattgaagtatgcaagacaacggcatccaaatatacccgttccaaggtccgtaaggcacttcctgcagactatgcatatgtgatcgaggagctgatcacagagaaagcggaagttctggacaaagaagcatattacgatgccatcgtcaatacaatcattgagatcggccgggcagagaattttatcattgccctggcagaactgatccagcgtcttgttgtggatcatcttcatgtgctgggagatatttatgacagaggtccgggcccgcatttcatcatggatcgtttgatgaaatatcattcgctggatatccagtggggaaatcatgatgtggtctggatgggagctgctacaggacagaaagcctgcattgcaacagtgatccggaacagcatccgttaccgaaatatggatattcttgaggatggatatgggatcaatctcatgcctctggcaacctttgcaatggaggcttataaggatgatccatgtactgcttttgagatgaagggagatgccaataactatagtattctggaagaagagcttggacggaaaatgcacaaggctattgccattatccagtttaagctggaggggcagctgatccgccggcacaaagaattccatatggaaaagcgttgtttgcttcataggatcgatccgaaaaagggaatgatcacacttccggacggaaaagaatatccgctgaccgatacatattttcctactattgactggaaaaagccatatgaacttactacagaggaaaaggatgtaatggaacgcttggattccgcgttccgaaactgcgagaaactgcagaatcatgtccggcttcttctggacaagggaggcctttataaaacttataatggaaatcttctgttccatggaagtattccgcttaatgaggatggaagtctgaaagaagtccagatttatggaaaaacctacaaaggaaaagaattgtacgatgttcttgagacttatgtgcgccgggcgtttttctctgtaaatgaggatgaaaagcgtaaaggcagggatattatgtggtatatctgggcagctccgaattcaccgctgttcggaaaagacaagatgaccacttttgaacgttattttattaaagataaggaaacacataaagaaactaaaaatgcctactatcatcttctggaaaatgagaatgttgtagatgatctgctccgtgaatttgaactggatccggaaaaaggtcacatcatcaacgggcatgtgccggttcaccagagtgagggagagagtcctgtaaaatgcaatggcaaagttcttgtgatcgacggcggtttttccagaccatatcagaaggttacggggattgccggttatacactggtttataattcctacgggctgatcctgtctgctcatgagccttttacttctgcggaagaagcggtagccaaggagcaggatattgtttccaacagggtggcagttcactacaataacaaacgtactctggtcggtgataccgataccggaactgctctgaaggaaaggatcagtgagctgatccagcttctggaagcttacagaaaaggtatcatcaaagagaaaaaataagcagaattgagaaatacaagaagggtttcctgtatgctatagtaaacagaggtaatgcagatgagaaaaaacaaaagaagaaaaaaacggctgagagcagttctgatcctgttgatcattctgtttattctggcaggactgggagggatgctgtatgtttcccacagggataaagtggaaaaagaacaacgaagagaggcagcattggctgcattggacagtattccggaggtgacagcaactccagcagcaacagcaacaccggttccgacagcgacaccgacaccgtcattgacaccggtcccgacaatccttccggcatttgaaccggaaaattatcaagggatctggtacagcgaagacgggctgacaacgatcgatatttatgatatcagtctgaaatctgtttcctttacctataagagagtgaatggaaaagatccttcaatgactgcagaagcggatgtgactgcggaggtagcaggaaatgctactcagttccgttttaaggattccgaagggaataaggcaaagggagagtttgttttcgataaaagtggtgagctttatgtgaaggtaaaaacatatgaacggggagatggatctctaacctatccgaaaacagagtctattatgacccggcaggagccatccctggaagtatccgaaaattccgaagaagatgcttcctataatgaaagcaacgaaagttcctatgaacgggaatcctacagcgaaagcagtgaagattcttctgataaaaatacagaagaatatgagattccctacggagaagaagaaacctattatacggaataatcaaaaaataaaaaacggtaaaataaagaatccccggattttggcaatcagggaatcccgatacaggaattcccgaaactgttccacatttccggggatctctttatttgatcatttttttgcggtctgtgcggccgacgagataatcgatgctggtgtcgtaataatttgccagccggataagcatttcgataggaatattacgggatcccgtttcataatgggaataagaacgctggctgatatgaagaatctcacttaattctcgctgggacagatccgcgtctgtacgtaaatcctgaatacgctgaaatttcattgtgctcacctcttctttctattgaaagtataaaacagaacgaaatgcacccttgcaaaagggagcaaaatggactatactaaatttattatcttctaaaattcagaaaatgtctatctgaaaattcccttgtttttaatcgaatgcggattgtaaatatccgcctgatatgaaaagacgaaaagatggaagatcgggattcgttttttcgcagaaaggaatgtatttgtttgcgagtgttttatcagcagcgatctacggaatggaagtacgtgagatccaggttgaggcagatgtcagtgatggtctgccttcttttgctatggtaggatttccctctgcccaggtgagagaggcccaggaaagagtccggactgcatttaagaacaaccgactttgtctgccaccaaaaaaagtaactgtaaattttgcacctgccgatatgaaaaaggaaggagctggttttgatctgcctgtggcggctgcagtacttgcggctgccggaattctggagccggatcttctggaaggagttatgatcgtaggagagatcagtctgaatggaggaatccatggagttgccggagttttgccacgggtgatccgcgcaagagagctgggcctacgcttttgtgttattccggaggaaaatatccgggaggggaatctggtgaaggatatgccggtgtttggagtaaaaagtctgaatgacatgatccgatgtctgagagacccaaacacttatacaaatgagtatcaggaaaaagaaaaaacagaaaataaaccggaaaaaccaaatgttgattttacggacatctgcgggcaggaaggagcccggcgcgcggccgagatcgcagtgagcggttttcataatattctttttatcggaccgccaggatccggaaagaccatgctggcaagacgtctgcctactattatgccggagatgacatttgaggaaagcctggagatcaccaaggtatacagtgtggcaggacttctcacggaaaaagatccgctgatccggcagaggccttttcgaagtccgcatcataccagttcccctcaggctctggcaggtggcggcaggataccgggaccgggggagatcactcttgcacacagaggtgtgctttttctggatgagatgccggaattttccagaaaaagcctggagatcctgcgtcagccgctggaagataaagaaatccatttgtccagagctgccggaacttatatttttccggccagttttatgctggcggcagcaatgaatccctgtccctgcggattttacccggatatgaacagatgccgttgtacgtcgggggagatcgcgcattatcttggaaagatcagccagcctcttctggagcgtattgatatctgcacagaagttccggcagtgagtttttcaaaaatgaaaaagaaaattcccggggaatcctctgcgcaaataagaaagagggtggaagcagtacaggagattcagagagaacgttacaaagaggaaaaattttgcttcaatggggagcttgacggaagaaaactggaaaaatactgtgtaatgacgggaggggcagacaaacttctggagcaggcatatgagcagtttcaattcagtaccagagcatatcataagatactgaaaacggccaggaccatcgcagatatggaatcttccgaaaagataaaggaagaacatatctgcgaagcgttggcttaccgggcatatgacaagaaatactggtcataaaacagaaaaaaggaaggtattttatatggaagaaatacagcgaacaaggatacaatgtgccagtaaggatagcagtctctatccggcaagacttcaggaactttctggcatgccaaaacaattatattatattggaagatttccggatgatgacaaacctacagctgcaatcgtaggagcaagactatgcagtccttacggacggatacaggcatttaattacggaaaattcttaagtgaacatggggtgcaggtgatcagcggtatggcggccggcattgatgctgagggtcataaaggtgctctggaaggtggtaccccgacatttgcggttctgggaaacggtgtggatatctgttatccttcatccagcagaggtatttaccggagaatcccagaaaaaaacggagggattatcagcgaatatgaaccaggtaccaaaggcagggcatattatttcccggcaaggaaccggatcatcagcggactggcagatctggtgcttgtggtggaagcaaaagaaaagagcggctcactgatcacagctgcctgtgcactggaacaggggaagatggtatatgccattccgggagcagtaaatgatgctctgagcagaggctgtcacaagctgatctacgacggagcaggaattgcatactctccggaaatacttctggatgagtggggattatctgtgaaaaaaaagacaaatttgtctgaaaaaagcaagttaggacttgcaacggatttggatttggtgtatagttgtctcgatttacgaccaaaaaatctggatcatattataagaaaaaccggtttttcaccgggaaaaacagccgggatcctgggacagcttattttgatggggcttgtgaaggaaaccgggagacagtattatatcagacttgaataaatgcttttttgcccggagatttggcaggagcttttaagccggacaggaaggcagaatgagattaggagaggtaaaatggccaaaaatctggtgatagtagagtcacctgctaaaatgaagacagtaaagaaatttctgggggcaaattatacagtagaagcgtccaacggtcatgtgagggattttccaaagagccagtttggtattgacgtggacaatgattttgaaccgaagtatattacaatacgtggaaagggtgagcttcttgcaaaacttcgcaaagaagcaaaaaaagcagataagatctatcttgcaactgaccctgaccgtgagggagaagcaatttcctggcatttgatgcaggctttgaagacagatactgcaaagatgcacaggatcacatttaacgaggtaacaaaaacagcagttaaggcttccatcaagcaggccagggaactggacatgaacctggtagatgcacagcaggcaaggcgtatgctggatcgtatggtaggttataccatcagtccgctgctctgggccaaggtaaaaagaggcttaagtgcaggccgtgtacagtctgtggcactgcgtatcatctgtgacagagaagatgagatcaatgcattcattcctgaagaatactggagcctggagggtgaatttcaggtaaagggtgagaagaagccgttgatagccaagttctatggaacggataaaaaacttccgatcagaaaccgtcaggaaatggatgagattctgaaaagtctggaagactgtaaatatgagatcacagaagtaaaaaaaggtgagaggatcaagaacgctccccttccgtttaccacaagtactctgcagcaggaagctgccaagacattgaatttttctacgcagaagactatgcgcctggcacagcagttatatgaaggtgtggatgtaaaaggcagtggtacggtaggtctgatctcctatctgcgtacagattccactcgaatttcagaggaagcagatgcagcagcaagaacttatatttctgagcagtatggtttagattatgtttctcagacagagaaggcaatcaaaaacggacagaagatacaggatgctcatgaggcaatccgtcctacagatattgcgaggacaccagttctggtgaaggaatccctgaccagggatcagttccgtttatatcagctgatctggagacgttttgcggcaagcagaatggcaccggcacgttatgagaccacgtctatcaagatcggagcaggtgagtatgtgtttacggttgcggcatccaaggttgcctttgatggttttatgtctgtgtacacagaagagggcgatgacaaaaagggcaatgttttaagtcaaagtctggagaggggtatggagctgaagctgaaagagctgaagccggagcagcattttacacagccgccggcacattacacagaggcgtcacttgtaaagaccatggaagagcttggaatcggacgtccaagtacgtatgcgccgaccatcacaacgatcatcggcagacgctatgtatccaaggaacagaaaaatctttacgtcacagagcttggagaggttgttaataatattatgaaacaggcttttccaagtattgtggatgtaaactttacagcaactatggaggggcttttggactgcgtggaagctggtactgtacagtggaaaacggttgtacgtaacttctatccggatctgaagcatgatgtggatgaggctgaaaaagaacttgagaaagttgatatacaggatgaggttacggatgtgatctgcgacaactgtggccgcaacatggtgatcaagtatggtcctcatggaagatttcttgcatgtcccggatttccggactgccgtaatacaaaaccatattatgagaaaatgggtgttgcatgtccgaagtgcggcggtgaaattgtcatgaaaaaaacgaaaaaaggcagaaaatattacggatgtgagaataatccggaatgtgattttatgtcctggcagaaaccttctgcaaagaaatgtccgaaatgtggtaattatatgctcgaaaagggaaataaactggtttgtagccaggaaacctgtggatatgtggaacaaaaaccaaaagatgaagattgatcgaaaaaatgcttttctattaattttcagaaaatcccgttaaaaataaaaaaaatataaaaatgtcttgtaaatttccagaataacgtgtaatattagactagaaaaacgatttctttcaaggtacgaaagtgaaaggaggaaaaatgagcgttcagttgctagataaaactagaaaaatcaataagcttctgcataacagcagctcaagcaaggtagtgtttaacgacatttgtcaggtgctcatggaaaccttaagttccaatatcctggtactcagtaagaaaggtaaggttctgggagtcagtatctgcccgggtgtggatgagatcacagagctgatcgatgacaagattggcggacatatcgacccgttattaaatgagagatttcttggtgttctttccacaaaggagaatgtcaatctccagacacttggctttgagcatgtacccggaaattatcagggaatcgtgaatccgatcgatattgcaggtgagagactgggaacgttattcatgtaccgcaatgatcatccctatgatattgaagatattatcgtcagcgagtatggtacaacagttgtaggcctggaaatgatgcgtgcggttcatgatgagaacgcggaagaagacagaaaacagcagatcgttaaatcggcattcagtacactgtccttctcagagcttgaggcgatcatccatatctttgatgagctggatggggatgagggtatcctggttgccagcaagattgctgaccgtgtaggtatcaccagatctgtgatcgtaaatgcattgcgtaaattcgagagtgcaggtgtgatcgaatcccgttcatccggtatgaagggaacttacattaaagttcttaatgaagtgatctttgatgagcttgaggagataaaagcacagagaagcaagaaggcataatgtgatcagcactgtcagatgcttgatataagataaagaacgtgacaaaagagacttcccgttatcgtgggagtctcttttttgtctgtttcataaaatcaaaataaataatgaaattaagaaaacaagagaaaaaaagagtattaaagagataaaattagaataatatagaaaaactatatcttaaaagggttgcgaaaatatgtgaaattcactaatatagccatagtgattagcactcgtagaaagtgagtgctagcagacgaagatggaacttataaaggaggaacatagatcatgaagttagtacctttaggcgacagagtagtattaaaacaggttgaagcagaagaaacaacagcatccggaatcgtgcttccgggacaggcacaggagaaaccacagcaggcagaggttattgcagttggacctggcggagttgtaaacgggaaagaagtaaaaatggaagtagaagtcggaaatactgttatctattccaaatatgcaggaacagaagtaaagatggatggaactgattatattattgtaaagcaggaagatatcctggcaatcattaaataatataaacatcttatcgtatatcaatataaataggaggtcattttatcatggcaaaagagattaaatatggcgcagaagcaagagcagcacttgaagctggtgtaaataaacttgcagatacagtaagagtgacacttggaccgaaaggaaggaatgtagtccttgacaaatctttcggtgctccgcttatcacaaacgatggtgtttccattgcaaaagagattgagcttgaggacggatttgagaatatgggtgcccagatcatcaaagaagttgcatccaagacaaatgatgtagctggtgatggtactacaacagcaaccgtacttgcacaggcaatggtacatgagggaatgaagaacctggctgcaggcgcaaacccgattatcctcagaaaaggaatgaaaaaagcaacagatgttgcagtagaagcaatcaaaaacatgagccaggcgatcaacggaaaagctcagattgctaatgtagctgcaatctctgcaagtgatgagcaggttggacagcttgttgcagacgctatggagaaagtttccaaagatggtgttatcactgttgaggagtccaagacaatgcatacagagcttgatctggtagaaggtatgcagtttgaccgtggatatatttccgcatacatgtcaacagatatggagaagatggaggcaactcttgatgatccgtacatcctgatcacagataagaagatcagcaatattcaggagatccttccgcttcttgagcaggtcgttcaggcaggtgcaaaacttctcatcatcgctgaggatgttgagggtgaggctcttacaaccctgatcgttaacaaactgagaggaacattccaggtagtagctgttaaagctcctggttatggcgacagaagaaaagagatgcttcaggatatcgcaatcctgacaggcggacaggtaatctccgacgagcttggccttgacctgaaagaagctaagatggagcagcttggacgtgcaaaatctgttaaagttgcaaaagagaacaccgttatcgttgacggtcttggagataaagaagacatcgcaaaacgtgttgctcagatccgtgcacagatcgaggagacaaaatctgagtttgataaagagaaacttcaggagagacttgcaaaactggctggcggcgtagctgttatccgtgtaggtgctgctactgagacagagatgaaggaagcaaaacttcgtctggaagatgctcttgcagcaacaagagcagctgttgaggaaggtatcatcgcaggtggcggatccgcttacatccatgcatccaaagaagttgcaaaacttgttgcaacacttgagggagacgagaagacaggtgcagctgtgatcatgaaagctcttgaggctccgctgttccacattgccgcaaatgcaggactggaaggctctgttatcatcaacaaagtaagagagtctgaggttggaactggtttcgatgctctgaatgagaaatatgtaaatatggttgagaacggaattcttgacccggctaaagttacaagaagtgctctgcagaacgcaacaagcgttgcatctacactccttacaacagaagctgtagtttccacgatcaaggaagatactcctgctccggcaccaaacccgggaatgggaatgatgtaatttcaatcaggcaggtaaataatttacaaaatgagagggcctgcgtcatggacgcggctctctttttgtgttataatcaaaagaaatcagtaaattacgaaaggaagaagcaaatgagtgacttatattcagaacttctggtaaagaagaaacagacagggaaggatcttgttgtaaaatacggtcttattgcactgaccgtgatcatggttctgggaggtctggtgctgaatgcacttcttctggttccggctatcgctcttggtgttgcatgttattttgtaattccgaaaacagacctggaatatgaatatctgtttgttaacggggaactggatattgatatgatcatgtccaagtcaaagagaaaaagagtaaaatcactccagcttgcggaggctgatcttgtggcacctctgaaatcccgcagaatggattattacaacggaaatcagaagatgaaaaccatagacttttcctcaggtattgaggatcataagcgctatgccatgatcgtaagagacagcggagaaacctgcaaggtgatcctggagctggatgatgaacttgccaataccatgaaaaattctgcaccgagtaaagtttttttggattgacatgaatcttgttttttgttacactagttcacaaatttaaaatatcttacacaaagggaggaaatgcaatgggtactattattggtgaaggcattacgtttgatgatgtcctgctggttccggcttattctaaagtaattccgaatcaggttgatgtttcaacgtatttaaccaagaaagtaaagctgaatatccccatgatgagtgcgggaatggacacagttacagagcacagaatggcaattgctatggccagacagggtggtatcggtatcattcacaagaatatgtccattgaggcacaggcagaagaggttgacaaagttaaacgttctgagaacggtgttatcaccgatccattttatctttcagcagagcatacactgaaggatgccaatgatctgatggcgaaataccgtatttccggtgttccgatcacagaaggcagaaaactggtaggtattatcacaaaccgtgatcttaaatttgagacagatttcagcagaaagatcaaggagtgcatgacttcagaaggactgatcacagctaaggaaggaatcacacttgaggatgccaagaagatccttgcgaaatcccgtaaggagaaattacccattgtagatgatgactttaatttaaaaggactcattaccatcaaggatatcgagaaacagatcaagtatccgcttgcagccaaggatgcacagggaagacttctctgtggtgctgcggttggcatcacagcaaatgtgcttgcacgtgttgatgcgcttgtgaaggctaatgtagatgtgatcgtaattgattctgcacatggtcattcagaaaacattttaaaagcagtccgcgaaatcaaggcaacatatccggagcttcaggtaatcgcaggtaatgttgcaacaggcgaagctaccaaggctctgatcgaggctggagtagatgcagttaaagttggtatcggaccgggatctatctgtacaacacgtgttgttgcaggtattggtgttccgcaggttactgcagttatggattgttatgaagtggctaacagctacggaatcccgatcattgcagacggcggtatcaaatattccggagatatcaccaaggccatcgcagcaggtgccaatgtctgcatgatgggaagcatgttcgcaggatgcgacgagagcccgggaacattcgagctttatcagggaagaaaatataaagtatatcgtggaatgggatctatcgcagctatggagaatggcagcaaggatcgttatttccaggagaatgcaaagaagcttgtgccggagggtgttgagggtcgtgttgcgtataaaggacatgttgaggataccgtattccagctgatcggtggtttaagatccggtatgggttactgtggagcagagaatattgagaagcttaagacaacaggcagattcatcaagatttcagctgcatctcttaaagagtcacatccacatgacatccacatcacaaaagaggctccaaactacagtgtagatgaataataaaggaaaaaaaggtaagaccggtaaaaagtcacccaggccgtcccataacgggcggcctgtttccgtaaagaaaacttcctccgggtcttccagaagaaaaaagaagtctttgagaaaaaagaacccgatcaagatcctgcagaggattgtgctgatatgtatcattgtgatcgttgcttttgctgcgtgtgcgttaggatacgcattttttgagatgcgcatggaacagagtgaaactcagtccggacaggaagaaatatccgggaatgccagcggaaatggcggaccggaacaatggcaggcagaaggagcaccttttattgatgtggagcttctgacaccgaattcctattccagaccacagatttctatggaacaggtaaattatatagccattcattatacggccaatccgggatctactgccgtatccaaccggaattattttgaaaatcttgcgataacgcaggacaacaaagtcagcagtcattttgtggtagggttggagggagaagtggtacaatgtattcccacttcggaaatatcctatgctacaaattccagaaatgtagataccatatccattgaatgctgccatccggatgaaacagggcagtttaatacagcaacctatgattcagcggtaaagctgacagcgtggctttgtacacgctttggactgacttcggatcaggtgatccgtcattatgatgtcacaggtaaagactgtccgaagtattacgtggaaaatcccgatgcatggatccagatgaaatcagacattgcagcacagatccagacagattatgcattacaggggaaataaagtgttactgtttattttgtgagcaacaagaagtctggaaaaataatttctgaaaataggggcttgaaaattaagaagaagtattgtagtataacagcagaagctgcatgactggcggaaagtaggattacctacagggagtgcagtgaagtgagaagccgaccgcctgggcagcctgataaggggtgtccaggcggttttttgttaccgttcatatcctgggataagccccgggccttacattagacaaggaggactgtgaaaaatgacgacattttcacttgaaaaagaactgaaagaaaattcctatccgggaagaggaattgtgatcggacgttccgctgacgggaaacatgcagttactgcatattttattatgggaagaagcgagaacagcagaaaccgtatttttgttgaggatggggaaggaatccgtacacaggcttttgatccgtccaagcttacagacccgagcctgatcatttatgcaccggtacgtgtccttggaaataagaccatcgtaacaaacggtgatcagacagatacgatctatgagggaatggacagacagctcacctttgaacagtctctccgcagcagagagtttgagccggatgcgccgaactatacacctcgtatttcaggcgttcttcatgttgaaaacggtaaattcaattatgcgatgtctattttaaagagcaataacggaaatccggattcctgtcttcgttatacattcgcctatgagaatgcggcggcaggacagggacgttttatccatacttataaatgcgatggaaatccacttccaagtttcgagggagagccgaagctggtagagatcccaaacgatattgatgagtttgcggatctcctctggaagagcctgaaccaggataataaagtttctctctttgttcgttttattgacattgagacaggaaattatgaatccaggatcgtaaacaagaataaataagaaaataggaatatcacagagaacggaggagctttttcatgaaagaattacagttaaaatacggatgtaacccaaatcagaaaccatcaaagatctatatggcagatggaagtgagcttccgatccaggtactctccggaagaccaggatacatcaatttcctggatgcctttaatggctggcagctggtacgtgaccttaagaaagcaaccggacttccggcagcaacttcatttaagcatgtatctccggcaggtgcttccatcggacttccgctgaatgagacactggcaaagatctactgggtagatgatatggactggaagaatttttccccgcttgcatgtgcgtatgcaagagcaagaggtgcagatcgtatgtcatcatttggtgattttatttctctttctgatgtctgcgacaaagataccgcaatgctgatcaagagagaggtttctgatggtgtgatcgcacctggatatacagaggaggctcttgaaattctgaagcagaagaaaaaaggcaattacaatgtgatccagatcgatgaaaactatgttccggaacctttggagcacaagcaggtatttggagtcacttttgagcagggccgccaggagctggcaattgatgatgcgctgatctccaatattgtaacagagaataaagagcttacggaagaagccaagagagatatgaaggtttctctgatcatcctgaaatatacacagtccaattccgtatgctttgttaaggacggacaggctatcggcgttggtgcaggacagcagtcccgtgtacattgcacacgccttgcaggccagaaggcagataactggtatctccgtcagtgcccgaaggtactggagcttccgtttaaagacacgatcacacgtgcggagagagataatgccattgatgtttacattggtgaggaatatatggatgtccttgcagatggggcatgggaaaagacattcacagagaagccggaagtgttcacaaaagaagagaagagagcatggctggatggtcttaccggcgtgacactgggatccgatgcattcttcccgttcagtgataatatcgagcgcgcatataagagcggtgtaaaatatattgcagagccgggtggatctgtacgtgatgacgcagttatcgatacatgtaataagtatggaatggtgatggcatttacaggaatccgccttttccatcactaaaagatgcatgccttggccatgatatgcagctgaaataaaagataaaaaatataaagtcccgaatctaaaaaaataaaaaaaagagatcagactcgggactttt

SEQ ID NO: 234 - DNA, 1287 bp, Unknown
  gut microbiota DNA sequence
acttcctactacgcagatctgatcatcggaaagtactgcttctacaagagctgccagtttctggatatcctccttctgcgctccgaggatctgatttctttccttctggagcatatcctctgtaacattggagaaatatgcggtttttgagatacttccctgcatctgcggagttctcggcacatccttgttgctgatcgttccgatgatatattttgtcatctcacgctcgtctgcctcaaaggcacggatataatccggcactccctggtatacttccagggttctctttagatggggatcacggtaggataccaggaagctctctccgtttctcttaaagccgctcatgcagccatacgctccaccctttacacgaaggttgatccagagataatcgtagcttaagatcactttcaggatctccagtgcaccggtatactccaggccttttttgcggaagtttccgttctgtgccacatactggacctggccggaggtcttgaaggcttcgtttttctttatgcagggggcctgcttcacagactccggcttctgtccgttaaacaagacttttttgatcccggcagcctgtgcttttactacatccagagattctctctctccggtatagcttacacagaaattctccggacgaagtacctcttccatcaccttacggagatttttcacgatctcatccttgcagctgtcaaaatccttctccaatttttcgataaactgataatatccgattcctgccatctcatcctggaatgccgccatcggagatgcgtaggaagcaccacggagaacggcggtggaatggcctgcacttgcaaggctggcctgggctctggatctcactctggcaatgatctcgtagagacgtttggtgtcatccagcttcgaagttgtaagaacctcccggatcatggaaaacatgaaatccatctccggatataacgcttttcctcttacggcaaacatagcacggaatgcatcggtatcctgggcatcatcaaaaacctctatcccataggcaataccgccggttctcgcattcacttcattaaacagctcgccatacgtgtaattctccgtatccactgcaccaagcacagatttcagaagtcccagataatggactgtatcaacatcaaagtcatggatctcaaaaagaagatccgcataaccgataccattggtgcacacatcatgatacagaaacaagctatcctccacatggtgctcctcgtttgtcagccctgtgatctcttttttgat

SEQ ID NO: 235 - DNA, 1566 bp, Unknown
  gut microbiota DNA sequence
gaacgtgaagcatggaagaaagcaggcatcgatcttccgggatacgatgtagaggctgtgactgagaaagcgaaaaaagagccaggctgggtacatttcggaatcggaaatatcttccgtgtatttatcggcggtattgcagatggtcttctggaagagggagttcttgacagaggtatcacatgtgtagagacttttgattatgacgtagtggataaaatttacgcgccatatgacaaccttggcttaaatgtcatccttcacggtgatggaacccgtgagtacaaagttctcggggcacttgcagaagcagtgaaagcacagtcttctgatgctgaacaatggaaccgcctgaaagaaatttttgcagctaaatccctgcagttggtttccttcactatcacagagaagggttatgcactccggaaagcagacggaacatggttcccgtttgtggaagcagatattaaaaacggaccggataaggcaacgggagcaatggcagttcttgtggctatgctgaatgagagatataaagcagggaaatatccgatcgccctggtatccatggacaactgctcacagaacggcgccaagcttcgtgagtctgtgctgactatgacagaggaatggcataaagcgggcttcgtagatggtggcttcgtagattatgtaacggacgagaaggtggttgcattcccgtggaccatgatcgacaagatcacacctcgtccaagcgagcagatcgcagcagaccttgagaaccttggcgttgaagatatgcaaccggtgatcacaggaaagaaaacatacattgcaccatttgttaatgctgagaagccacagtatcttgttatcgaggacagcttccccaacggacgccctgctttggaaaaaggcttcggcgtatacatggcggacagaaataccgtcaatctctccgagagaatgaaagtaaccgtctgcctgaatccggtacattccgcaaccggccctcttggtgtggtacttggatatgatctctttgcacatatgttgaacaccaacgaagatatgatgaaaatggcccgtatggttgcctatgacgagggacttccggtagttgcagatcctggaatcctttccccacaggcatttgtggatgagcttttcaatgaccgttttccgaatgagtatcttggagataccaaccttcgtctggctgtagatgtgtcccagatggtaggtatccgtttcggtgagactgtaaaagcatatgtgaagaaatttggagatgcttccaggctgacagcaatcccgcttggaatcgcaggatggctgagatacatgctggctgtagatgacgaaggaaacaaatttgagcttgcaccggacccgatgaatgaggagatcacagagcagcttggcgatatcgtgatcggaaaaccgaaaaccttcaaggatcagctgaagccaatcctttccaatgaaagactgttcttcacagatctttataaagatggtgtcggagagaagatcgaggatatgttccgtgagatgatcgtcggacccggagctgtaaaggca

SEQ ID NO: 236 - DNA, 46553 bp, Unknown
  gut microbiota DNA sequence
aaatcggatcatccggttatctttacaaaacgtttctttaataataaatggcttcagggagcatttgcacttggtgcagtactcattaccgttgtactgacggttccgagattccatctcctgtttaaagtagagacgctggatctgatgcagcttggctgtgtatatttgtatgcgtttgcaagtcttccaatcattcagctgcttaaatggatacgtatgaaattgaaaaaaagagaggaaaaatagtggatttaagcaaaatatctataaaaaaaatcagggagcttattgtgtttacagcacttcttgtagttgccctatggaaattcgatgtggtgctcagcgtgctaaaagcaatatgggggattatatttccgtttgtgcttggcggggcgatcgcttttataacaaatgtgccaatgagctttttggaaaagaaaattttcggaagagtaaaaaaagaaaataagacagttggaaaactggcaagaccgataagtctgctccttacgatcatattggcggttggtgtaatcgtactggtaatgttcggggtgattccgcagcttacgcggacaatgggaactctgatgatgagtatcgctgatttcattccgcagatgcaaggctggattcgggaattttcccataataaccaggaaatcatgaagctggtaaatcaggtgcagtttaatccggatcaggcgatcaagtggggaataagtcttcttggaaatggtgcaggaaatatgatgaataccacaatgtcagcagtgggttccatagtcagtggattggcaaccttttttattgcattttcatttgcctgctatgttctttttcagaaggagaagctgcacgtgcagatccgaaaagtatttttcgcttttcttccaaaacaaaaggcagatgcttttcttaaagtctgttctctgacttatcggacatttgcaaattttcttgcaggtcagtgtctggaagctgtgatcctcggatgcatgtttgtggtgatactgagtattttgaggatgccatatgcacttttgataggagttttgattgcgtttactgcattgattccgattttcggggcctttatcggatgtgcagtgggaagttttttgatctttatggtaaatccgaaacaggcaattttatttattatagtatttctggtgctgcagcagattgagggaaatctgatctatcctcatgttgtgggtgaatctgtagggcttccgtcgatctgggttcttgcagcagttacgattggcggaaaccttatgggaattgtgggtatgcttgtttttattccgctgctttccgtgttctatactatttttcgggaattcgtatatctgcgcctgaaaaaaaagcatatcaaacaggtaacaaagacagaaatagaggaatatacggcggaggaaattgctgctatagaagaaacgtcaggaaaagaacagagaccttcaaaagttcaaaaaaaatgttgacaagagatggcaaggcaaaagaaaagtaaattgttcgaaaaatagagttaaaaacaaaaaatcatattttttgaatagaatatcaaatgttcatatccatcccaaaatgctaaactatcacacggtaaagaaatgtgtacaaagaaagggcataaaagaggagatagaggaatggataataacaataaaagcagtgtggtttaccagggtaagattcctggaagagtaaagtactcgtttgcttttggagcattgggtaaggatttgatctatggaatgatagcaactttttccatgatctattttacagatatcattaaagtagcgccggcgtttatcggaaccatgtttttcgtggcaaagatctgggatgcgtttaatgatcttttcatgggaatggttgttgataatacaagaagccgttttggcaaatttgtaccgtggctggtgatcggaacgttgatcaacgcatttgtatttgtaattgtatttacagattttcatttatcaggcgtaagcctttgtgtttttgcatctgttatttatgtattatggggaatgacctatacaattatggacattccatactggtcagtaatcccgaatcttacatctgatccacaggagcgtgaaaaagtatccgtactgccaagaatttttgcaagtatcggacagtcactgatcattgccggatttggagtacagatcatcaaaggtcttggcggtgattatacaggatatcatagatttgctttgatcattgcagcaacatttatttttacaatggctgtatgtgtactgaatctgccaaagatccagcatgatgttgagaaaaaagaaaaaatgaaatttaaagacatcttcacagtcatcagaaagaatgaccagttaagatgggcagtattgctgattcttttatataatgtggcaattcaggcaatcatgggagttgcgacctattacttcagttatgtatgcaacaatgccggaatgttatctgcatttatggtcagtgcatctgttgcagaggttgtaggacttctgatcttcccgaaggtaacaaagatcttgtccagaaagcaggcgtttttgtttgcgtgtgtgttgccaccgatcggattgattcttcttctggtggtaggaattgtgtgtccgaataatattgttttgacagcgattgctggtattattgttaagacaggaaccggtctggagcttggatgtgcaacggtattccttgcggatgttgtggattatggagaatatgttctcggaaacagaaacgagggtgttgtattctctctgcagaccctgatcgtaaaactgacagcagcatttacagcactggctattggatttgtactggagcttacaggatatgttccgaacacagtgcagtcacttgcaacacagaattctattcgtgttctgatgtgtgtagtgccgaccatcggagttattcttgcatatgttgtatttaagagcaaatataaattagatgatgaatttatgaaaaaagtcgttgcgaaactgaacggctcagaagagaaataagagcagtcccctgttttaattgtgaaaacaataaacaggggattttttgtattttatgtatattgataatatgctatcataaaatacagtaaaacatcagggagtatggagtgtgagagtatttagtattattttggcagatgatgaaccgaatatcctatatggaatgcagaagggaatagactgggagagccttggattctctgtagttggaacagcacagaatggaaaagaagtgcttgatatgatggatgaatttcatccggatttagtgatcagtgacataaaaatgcctttcatggatggtctggagctggcaaagaatatccatgaaaattatatgaatacaaaggtgatcctgttttccggatgggatgattttacatacgcacgtctggctatcagttatggagtttcggaatatgtgatgaaacccattgattacgaggagatgcaacgtctgctcataaaaatgtatcaggaactggagaaagaatataatgaaaaaataaaccgtgtccggctggagaatgcatatacacagagcttgccgttattgcgtcagcagtttttttccaggcttatgacagaggttatggaggagaaggaatacaggcggcagataaaaaatctgaagctggatctttcggatcaggtgtactcagttatagcagtaaaagtgggaaaagaagggaagaaggacattctcagcgaactgtcaatgaaggaaacgttgaaggaagcactggaaaaaattgcacacgttcatgaatttggtatgggcgataaagaagtatttctccttggtggcagcaagagacatgagattgggaagattacacgaagtatccaggaaacagcagttatgatccagcgtattttcggagcgaggatttcctgcgggatcagcaacagcggagagaatctgaaagatatgccggcgttgtatgctcaggcagcagaagcattggattataatcttgttttgccggaggagagctatacttactataacgatatcatgccgcagcaggaggaagaggactggaactctcaggtggaaatgatcggaaaatccatcacatattgtacggaagaagaattgaaaaaacaggtcggtgatctgatcgcatggctgcataagggtcactataatttgaatgaatatcagattgttattctggaaatctctttttctgttgccagattttataagaaataccagcttacatcagacgcagaatttgcgggatccaaaaagatggcggtgaagatcctttcgttgagcacgggggaagaattagatcattggcttttgaattactgccttctgatacgatcactgatccagaaaaaacagattgacaacaatgtggttctggcagaaaatgcaatgaagatcgtggaaaaaaaattccggaatccggagctgagtgtggagtcgatatgtggagagttacatgttagtacctcctatttttcgaaaatattcaagcaggaaacaggaggtacattcattaattatctgatcagtcgacgtatggaagaagcaaaaaaactgcttttgcagactgattataagagtcagaccatcggagcgatggtagggtatccggagccaaattatttcagctacgtatttaaaaaaaactgtggaatctcacctgtaaaatacagaaaatctgcacagtcagatacatagatcggcaataatatacaaggagctgaaaatgaaaaataaaaagataagtatccgtatcatttttccggtggttatgtctgcttccattgcagcctgcatcatcagctgtattcttctgttttcctactatttttcaacatattttcagaaggatgccatagaaaaaataggaaagcaaagggattttctggcgcagagtctggagacacagattgaaaatatcaatgtactgatcaacaggatctactatcagaatataaagaaatatgatgtggacagtgccaggtttgcggaggaaatggaacagcagatatttcttgaagaaaagtgtctgtatggacttgccttatacgatatagacggagaaagtatatggcattcagggacatttgcagaacaagaggatgcgaaagagatggcctggtttttacaggcaaaggagaatattgagacgatcagttacggacggcggagactggtacgtcctcaggaggatagttatgtatttgagatcagccgttatgtagaatatatcaaggatgggaatatgagatcaggaattcttctgatggagtattatacagattctgtggatgagatactgtcgcattacagaaatcagaaatcagcttattgctatttgctggatgatcagaagaatatgctctatcatccttttgataaagagatcgcatccggattatataaagaaaagaccatagagtctgcattgtcctgcaaaaattataggatagaaaaggcggatggtcagcagtggctgatagagggtcagcagattggttacacaggatggaatatggtggttgtaaattccatggacagtctggtattggaaagccataatcttcattatcttgtatggtttatactccttctgatcggagtgatcctaatctttcttgatactcttgtgtttcacaattttacaaatccgatttacaggctgcttcggacaatggaaaaattcggaaaaggcgattataatgccagagcacaggaggaaggaatcggcgaactgaaaaatgtaagtatacattttaatattatggcagataagcttcaggagcaaatggaagagatacgcagaaatgagagagaaaagcagaagatggagaagaagcttctgcagtcgcagatcaatcctcattttttgtataatacgctggattccattatctggatgatccgaagtgaagaatatgatggtgccggggagatggtctctcttctggctaaatttttccggatttccttaagtcagggaaaagatatgatcactctggaaaaagaactggaacatgcttccagctatctggccatccagaatattcgtttcaaggataaatttgaatttcatgtggacgcagatccggaactgctgaaatatttttgccccaagctatctattcagccattgctggaaaatgctatttatcatggaatggatggaatgtatgaggatggagaaatcgagatccggatctatgaaaagaatggagctatcaaaatcgatgtgtcagataatggacccggtatgacacaggaaaaaatagattatatcatgcacaataaagtagtatccagcaaacgtggttccggaatcggagtgtgcaatgtaaatgagaggatacagctgatctatggaaaaaattatggaattacgatcagtagtgaactggatgagggaaccgttgccacgatcacgatcccgaaaatggaggaaatggatgagcagtaagaaaaaacatatcattctgattctggttctgatcgcacttatatcctttcggtatatgacagtgcgaaatcatagggcagaaaaaagcagaattaccatcgtcctgccacaaaacacacaggaagatttaagcagtgtccaggagggaatccgggattatgcttatgaccatcagataaagctggatgtctggtacaaaaagcagatgtccgaaaaaagttttgcagagctggtgaaagaggaaaagcagaatcgaagcatgggaattcttctggtatatccggaattttatctgaaaaaaaatcagaatggttacaaatataaggaagtactggcacttacagataccatgaaggagtcatttttgcattatgcggcatttgtgcggagggaacaggaagaagaaacatacaggatgccaatcagtgaaactgttttgggacagatcaaaagtggccgtaagaaagtggtttatatggaaaatacatacagacttggctatgaatgtatgcagatgatagaagcttacggaaagaaaaaaaagatggagagtatctttctgcagccgttaaagcttgatcgggaaattctggaagcgggcagtctggatgcattacttgcaaggtagagggagaagatgaagtggaaaactgaaaaatataattttatactggcaggactttttgtgctgatggcaggtctgatcgtggcatggaagctaccaaagagagaagactgttatatccacatgggaattgcggtatatgatctgaatgatacttttatggagaaatatatacggactttgcaggatatgattgaaaaaacagaaattgcaggaaggaaaatatcctacgaaatctataatgcagatgggaaaaataagaaacaggaaaaacagctgcagtatatgtatgcgcaggagtatgatatcatgttggttaacctggtagagcctgcatctgcagccagtgtgttgaatgaagcggaggagaaggagatccccgtcattttgtataaccgtgaagttgccgagaaggatcttcagatcgtgaaggatgtctggtatgtaggaacagacggaaaagctgccggagagatacagggaaagctgctgaaggagctttgggataagcagaagcagagtgtggatcggaatcaaaacggaaagctggactacatattgattgagggggaagagtctcattatgatacgattcggagaactaacggatttttggagtcaggaagagaattgccgttaaagcagctgggaaacctgactgcggattggaaacgggagattgccctggaaaaatttgcgaagctggatgaagagacgatccggaatacggaggcagtcgtatgcaacaatgatgacatggcacttggggtctatgattattacaaaaaacatcagatgaaacttccggttattattggaattaataacagtcaggaaatgaatcagaagatccgactcggggaaatctatggaactgtggataacaatatggaggatcaggttgcaagaatttatgagataatgaaatctgttttaaatggagttatagataaatatgataaaatctggtacagtatgccttatgaaattgtaaatagtgacatatcagaagaaaaatgatacgatgaatgcagaataagtattccccgctttaggtgtatggagcactaagcggcgggccaagaagggggtatattatgtggtttgtatttgccttgctgtctgctgtatttgcggcgctgacctccatactggccaagataggtattgccggtgttaattcgaatcttgcaacagcgattcgaacgatggtggtgcttgtcatggcatggggaatggttttcctcacaaatacacaaggtggaatcactgcgatcagcagaaaaagctggctgtttctgattctttcaggtctggcaacgggtgcttcgtggttatgctattatcgtgctctgcagataggcgatgcatccaaggttgtgccgatagacaagctgagtgttgtgatcacactgatattggcatttgtttttttgcatgagaaattcacggcaaaatcgatgatgggatgtattttgatcggtgcgggaacattattgatggttttgtaaaaaggcataagaaaactatatacaaaaggagcgggttatgaaaacacgaaagaaaatttcagcaaggctgttggcaatcatgcttattgctgcattgctgcttcctcttgcatggaatgttccggtggaagcagccgagacaaaacagatcgatgttttgttcagccatgatacacattcgcatttgaacagcttttcaaccatcgtagatggagagcagaaagaggttggcggatttgcaaggatcaaaaccctgatcgatgaaaagaagcaggaagatccggacaccctggtgctggatggcggtgatttttccatgggaactctgatccagaccgtatacgatacggaggcggcagagcttcgaatgctgggatatctggggtatgatgtgacgactttggggaatcatgaatatgattatcgttcaaagggactggcaaatatgctggaggctgcgaaggcttccggtgagacagtgccggcactggtagtgtgcaacgtggactgggacagcatggagcaggatggattaagcgatggtcagaagcagatccggtcggcatttgaagcctacggtgtgaaggattatgtagtagttcaaaaaggagatgtaaaagctgcagtagtcggtgtgttcggtaaggatgccctggaatgtgcaccgacctgtgaattaaagttcaaggatccggttgaggccgtaaaacagacggtagaagagatccgaaaaaatgaaaaagtggatatgatcgcttgtgtgtcccatggaggaacctgggaggatgagaacaaatcggaggatgagatccttgcaaaagaggtgccggatatcgacttgatcatcagcggacatacgcacacagagctgaaagaggcaattcagcatggaaacacatatatcgtatcctgcggcgaatacggaagaaatctgggatcactttccatgacacagaagcaggacggacggtgggagctgacatcctatgagctgatccctgtttctgaggatgtaaaaccggaccaggcgacacaggaacagatcgatgccctgatggatacggtagataagaattatcttgccgatttcggctatacaagggaagaggttcttgctgaaaatgatgttgaattcaacagtctggaagaaatgggtacgaagcacgaagagttgaatcttggtgatatcatgtccgatgcatacatatatgcagtggaaaatttcgagtattatgatggtgatccggttgatgtagccgttgttccaagcggaaccgtgcgggatacatacacaaagggcgatatcacagtagaggatgtttttaattccttttcactggggatcggaaaggatggtgttgccggatatccgctgatcagtgcatacctgaccggaaaggagctgaagctggtagcggaggtggacgcttctgtatcggattttatgacaacggcaaggttatattgcagtggattgaattttgcatacaatccacatcggatgatcctgaataaggtgacagattgttatctcgccagggcagacggagagcggatcgagatccaggatgacaagctgtatcatgttgtgacagatctgtataccggccagatgcttggttctgtgatgaaaatgtcctatggactgttgtctcttgaaccgaaggacagggatgggaatcccattgaaaatctggaagatcaggcgatcatggagggtgacagagaattgaaggcctgggatgcgatcgcaagatatatgcagtcctttgcggatacagacggcgacggaattgccaatgtgccggaatattatgagacgacacatggacgtaaggttgtggaggacagcagaaatatcattgatctggtgaagcagccgaataagttttcggcaatgatcgcaggtatttgtctgatctttatcgtgatcattgtgcttgtggtatttctgatccgaaggatgatccgcaggatcaaagtcagaaaaggaaagagaaattcaaaataaatatacggctgagaagaaagctgtcgctttagcggttaatagattgcaaagcgacagcttttatttgagatgaattgcaatttcttttgtaaaattgtagaatgaaagagcttatgaaaaagagtcatgaaagagagaatcgggaaatgaatgataaaatcgcagtttgttttggaaagggcggacagagagatatggcggaagccttttgcaggaggaccggagcgcagcttcaggataagccgggagattttctgacggtgcggtttgattccaggggcgtttcgctgtccggtttcgggctgacctatcagggggattttgtggagacgatgcttcacagagttaccagaggcagacttcagcatgagatgctggtgaaggcggtgaagtcagataaggagggaaggaaggccatcgatgctacggcaggaatgggtgaggatgcctttcttctggcagcccagggctatgaggtgacgctgtacgagcagaatccggtgatcgcagcccttcttaaagatgccattcgccgtgccaagaaaaatatggatctgaaagatattgccggtcgtatgaaggtgatcgagggaaacagtgtagaaggtatgtcaaagcttcttgatcctgtagacgtgatctatctggatcccatgtttccggcaagacagaaatccagcctgatcaacaagaaacttcaattgatccagaagctggaaccaccgtgttccggggaaaaggatctttttgatgcagctatcagagcaaatccggataagatcatcgtcaagcgtccgttgaaaagtgaatgtcttgccggccgggagccgtcttatacattgaaggggaaggcaatacgatatgactgctatgtattataaagtcagacactatcaatacaaaaatcgaatcggaaatcttaagtctgaagctgtaggcgtggtaagcggggaaaaacatttccccatatttcctggaaatatgattttcaagccactgacgaaatccaaaccattttccacgccactgtatgcttatgcagaggtgttctggtcaacgatcattaatgaatattttatgcctgcgcccaggtatgaactggccatctgtgaagggtatgaggcagtaaatgaaaaatatcttgactacggaacggcagtacccatggcctataaagaaggggaatcccttttgaatcttctggagtttttcaggaaatatccggatgaaaaggtagatatagataattatgtaaactattgccagatgttttatgattatagagatatttttgaagctgattttttgcaggagcatcaggaaatggcggaacagcttgccatgcaggtactgatctctgtcctgaagggagaccagaattatcattatgaaaatgtagcatttctctgtgataaagatggcgggatcataagtcttgcacctatgatcgatcatgaattttctacgtattttatgtttccggacgatatttcccgtcatgtatactggctgatggaattaagcaaatccatccgcggatgggaagtccggcctggggaatatgataatttcaaagatccggaagaacggaaactaatggaaaaaagtgccacctgtattcataaaaatctcctctatataaaagaacattatccgcagacaacggaagaatttctggataaagcagaaaaactgaaaacagcattgacggaagcttcagaggattttctgatccggggaaatacggaatatccggactatgcggattccagtgcatggctgatcggaaaagcccgatacaaggataaagatgaagagaaagccagcgcttatgaggcggaattatacggaaagggaaaaaaacttgatttccgggacgtaagtatcagtgcaataaatgaaataaaagctgtgatcagtcagatggaagaagttttgagaaagagagaataaacaaatggaacaaacaaaaacaacgttgacaaaaacctgggtggtggcggcacttgcctgtgtctgctgtcttctctggggaagtgcgatcccgctgatcaagacaggataccgtttgatgcaggtggattccgcagatactgcaagccagattgtttttgcgggagtgcgttttgcgctggcaggaatccttgtactgatctttgcatctttgcgtgagcgcaaggttctgcttcccgatcggactgttttgaaatatgcggtgccggtatgtatggctcagacggtatgtcagtatttcttcttttatataggtgtggcacatacctccggtgtaaaaggcgctattatcacaggtcttgggaattttattgcgatcctgctgtcctgccttgtttttcacaaggaaaaaatgaccgggcgaaagatgcttggctgtatcctgggttttgcaggcgtggtcgtgatcaatcttatgggaaattctctggatgcaggttttaggattacaggagaaggatttattctgatcgcgcagttttcttacggaatgtccacggtgctgattaatattttttccagaaagatatctccggtggtactcagcggaacgcagtttaccatgggcgggatcattctgttcctgatcggaaaagggatgggaggacatctcggaagcgtaaacgctgccggtatcgggatcatcttttatctggcaatggtgtctgcggtggcctatacactgtggtcagtgctgcttgcctggaacgatgtatccagggtagcgatctttggctttgtaaatcctttgttcagtgtgatcctgtctgcactggttctgggagaggtacgtcaggcatttaatatgggaagtctcatcgcactgtttcttgtctgtgtgggaatttatgtggtaaatcaaaaaaaatcttcataagtggtattgcagttattgttcccaggcaatattttttgaagtgtgttactgagaacggagcgaacagtaacggtcgcagaatgaacagtaacgatgccggagctccgaaattgatttcaatacggcattgtgttaaaatagtttcataaaaaatgtgaacatataaatccgtgccggaataactgcaggatccggaagcagatcctgcaccggacagataaggaggaaaatatggaatttcagaaattgatcgaagagagaaggaccatccgtaaatacagcccggagagcaggatcacaaaagaagatcttcttgcagtgatccgggcagctcaggaagcacccagctggaaaaactcccagaccggaagatattattgtgtaatgtccgaagagatggtggagaaggtcagcagagaatgtctgccggaaatgaaccaggcaaaagcagagaatgcctccctgatcgttacaacctttgtacataaccatgccggatttcagaaagacggaacaccggataatgagctcggaaacggctggggttgctatgatctgggacttcagaacgagaatcttatcctgaaggcaaaggagcttggatatggaaccctgatcatgggacttcgtgccggagacaaactccgtgagatcctttccattccggaaacagaaacggtagtggcagtgatcgccatcggaaaagcagccgaagagcctgcaagaccgaaacgtaaagatgtggaagatattgtgagattctattaaataatagaagaaatgtccggtacatatcaaaatgttcgggcattttttaacagaaattaaagagcaaaatggtctgaaaaggattgcctgaaggaatgaattctgttatcctgtaagaaaacagctgtgacaacatggaagggttttgaaaagcagagtttgggagaagcaaaaagcaatacagtaaaagcaagggaggtttttaaccaatatgcagatcatacatgaaaatgaatacgaagaaaccatgaaaaatatcgtaacgccatatcttctgtctcacagaagggaactttatgtaccgggtgcggattatccgtttcgtaacgaaagcaaacggatcacaggtaagatccatatgctgcagtatctgtctgatattgatatgcctaaaggtgtggtagtcatcagccacggattcacagaatcagcagtaaaatatgatgaagtggcctattattttcttaaagaaggctatcatgtatatattccggagcattgcggccatggccgcagctatcgtcttaccgcagacccgtctctggtccatatcgatacatggagaagatatatccgcgattttctgaaagcatgccgctacataaagaaagcacatccggatctgtcacttaacttgtatgcacattccatgggtggtgccatcggtggtattgctgcagcctgggagccggactggtttcacaaggtgatcctttcttctccgatgatccgtcctcttacagataatgttccgtggccggcagccaccggcatagctctggagaaatgcattttcggaaaagatgaggaatatgtagctggccgaaagccttacgatggcagcggttcttttgagacaagctccgcaacatcaaaaccaagatacgagcgatacaaaaatctccgtgcagaacataaggagctccagacctggtctccatcctatggctggctctgggcttctgcggaaatgagctggtatctgcgtctctacggatggaaaaaatatacggcaccaatgctgctcatccaggcccagactgaagatctggtgtctgtccgtgccctgaaaaattttgccggaaagatcaatcgccagggaaaaacaagctgtgattatatccatatgatcggaacaaagcatgagatctatggaagcagaggtaagatcctggagaaatactggggatatatatttacattcctggacgatacggaaaatgatattgatcacagataagtatttttactacaggtgtatcacatatttaacaacaggattggcagcttttattcacttcctttctttatcatagtaaaattataaagcttttctcttatacattcgacaaaaaatgtgatataatctaacgaatcgtctttttgtacagacaaacgtacaatccaaaaagacaaaattaaataagggaaggattatagaatgttatctgttattgaatcagtgaatgctgccgtaaacaattttatctggggcgttcctgcgatgatctgtattattggtgtaggtctttatttaagtatccgcacgaattttctccagattcggaaatttccctatgccatcagggtcactatcggacgtatgcttcggaaaagagaagcttccgatggaagtctgacaccgtttcaggctgtttgtacggcgttagctgctaccgtgggaacgggaaatattgcaggtgtggcaggtgctattgccatcggaggaccgggagccgtattctggatgtggatttccgcacttcttggaatgtgtacaaagttttcagaagtaacacttgcggtacatttccgcgaaaccaatgccaacggagatctggttggaggaccaatgtattacattaagaatggtctaaaaaaacactggcactggctggcatatctgttttccgcttttggtgtgcttactgttttcggaaccggaaatgcaacccaggttaataccattacaacagctattgattctgcactgatcaattacaatgtgatcgctgcagacaatacttctacggtaaaccttgttatgggaatcatccttgcgattcttgtggcaatgatcctgcttggcggaatcaaaaggatcggccaggttacagaaaagctggtaccgtttatggcattgttttatattattcttgccgtcggtgtagttatcatcaactggaaaaatgttccgggtgttttcagctctataatcagaggagcatttaatccggcatctgtgacaggcggtgtagtaggaagctttttcatgagtatgaaaaaaggtgtttccagaggtattttttccaatgaggcaggtcttggtaccggttccatcgcacatgcctgtgcagacaccagaaaacctgtaaaacagggatttttcgggatctttgaggtattcacggacacgatcgtgatctgtacgctgacagcgcttgtcatcctctgcagcggggtgccggttggttatggcgcagcagcaggagcggagcttaccatcagcggttttaccagtacatacggaaactgggtttccatctttacagcagttgccatgtgctgcttcgcattttccactatcattggatggggactttacggagccagatgtgcggagttcctttttaaggaaaaagctatcagaccttttatggtactgtactctttggtagcgatcatcggcgcaactgttgaccttggacttctctggagtatcgcagagaccttcaacggtctgatggcgatccctaacctgatcgcagtattcctgctttccggtgtggttgtaaagcttgtgaaggagtacttcgccggagaaggaaagaacgcctgaaggagtttttgaaaaaaaaacttgactatcaaaacaaacagagttagaattggtttaactcattaaagagttaacacataacagaagtaaattccatgaagggaatcagtaaagacagaggaaccatcttcagagagctgtgactggtgtgatgcagcgtcggaactgccttgaatatcatccctgagaaggaaagccgaaagtttcagacaagtaagtaggttttcacgggtgcttcccgttacagaagtcgcgtatgccggtacgttgcagaatcgtgcttgtttcaatggagaaacagggtggttgcggaattttatatccgtccctgaaaggggacggatttttttatccaaaacattttaaaccacgcggtaaggatctgaaaccggaaaaatatacaaaaggggaaagagtatgaaagtgtacaaaaaactcatgaacgcacttgcagcagtagaaaaaattgtactggtcatttccacactgctgatccttgtgctgactgtgggaaatgtattttcccgtaaggtcatccatcgctcatggtcttttacagaagagcttgttgtagcggtgtttgttctcatcacacttctggcagcagcacttgcctgccgtgaaaaaggaggactggtaagtctgacactggttacagaccgtcttccgaaaaaactggaaaaaccatctgtgatcctgattacggtcctgagcattgttttttccgcaattttatttaaatatggaatggacaaagttcttacacagctggcaaacggcaagagaactttcgtattgaactggccggagtggatcttctggtccttcgtgccgatcggagcaggctgtatgatccttcattttattgagtactgcctcgacttctgcctgaaaaaagaagatgaaaaggaggacaaataaatgatcagtgcaatcttatttatctccttctttgttttcctgatcctgggacttcccattgcgatctgcttaggtctgtcatctgtatgtgctatcctttattccggcacatctctgacgatcgtagctacaaatatgtactccggaatcagtaaattcctgcttcttgctatcccgttctttgttctgtccggaaacattatggcaaaagccggtatttcaaaacgactgatcaacttcgtagatacctgcgtaggacataaaaagggcggtatcgccattgtatgtgttatcgtagcctgcttcttcggagcgatctctggttccggtcctgcaacggttgcggcacttggagcagttctgatcccggctatggttgagcagggcggtttctccgcaccgttttccacggcattgatggcaacttccagttccatcgccattgtcataccgccgagtatcgcattcgttgtatatgcttccatcacaggcgtatctattgcagatatgtttatggctggtatcgttccgggacttctgatgggtgttgctcttgtgatcattgttatgatcgaggcaaagaaacataacattcagccatcccgtgaaaaagcttccgcaaaagagcgctgggatacatttaaagatgcattctggggattcctgatgccgattatcatcctcggaggaatttacggcggtatctttacaccaactgaggctgcagccgtatctgttgtttacggtctgtttgttggtatggtgatctaccgtgaggttaagctcaaagatctgtttgacattcttgtggattctgcaaagacaactggcggaatcatgctgatcgtagcgagtgcttccctgttctcttttgtatgtaccaagtttggtattgcaaatgcggcatctgagcttcttgccggcattgcacataatcagtttaccttccttctgatcgtaaacatcattttcctgatcgcaggatgcttcattgatgcaaactctgcaatgtacatttttataccgatcatgcttccggtatgtaaggctctgggctatgatgtggtagcattcggtgttatggcaacagttaaccttgcgatcggacaggtaacacctccggtaggtgtaaatcttttcgttgccatcagtatcaagatcaaaaaaggtctggaggttactcttcagcagatctccagagcagttatgccgatgatcgctgcatccgttgcagttcttctgatcatcacttatattccggctgtttccacagctcttccgaaggctcttgcaaaagagggctcctatacaggagaccagtcttctgacacagaaagccagagttccaaggattccggagacggaagtgattcctttaataccatcgcggattacagtgatcttgactggccggagatgacatggaactttgcatgctctacaactgaaacaagtacctgggctgacggaggacgtaagtttggtgagcttatggaaaaagcaaccggcggaaaagtcaaggttaatatttacgcagcagatcagctgacaaacggaaatcagtccgagggaatccaggcactgatgaacggagacccggtacagatctccatgcattccaatctgatctactctgcatttgacccgagattcaatgtagtatccctgccgtttatctatgattcttacgatgacgcagatgcaaaatttgacggtgaggccggagaaaagctgaaagagatccttggtgagtacggacttcattgtatgggaatcgcagagaatggtttccgtgagctgacaaacagcaagcatgaagtaaaaacagtagacgacatgaagaacctgaaggttcgtgtggccggttccaaccttcttatggaatgctataagagatggggggcagatgccacaaatatgaactggtctgagacatacacagcacttcagcagaatacggtagagggtgaggagaacccgttgcctgcgatcgacgcagccagtgtacaggaggtacagccgtactgctccatgtgggatgcaatctatgattgtctgttcttctgtatcaaccaggatatctatgacagcctgacaacggaacagcagcaggttgttgatgaggcaggccagaaggctgttgagtatgagcgttatatcaaccgttccggcgacgaggagatcatgagccgctgggagaagagcaacggtgtgacctttacaaagaaagaggatatggatatcgattccttcaagaaagcagtagacggaatcgacgactggtttgtaaaggagcttaagagtgaaggctatgatgatgcacaggatcttgtagatttgtttacagaggattcggtagataccgtggaggattacagtgatctgaactggcctgagacaacctggaactttgcatgctccacaacggagacaagtacctgggctgatggaggacgtaagttcggtgaactcatggaaaaggctaccggaggaaaggtcaaggttaatatttacgcagcggatcagctgacaaacggaaatcagtccgagggaatccaggcattgatgaacggagacccggtacagatctccatgcattccaatctgatctattctgcatttgatccacgcttcaatgtggtatccctgccgttcatctatgattcctacgatgatgcagatgcgaagtttgacggagaggccggagacaagctgaaggagatccttaacggctacggacttcactgcatgggtattgcagagaacggattccgtgagttgacaaacagcaagcatgaggtaaaatctgtagatgatatgaagaatctgaaggttcgtgtagcaggctctaatcttcttatggagtgttataagagatggggggcagatgctacaaatatgaactggtccgagacctacacagcacttcagcagaatacggtagagggcgaggagaatccgttgcccgccatcgatgcagccagtgtacaggaggtacagccatattgctccatgtgggatgcaatctatgactgcctgttcttctgcatcaaccaggatatttatgatgcgctgacaccggagcagcaggctgttgttgacgagtgtggtcagaaagctgttgagtatgagcgttacatcaaccgttccagtgatgatgagatcaaagcacgctgggcagacaaaaacggtgtgaccttcacagagaaaaaggacatggatatcgattcctttaagaaagcagtagacggtgtagatgactggtttgttcaggaactgaaaaaacagggctataatgatggtcaggatctggtagatctgtttacaaagtaatcttcatatatgtttataaaaagataaaatagccggaaagaggcagttctgagaggatttttcaggaccgcctcttttctttgcggaaaaaagattatatactgatagcagtccggcatttgtcgggcaggagattgttgaaatatggatggaacataagtaaaggaagaaatatgataaagatcgatctgataaccggatttctcggatccggaaagacaacatttataaaaaaatatgcctcctatcttctgaaaaaaggaatgaacattgggatcctggaaaatgatttcggggcagtgaatgtggatatgatgctgcttcaggatctgatgggagacaactgtgagctggagatggtttccgggggctgtgatgcggactgtcacagacggcgatttaagacaaagctgatcgccatgggaatgtgcggttacgaccgtgtcatcgtagaaccatccggaatctttgatgtggatgagttctttgacgccctccatgaggaaccgctggataaatggtatgagatcggaaatgtgatcgccattgtggatgcgaagctggcagaggatctttctgcggaagcggattatctgctggcttccgaggtggcagatgcaggctatgtattactgagcaggagccaggaagccacggtggaagagatcagcagcacaaaagagcatctcaaccgtgcacttggccagatccagtgcaggcgccgtctggacagtgagattctcaccggaaactgggatgatctcacagacacagacctggaaaagatcctggattgcgggtatgtggcagaggattacgtgaaggaatcctatgcggaaggcggcggatttgattctctgttttttatgaacgttcataaaagcgaggaggaacttcatgaaactgcagaaaggatcctgaatgatccatcttgcggagatgtttttcgcgtaaaaggttttctcagaaaagaagatggacagtggctggagctgaatgctacccgccatgagatctgcatccggccggcaaagctgggacaggagatcatgatcgttattggggagaaactgaataaagaggtaattgatggatactggaaataatactgcaggaaaaacagcaccggagagatatgtctcagagaaggcatttgaagagctgccagatacctttcagaagctagcagagctgcttggagaagatcagtttgaactggtggcagtgaatgatgaggaagatcttcaggatcagaaagcagcttcagagagtgctttttcggaagagatggcggaaaagcccgatgacaatatatacagagtggattcttatgtaaaaaacggagaaatccgccttgtgtatcttatgaatgatgcggtagaaagctttcttgtttttggaaatgcccgtatgacaggtgtatacaaaccggattacgagggcgagatcctggcagatttaagccggcaggggagagaatatatccttgtggtccaccaggatgattcggtggtgactttgttttttgaaaccctgtctctggaaaaacatctctacgattacagccggatcggtcatttctgggtagaagggtatgaatacttacggcagctggaatatcggctggcgatcctccgcgacaaatatgattatataggcggggacagctgcaacgctctggaggagaagctttctgcactggtggaatttccgccattgaattactgctgttatccggctgttccggaaaagtatattgttcccagggaaaattcgtggattccctcggaaaaggcatttgaggtaatgggagagatcgcaaggcaggcaggagaccgtacctttgtcaggtggcttgaaatttaccggaaacttccgtttaaatgggtagcacggaaactggcaggaatgcttcaccgtacaaaacacatccaggtaacgatgtgcctttctgaaaagctgcgggaagcttcatccggatatgggaatcgttcttttggaaaagaagccgatgaagaacttagagttcttacagaaaaagccaggacaaagcaggcagagctgaacgagcagggtatgggatccgaagtactcagggaagaaccgtttaccattgccagagattctctgggatttaaggtttatctcatgaaatggaacaaaggaagaaaagactgtaccgttgaaattgaagaaatatgacgaaatatatatagatccgtagagaatatctgtgaagtgtttttgcccggcagggattgcttttttaaaaacactggggtataatctaacggaaagagttaagaacagccctttaataagaaaggagatttttaaaatgaaagtaacacatattacagatattgataaattttttgaggtaattgacagctgcaagggtagagtagagcttgtaacaggagagggagacagactgaacttgaaatccaagctttcccagtatgtatctcttgcaaacatcttttccgctggtgagatcccggagcttgagatcgttgcagcagagaaagaggatatcgacaagcttatgaactttatgatcaacggctgataggaagaacgattttcagggatgtgagcttttcacatccctctattaatctgaatataaagcagaataggaatgtctgttttgtaaaatggatataatgacagcagatacagaaacaggtatttttttctctgtcatcatgagcataacaggatacaaccagggggtataatacttcctggtcaaactacgttaaaaggagtgtatacaaaatggttaaaattgatattatctccggtttccttggcgccggaaaaacaactctgatcaaaaaacttctgaaggatggatttcagggtgagcaggtagtgctgatcgagaacgagttcggtgagatcggtattgacggcggcttcctgaaagaggcagggatccagatccgtgagatgaactccggatgtatctgctgctctctggtaggagatttcggaacctctctgaaagaggttgttaccaaatatgatccggacaggatcctgatcgagccgtcaggagttggtaagctttctgatgttatcaaggctgtacagggtgttcaggacgaggttgacattaaactgaacagctatacaactgttgttgatgcaaaaaaatgcaaaatgtatatgaagaacttcggtgagttctttgataatcagatccagtatgcaggtgctatcatcatgagccgtaccgatattgcaagtgagaaaaaggttcaggagtccctggagcttctccgcagcctgaataaggatgctgctatcattacaactccgatcgagaatcttgacggtaagaaactggtagaggttatggagcatccggtatccctggagcaggagatgcttgaggaggagcatgagcatcatcatcaccacgacggagagtgtggctgcggccatgatcatgaagagcatgagcatcaccatcaccacgacggagagtgcggctgtggccatgatcatgaagagcatgagcatcatcaccatgacggagagtgcggctgtggccatgatcatgaagagcatgagcatcaccatcaccacgacggagagtgcggctgcggacatgaccaccaccatcatcatgcagatgaggtcttcacaagttggggccgtgagactattaaaaaatatacacgtgagggacttgagaagatccttgaggcactttccgagtctgataaatacggtatcatcctccgtgcaaagggaatgcttccggcagaagacggaacatggatctattttgatatggttccggaagaaactgagatccgtgagggtgcaccggaatatacaggccgtctgtgtgtgatcggttctaagcttgacgagcatgcactggaggagcttttcgggatcgcataaagcatatgataaaataaatgtccgttttgacgcaaagccaaagtggaatacagatatagattgttacagaaaggaaacagatactgtacattaaatcgtacagtatctgataggatggatttatggaagagaccagagtacccgtttatctgatcacaggttttctggaaagcggcaagacctctttcctgagctttaccctgcagcaggattactttcagatcgatggaaaaacacttctgatcctttgcgaagaaggtgaggaagaatatgatgaggaagcactgaaacagtgcaataccgttgtggagatcattgacagcgaggaagagcttacaccggaacgacttgcggcaatggaaatcctgcatcagccggagcgggtgatcattgagtacaatggcatgtggctggtaagtaaatttgaagagatggaaaaaccggaaggctggggcgtggagcagcatatcacctgtgtggatgcaagcacattccaggtttatatggcgaatatgaagtccctttttatggacatggtccgcaatgctgatatggttatctttaaccgctgccaggagaatgatccgcttccttcttacagaagaagcatcaaggtggtgaaccagcgtgcggagattatttttgaggatgaagagggcgagcttggtgatctttttgaggatgagatgccatttgatattgatgcgccggtgattgatattcttccggaggattatggtatctggtttgtggattccatggatcatccggaccgctatgtcggaaaaaccgttcactttaaagcacgtgccctgaagccgcgtggaatgggaagtaaattctttgttcccggaagaacagccatgacatgctgtgcagatgataccacattccttggttacatctgcaagagcgcttttgctccgaagatcgcagaaggccagtgggtggatgttaccgcgaaggttgcgtttgagaagagaatggaatatcagggagaaggaatcgtactttacgcagagcatgtggaagtttgcgagccacttgctgatgagatggtatatttcaactgatacgatcagagcatttgtatgccttaaggcataagaaggcctggcattgaaacaggtaaattacagctgaggagtttttatgtatttaattgcaggtttgggaaatccgggaaagcagtatgaggctacacgccacaacatgggctttgacaccgttgactgtcttgtggagaagaataatatcccgcagggcggcgtaaaatttaatgccatgtatggaaaaggtatcatcggcggtgaaaaagctattctgatgaaaccgctttcctatatgaatttaagcggtggtccgatccaggagatgtccggctatttcaagatcgatccggagacagagctgatcgtgatctacgatgatatcgatctggagcctggacagcttcgtattcgcaaaaaaggcagtgcgggcggacataacgggataaaggatatcatccgccgccttggaactgaaaaatttatccgtatccgtgttggtgtcggtgcgaaaccgaaagactgggatctggcagattttgtgctggggcatttttcggacagtgaccgcaagcttgtggatgaaggaattaatgatgcggcagaggctgtggagatgatcctgtccgagggcgtagatgcggcgatgaataagtataacaggaaaaagcctaagaattgaggtttgtatggaagcatttttgcagcctctgcagggtcttgcagagtttggggaaataaaaaagcgctgtggcgcaaactgcggaattcttaacgtttccggatgcatggagtcccagaaggtccatctgatgtatggactttccgggctttttccatatcatctgatccttgcggatgatgagcgtaatgcaaaggaaatctatgaggattaccgattctatgacaaaaatgtatatttttatccggcaaaggatcttctgttttttcaggcagatattcacggaaatcttctgatccggcagcggatgcgtgtgatccgggcacttctggaacaggaagaagtgaccgttgttaccagtattgacggatgtatggatttcctgatgccgctggaaaagatcagaagcaggcttcttcattttaaaagtgacagtgtgatcgatctggatcagctgaaggaagagctggtagagctgggatatgaacgcaccggtcaggtagagcttccggggcagttttctgtgcgtggaggaatcattgatatctatccgctgacagaggataatccttggcgtatcgaattgtgggatgatgaggtggattctatccggagctttgatgcggaaagccagagatccctggaaaatgtagatgaaattacgatttatccggccgcagaaaagatggacggagaagatatggtatcctttctggagtattttccggaagaaaaaacactggtatttctggatgaactgaaccacctggcagaaaacggcgagggtgtggaggaagagtaccgtcagagtcgtatgcacagagaggaaaaaggcgaggcaaatcttccggagcagtggctatgtggctttcaggaactgcagaagaagctgaacagacggaattgtgtggctgtatccgcactttctcccagacgttccggatggaagatcaatgaggaatttgatcttacggtgaagtctgtagattcttataacagcagctttgaacttctggtaaaggatctccttcagtataagagtcagggataccggattgcattgctctccggttccaggaccagggcggagcgtctggcaaaggatctttcagaggaaggactgaatgctttttacagccaggacatggatcgtatcatcagtcccggggagatcatggtggtctatggtcacgcaagacgtggcttccagtatccgctgatcaaatttgcagtgatgacggaaaccgatattttcggcaaagagcagaaaaagcgcaaaaaaaagaaaaagtacagcggaaacaggatccaggattttgcagagctttccattggtgatcttgttgttcatgaaaagcacggactgggtatttaccgtggaatcgaaaaggtagaggttgaccgtgttgtgaaggattacatcaagatcgaataccggggcggcagtaatctctatatcctggcaacccagctggatgctttgcagaaatattccggatcctccgaaaatgcaaaaacgcccaagctgaacaagcttggcggtcaggagtggaataagaccaagagccgtgttaagggtgcggtaaaaaatatcgcaaaagagctggtagagctttatgcagtacgccaggagaaagaggggtatgtctgcggaccggataccgtatggcagaaggaatttgaggagatgtttccctatgaggagacagaggatcagctggcagccattgaggataccaagagagatatggaaagcaccaggatcatggatcgtcttgtgtgtggtgacgttggttacggaaagacggaggtggctttaagagctgcgtttaaggcagtacaggaaagccggcaggtggtttatctggtccctaccaccattcttgcccagcagcattacaatacctttgtacagcgtatgaaagaatttccggtgaaggtggagcttctctgccgtttccggacatctgcccagcagaaaaagaccatcgaagggatcaaaaaggggcaggtagatattgtgatcggcacccacagagttctttcaaaagatgtggaatttaaaaatcttggacttctgatcattgatgaggagcagcgcttcggtgttactcacaaggagaagatcaagcagatgaaaaaagatgtggatgtactgacgctgacggcaacgccaattccgagaactcttcatatgagtctcatcggtatccgtgatatgagcgttctggaagagccgccgatggatcgtgtgccgatccagacatacgttatggagtacgatgaggagactgttcgggaagccatccgcagggagcttcgccggggtggacaggtgtattacgtatataatcgagtcaatgacattgccgaagtagcccttcggatatccagacttgtgccggaggccagagtggattttgcacatggacagatgagtcagagggaactggagcaggtaatgtatgattttatcaacggagatgtggatgtactggtttccaccactattattgagacaggactggatatttccaacgtaaacactatgatcatccatgattcggacagatatggcctttcccagctttatcagctccgtgggcgtgtaggacgttccaacaggactgcttatgcattcctgatgtataccaaaaacaagatgctccaggagaccgcggagaaacggctcagcgccatgcgggagtattcagaccttggaagcggttttaagatagctatgaaggatctggagcttcgtggagcaggaaatcttctcggtgctcagcagcacgggcatatgaacgcagttggttatgacctttactgcaagatgctcagtgaggctgtcaaggaggcaaagggaatccggactatggatgattttgagacgaccattgatctcaacatcgatgcgtttatcccggattcctatatcagcaacgagttccagaagctggatatttataagcgtattgccggtattgaaagccagcaggaatatgacgatatgctggaggaactgatcgaccgttttggcgagccgacaaaagctgtgctgaatcttcttgccattgcaagactgaaggctcttgcccatcagggatatgtgacggagatcaagcagcttggaaaagatgtccggattacgctctatgaaaaggccaagctggatcccgcaggtatcccggctattatggcgcagtaccggagaggtttgcagtttaaggctgatcatgagccgaaatttatcctgacaccacagggaaggctgatcgaagagctgatgaagtttgcgggggagctggcaaaactggcagagccactggagtaaagggaagaatcagctaagcttagggttatccacggaaaaaaacatccggtttgtggataccggatattttcccggaaagacttgtggataatttgtgaaatgtcgtgtaagttcgtgaaattccttgctcttaaaggtgaaaacgtttataatcaagtattatggaataagagccggaccgtgattcttatggacggatagatggaggatgaaatgagaaattcagtaaagaaagcggcagttactgctcttgtctgcgttacagcggcaggaatgatggcaggctgcggaaataaaaaactcgatggtacaaagatcgcagtgacagtcaataagcaggaaatcccgtttggcgttgtaagtctggctgcacgtatgcagcaggcacaggctgaggcaatgtacaagatgtatcttggcggcggaagcgatatgtctatctggagtaccaaaatggatgatgattccgatgagacttacggtgaaaatgcggtaacaacttctgttgaaactgttgaaaagatgtgtctggagaaagaacacgcttccgagtatgatgttgaaatcacagatgatgagcagaaggctcttgaggaagctgccaagaacttcatggctgccaattctgatgagacaattgcagagcttgcggttgatgaagatatggtaaagactttcctcgagcttgaaacatacgatgtgaagatgaaggatgccattgaagccaaagcggacgtgaaactggatgagaaagaatatcagcagatgtccttcagctatgcaagtgcaaaggtcagcggagatgatctttccgatgatgatatcaagaagaataaagagaatcttcagaagttctatgacaaggttaaagaggatccggctgcagatttcaatactcttggagatgagatctccaaggatatgaccgcaacaaccggaacatgccctacctatgaggaaggtgatgacagtgctgccaacggaactacttatccggatgaggttcgtaccgctttaagaaagctggacgagggtgcactgaacgaggagatcataaagacagattccgtatggtatgttgtgagactggattccaagaatgataaaactgcaacggagagtaagaaagagtctctgacaaacaccaagaaggatgatttctataatgatacaacagatggctggaagaagaaagctgatatcaaagaagagaaaaaattgatcaagaagatcaagatcacagataatcacagctttacgatccagactccaactccgacaccggacccggatgtaactgagacaccgacagcagattctgcagaggctgaggcaaccgagacaccggcagctgaggagcagaccgatgtgaccgagacaccggagacagagggagattctgcaaaggctgatgaggagactgcagatagtacagaatctgaggcagctgctacaccggaagctgagaaataagataccatgtttacaatggaatgataagagaaaagacaacgagccgtgtacggatttatcgtacacggctcgttttttgtaatgctcatgcctgctttacggatcatcagatcagatcgagatgctccagtgcgtgaagaatcccgtccctgtcgactgcgcttgtctggtatgtgcagtgcttttcgatgcctccgtaagcatttcccatagcaacgccgactccggcagctttcagcatgggaaggtcgttgggactgtctccgaatgcgtagcagttttccctggggatggaaaggcggtccaggagaaattccatgcctgtggctttgctggtacccttttgtgtgacttcccagattccgtctccgtgatcaaaataggtgtaatgatcattacagaagctgcggaatttttcgacatcggaatccggcagcatatgtaccaggaatttgtcataagagtaagtgcaggcatcctcccgattgaatttcgtgatgtcgaccattggaatttcttttcgcattttgactccgaattcggactgggccggagatgcgccatcatacaggatctcagtgttggattcaaaaattgcctcgatcttgcatttgcggagaaggtctacggtttccttgcacagaagatttgggactgtgcggaaaaaaagcaatttgttgtccatgtaaatgtgggttccacagccgtatatatagccatcgaaatgaagctctgagagtgcagagggcatcattactttggtgcggccggtgttgatgaaaagaagatgaccgttttcatgggcttttgtgagggcgcggctggtgctctccggaaccttgaaggggtgaggcgtaagcagtgtgccgtctatgtcgaagaacaggatttttttatcgttcataaggtctcctttaaaatgggatttcttcttcggtgttactgttatcaatgtcagtaatatcattaacaggaagcggttctgcggatgtatcttcaacagagttcagtgtgctgacacggatgccgttgagttctatttcactttccatggggatcacaaggcattttcgaccatcgatgatgcgggtttctaccagttctgcccggtccggtgctacatggatcaccacgtcaggggttttgatctcgaatttccgggtgttggtgatgttggatgctaccagagctgatttctctcctgcggcaagctcatactgttcatcgaagttctggagcttttcgtcttctacgccgcattcttcgaagagacgtttgacttcggatttggtgaggacaacaggttccggttcgtccttctgggattcgatgagatcgttgagcttttcgtggatctcaaggactgtgtcgtaggcacagtcatcaccaagggtttcttccaccagagcattgaaggagtcacgctgggttccggcagatagtggtgtggtgcagccgaagacttcttccatcatggtggagcggagattttcggcgtttttggtgtagtagagaagtccgtggatatcggtactgcggtcgttgaactgtgggaaaaggaagccccagtcaggcatttctaccagccagtcccggatacggtcttcaatattgtttgtctctgcattgtaatgcaggcctgctttggagagcttgaccgggcagatactgcagaggatgtgatcgtagatctcatcggaagcgtcgaacatttcggcaccgtcggaggatttgccggggatgtcgtagactgcgtggatgaggatgatgtagtagttttcaccgtagtcgtagttttctatgattctgtcgtagaaggcttcggtgagggtgtcgtcggtgagtttgcttttgcggagtttcatgaggaagttttgggttccgccttcggtttcctgatccaggggaaattccatgttgatgagattttttccgatggtgccggtgagggtttttcggaagatgtcgaagtatttgaaggtttcttcctctgataaggataagaaggcttctttgagttcggtttttttgtttttttcaccgtctacgtagcagccgcagatgcgggtgatggagcagcggtcaggggtgaattgtttttttatttctgcgatttcttttttgttcatgtgtggtttacctcggttttttgattagtttgattatagcacaggtgtttggtgggggcaagatgacgcggacggacgtgtgagatttgcagcagaagtccgggtgccgtcgtttcgcctggtcatactaagcgtctgaggtgtctcacggagcggccggcccataactcgccatgtacgctgatacgtacctggctcagacagatgggccttaccctgcggcttgtggccgccgggtacctctccgtgaaccacctcagacgctaagtatggaccaaggctcactccaaagcacccggacttctgctgcaaacctcacactgtgcggtcatggtgggagggatagagtggtctgacgggagttggatgagccatcagcgctgcgctggatggctgggaggaaaggctgagtttccttgtggtttggaggggaggttgtgagcgtcggcgcgttgctggacgcttgtagtttggacgcttgagattctatgtgtttgttagggaggttgtgagcgtcggcgcgttgctggacgctggaaggtggtgtcgaaatttggagatgggtttttgtggtgttgtggtgggatgtgtggtatgatttgtatatcttataagatctatccatttatttggtttctttttgcttcaatgtctgaagcgttttttcaaaaatatttataaaaactgtatacagggtttctgaagtgtttggttgatggtataattgtatataccagaaggagtattgtttgagagataatacgatttttgatgatgtttttcgcactatgatggagaaaatgacgtttctggtcgtgcctttgatcaatgatgtttttcatacatcatacccggctgatgtggagattgtgcagctgcgtaatgagtatcagcgggtggatggtgagattattacggattcgcggctgttgatcggaaacaggatttatcatatagaatgtcagagtacggatgacacgacaatggctgtacggatgatagagtatgattttgcaactgctgttgagtttgccagaaagcagggacggaggtatcggatggagtttccacgttcttgtgtgttgtatctgagaaatagtaggaatacgccggattttctggaagtggatgtggtttttccggatgggggatgtcatttgtacagagtgcctgccattaaagtagagaattatacaaaagataagatatttgaaaagagtcttcttatgctgcttcctttttatatcatgcggtatgaaaaaagagggcatgagatgagtgaggatccacaactttttcaggaattactgaatgaatatgaagtgatccggagtaaactggaggtagagatcactgaatctggaaggtctgaactgttcagtgatctgattggactgataactcggatatctgatcatattttcagaaatgaggagaaagtccggaaaggaataggtgagattatgggtggacatgttctggaactggaatctgagaaaagggcaagactgatggcggaagctaaagaacaggctgaagcactggggcgagaacagggaatggctcagggaatagctcagggaatggcccagggggaagaacgacttagtgttctgatcaacaggcttatacttgatgatcgtggtaatgagattcagaaggttgttacagataaagaaatgcgtgaagctatgtacagagaatatcaattataataagaaaagataaagagaatcccccactggttttgctatccatgggggattcgttgattgatctgaatcttataatacagaatatccgtaactgctgacaatagcatcgatcttctggcggtttttgcacagtgggcagttgtcagagcggtaggagtgatagtccgggatgtctctggcctggaagatagagtgtacagggagtgtggctacactgtctacactgctgtagatggctgccacgccgcggatcttaccgccatagtacagaacgctttcgatagctcggttcaatgtggatccggtggtgatggaaccatttaggatgaggatgttttttccattgatcattggttcatagttgtcgcggaagatcatctgcccggtgctgttgaactcgggggtgatgacgtagatggtctggtgtgcattcatggaaaggacgccggctttggtcagttcttcggcgagataagcaccgatcacttcaagtccgtccatgcagacgatggtgtctaccggaatggatgcttcgtaatttgctgcgagagcggatgcaatacgctgtgcttcagcgcatctggatttcatagtagtgagatccaggtagtgtgtgatatgggactgggatgttacgaagtgtcccggaatcattttaagctgtatgcggttgtcattgcgtgcataaatttttatgatgttgtcctgatccataataaaaacctcctgtcgtgatcgtgttttacgtggttgttcaggagaattatcctgaaggattacgaaacagatttatttaaccgaatgcggattgcaaatatccgattagctgtgcatattataccattaatttcaaaaaaatgaaataatataatgcaaaatatataaaaaatattcaaaaaatcaagcatatttgttaaaaaatatccaatatcatgaaaactttgacaaaaggatcattactatagagtgaaagtacttgtgagtacgtagtaaattggaaagagagtgtcatatattattgcgtataaaaaagaggaggagaatccctatggatcctccccctgtgagagtgagtcaatgtcagccttcaatagatacatatttatcagcttcaatctcttcagctgcttttttcggaatagaaagtctcagaacaccgttctcaaattttgcatggacatcttcgttttttacaccattaccaacatagaagcttctgcttgtgctaccggcataacgttcacggcggatataattgcctttcttgtcttcctcgtctttgttaagacccttggcagcggagatggtaagataaccatccttcagctgtacctgtacttcatctttcttaaatcctggaagatctacatccagctcatagcctttatctgtttcacgtacatcagttttcatgatattttttgcatgtttgccataaagagggttctttccgctaaagaaattatctctgaatccaaaatcatccatccagtcatcaaataagttttctccaaatacactcgggaacatcataagtcatttctcctttcaaattgaaaagccgttccggtggatcaagaaatccaactgttgtcggtatatagttaccacttcgggttattccgcagtggtgatcgtttggttttattctgaacatcgggaagttcttttttatctccttctttgttctatatgtaatataacacctgttattagcaaagtcaagaggtgagtgctaaaaaattgtgaagaatttgtgttccgtaaaatgaaaaactaatttccacctttagccttttatgttcttatattaaaaagcgaatcggacaaggtctgaaaagcttatgcagattgaacattctgcaatgttataataactttaaagcatagaaaaaacaaaaaaaatcaatataataaggcatatagacaaaatgtattaaaaaaatttttcgtacattcttctgagttgaacagacgatagaaagacagtattcatgagtatgcaggtaaagcaaaatgtaaatgaaaaagtacaggaggagagaataatgcagaaaaaatatgcagattttaagcttggggtaccggattatgtaacagtggaaacagaagaggagagacttgtgtgccagggagggcagacgacagtagctgccggtgcaactactgtggaatttcaggacgcaggtgaacatgaggatatatttgtcacatccgaggatgcagtgagatgtgtgaagctgagatggaactacaagatcccgaaatccgccagattcctgggagatgcctgggaacgtacctatggtgatgcggaatggcatggaatgagcggaaaccgttatctgccatggtattttctggcgaagctttctgagaaggttctctgctttggcgtaaaggtccgtccttctgccatgtgctgctggcaggtggataccaaaggaattactttgtttctggatgttcgctgcggaaatacaggagtacagctgaaaggaagaaagctgtgtgccgcacagatcgtctgcatggaagcaaaaggagcagatacttttgaaactgcacagaaattctgtgaaaaaatgtgtacagatccgatcttcccggagtttccggtatatggaagcaataactggtattatgcttatggtgacagctccgaagaggagatcttaagtgataccgattatatcctgaaactgaccgaaggtgtaaaaaatcctccgttcatggtcattgatgactgttggcaggaacatcaccgcctggatgaatacaacggtggaccatggacaaaaggcaatgacagatttccggatatgaaaggtcttgcagacaagctggagaaaaaaggtgtccgcccgggtatctgggtccgtctgcttcttaatgaagatgagaatatcccggatgagtggagaatttcctataatgactgtctcgatccgtctcacccggatgcactggaatatatccgtaaagatatcgagaggatctgtgattggggatacacgctgatcaagcatgatttttctacctttgatctctttggaaaatggggatttgaggcgaatttaagagacaattccatggagaaatggcatttttatgatcagaccaaaaccagcgcagaaatcgtaaaaatgctttatcaggagatttatgatgcttcccggagcaacaacgcagtgatcatcggctgcaataccatcggacatctcggcgcaggcctgatgcatctgaaccggaccggtgacgataccagcggacgtatctgggagcgtaccagacgaatgggcgtaaatacgctggcattccgtcttccgcagcacaatacgttttaccatattgatgcagactgtgtcggtattttcggaatgatcccatgggagaaaaatcgtcagtgggcagacgttcttgcaaagagcggtacaccactgtttgtatccgcaaaacctggagttttgaatccggaggaatttgaggacctgcatcagatcatgctgcgtgcatcagaacagaaagagcattttgttccgcttgactgggaagaaatcgactgcccggaggtatggggagaaaacggcgaaactatcacttatgactggtttgacaacgaaggtccgaccatggatgctgcggtggaatactataatgccaaggtagttgttccgtaaatcaggaaaagtggttcagcaatccagaagatcctcggcatgatgatatttttcccggtattcccgtggcgtcatgccggtttcttttttgaaggcacgggagaaggcaaatggattttgatatccgcaggagaacgccacgctggagacagggatatccgtgacggtcagaagctcccgggcgttgatgatcttggctgaagtcaggaatgcttggggtgtggttccaagatgttttttaaaaagtccataaaggtggctgcggctgatatggagatagtcagcaacatctgtcacagtgatattctgcagcggactttttttgatgtaatcaacagcctgtgtgatgtaaaaattatcgttggattccatggtggtgtaggaagcatgaaattcttcctccagcagggcaatgatccggtaaagaccactctggatataggcctcaccggaaggcgtcagttgtggatgagccatcatttcaagaatggtttcctgatagggaagaatcgaatttagctgctggaccggagtttcttcagtaagatgacagtgttcacaaagtatgggagcaatttctccattgaaacagatccagatataaatccagggatcagaaggctctgctttgtagagagagctggtcacaggaggaatgaaaaagcactgtccggctttcaaggtatatttccggttgttcatatagaaatatccctgtccgctcagcacaaaatggatggtgtaatatcgccggacaccagggccgtaggactgttccggtgtacatttttcccagccgcaggaaataagatgaagttcttttgatgaagtctggcggttcatgacctgcttgtttttcatgagagttttctgcctttcgatatatggttattataagtaatatcagtttaaaatatttgatctgaggtgtaaagaacaaagatgaactgataggacaaaagacagttgccgtgcgataaacgtgtggcagctgtttttctgttttctgcaaaaattcagacgtaatgcaggcattgtcttgacacttgtaaaagaaaaaggtttaccaccaggaaaaatatcgttataataggagaaacgcagtttctctgcggcaaaaatataacggtccgggagatatctgtgtcagaaatattgcttatccggtgatatatcagatgatatgaggaattttccggtatgtaataagaagggagaaagatatggcatatttaggtgaagagatcaaaaaacttggttttggccttatgagacttccgcagaaatcagaaggtgtgatcgatgtggagcagaccaaagtcatggtggacaaatttatggaagccggatttacatattttgatacagcatgggcttatgcaggaagcgaagatgctatccgcgaagcgctggtagagcgttatccgagagaaaaatatcagttagccaccaagatggcagcctggatcaactgcaagacaagagatgaagctcttgcacagtttaaaacatctctggagagaacaaaggcaggatatttcgacttttatcttctccacaatcttggagagcacagaacaaaatattttgatgagtacggtttatgggactggatccgtgaacagaaggaagccggtctgatcagacatgcaggattttcgttccactccacaccggaggagctggatgcacttctcacttcacatccggaaatggaatttgtacagctgcagatcaattacgcagactgggaaaatccggcgatccagtcaagagcctgctacgaggtagccagaaaacatggaaaacccgtcattatcatggaacctgtaaaaggcggcatgcttgcaactccgccggaagcagtggaaaagcttttgaaggaagcagagccggaagcatccacagcatcctgggcgatccgttttgcggcaaatctggaaggcgtgatcaccgtactttccggaatgagcaatgttgcacagatggaggataacctttcctttatgaaggatttcaatggccttactgacagtgagaaggagactcttgataaggcaagagaggctatgagcaaaattcctctgatcccatgtacaacctgtaactactgtgcaaaagtctgtccgatggaaatcggaatttccggttcttttacagcaatgaattatctgacattgtacggaaataaagccgccgcagcgcatcaggaagactggctggtagtcagtcatggcagaaagcgtgcagatgaatgtgtaaaatgcggacagtgtgaggaagtatgtccgcagcatatttccatccgcgaggaacttgagaaagtaagcgaggctttttgcaaataaaggaactgatccggcaggaagcggatcagggtaaggagagagtttaaaaatggaaaaattcaaagcatttctgaaacggaaggatattgagatctctctgaagagatatggtatcgatgcactgggagctatggcacagggacttttctgttccctgctgatcggtacgatcatcaacaccattggcacacagtttcacattccgtttctgactatggcagttgccacagtcaatgatacccagtacacagtaggttctctggcatctgccatgagcggccctgccatggcagtagccatcggttacgccttgcattgtccgccgctggtattgttttcgctgatcaccgttggatttgcctccaacgcacttggcggagcaggcggtcctctggctgtactgtttgttgccattgttgcagctgagatcggtaaggcagtttccaaggagacgaagatcgatatccttgtaacgcctcttgtaaccatcggtgtgggcgtaggtctttccgcatggtgggcaccggcccttggaaaagctgctatgaaggtaggaagcgtgatcatgtgggcaacagatctgcagccattctttatgggcatcctggtttctgtatttgttggaatcgcactgacgctgccgatctcttctgctgcgatctgcgcggctctgggacttaccggactggcaggcggcgctgcagtagcgggctgctgtgcgcagatggtaggttttgcggttatgtccttcagggaaaacaaatggggtggtcttgtctctcagggaattggaacttccatgctccagatgggtaatattgtcagaaatccaaggatctggatcgctccgattgtaacatctgctatcacaggacctattgcaacctgcttgttcaggcttcagatgaacggaactgctgtatcctcaggaatgggtacctgcggttttgtaggtcagatcggtgtgtatacaggatggatgaatgatattgcagaaggaaccaagacagctgttacagctatggactgggcaggactttttctgatctcttttattctcccggcagttctctgcccgttgatcaatatgtttgtacgtaagctcggatgggtgaaagatggagatatgacgctgtcataagctatatcagatcttactttaaaatcaaaaaagagtatcacaggaactcattgatagtgatgagctttgtgatactcttttattttaacttttatgctacatgtgatccagtggcattactccgttccagtccacaggcctttgcatattcatggagtttctcttttgcggaataattcagattctgaggaacctgaatctgaatggttacatactgatcaccgcggacagaagggttcttcatggaaacaatgccttttcctctcaagcggatcttggaaccggactgcataccttccctgatcttacagataacatttccgtaaagggtgggaacggtggcttcaccgccgaaaacagcggttgtgtaaggaatagaaatggtggtataaacatccgatccctttcgttcatagccaggacgtgttcctacggtaaccttcagaagaaggtcaccaggctcaccgccgccggttccgggcatgccttttcctttcagacggatactcttgccggtatcaatacctgccggaatatgaatctgaagtgtctgcggtgcaccggagcttccgtccggaccggacagagagatccttttatctgcaccaaaagctgcctcatcaaaggtaacgttgatgctggccttcacatcagagcctttttgcggaaaatcctgctgatggaatccgccgaagccgttgccactgtgaaagccacttccgccaaatccactgtgaaagccgccaccgttaccggtgaaatgctcatatgtgccattgctgccgaaaccgcggctttcgccgtgactgccgtggaacatatttccgaagatatcaccaaaaatatcgtccatattttcaccgttaaaatgaaattcctgatagctgccattgccgccaccctggaatccgccgaatccaccggcacctgcgccggctccaggatcagctcctgcttcaaatgcggcatgaccaaactgatcatacatttttttcttctttggatcacttaagacatcgtaggcttcgtttacttctttaaatttatctgcggcatctgcattaccggcgtttgtatccggatgatattttttggccagtttacgataggctttttttattgttttttcatctgcgttccggtcaatgcccagaacatcgtaataatctctttttactgccatggtattcaccttcccttatattatagtctgcagcgtcccggatgatcgatctgtcctctcagaggacagatctcccggactgtcatatattgaacgtatgcgtataaaattccccgggaaaaatcccgggggcattacttttatattgttctatatgtaatataacactactaattaaaagtgtcaatacctgcattgtggaaaagaacattttggactgcaatgagagatatgattcttacagctatcagctgaaaatatgatataatactaccataaattccggtgcggtctgctcagtaaataaaaaacagagagagccgcagatcagagaaagatccaaaaaagaaaaggaggcgtataatatgagaaaaagaactcttctgtctaatataaaggcagtaaaaaggctggtacttctgacacttatactggcagcagcttttccggcgacgatccgggagacaaaggcagcagcaggaaccacttttaaagtcaaagtcacagatggatacctggctctccggagtgagaaggcttttgacaaaggcaatgagatcggacagctgaatacaggagatcttgtggaagttacaaatcggaaggacgctacctactggtatgcatacgtgccaagactggataaatccggatatctggacaaaaactatatccagatagcagagaacgccacagcttccaacgattcctggacagtaaaggtaaaaaaaggctatctggctcttcgaagtaccgcagcttacaatgacagtaacgagatcggacgcctgaataccggagatgtcgttcttgtaaaggacagcagtgattctacttactggtacgtatatgctccgggacttgataaatccggatatgtggataaccgttatatttacaacagtggtctgtggacagttaaagtagaaactggttatcttgcccttcgcaacaaggcagcctataatgagagcaatgagatcggacagctgaataccggtgacacggttcaggtgaaggacaccagcaacgatcagtactggtatgtatatgttccgcagctggataagacaggttatgttgacaggaactatcttaccggaggctcaggtacgacaactccatccatgactgttaaagtggaaagcggatatctggctctgcgcagtgcaaaggcgtatgacaaagacaatgagatcgcccagctgaataacggagatacggtggaagttattgagaagaaagacagtacttactggtatgtatatgttccgaagcttggaaaagaaggatatgtagataagaactaccttaaataaaaaaataaaggatgcttgttgccggatctgtctgaagaggaacagagagccggaacaagaaacggggaggcagaaagatgactctggcacagctcagatataccatagcaattgcaaaagccggatctatgaacgaggcagcaaaaagcctttatatttctcagcccagtctttccacggcaatccgggagctggaagcagaaaccggtgttgagatattccgaagaacgaaccgcggaatcgccgtaacgcctgcaggcgaagaatttctggggtatgcaaggcaggtggtggaacagtacgaactgatggaagccaaatatatttccaaggaacagtcacgcaaaaaattcagtgtttccatgcagcattataccttcgcagtcaatgccttcgtggagctggtaaagcagtttggtatggatgagtacgaatttgcggtccacgagaccaagacgcatcaggtcatcgaagatgtccgtaatttcaagagtgagatcgggatcctctacgtaaatgagtttaaccataatgtacttgcaaaaatgtttcacgagtatggtctggagtttcacgaacttcttaattgtcggatctacgtttacatgtggaaggggcatcctctggcgaagcgtgagaagatcacgctggaagaactgaaggaatatccgtgtctgtcctttgaacagggaggaaataactctttttattttgcggaggaggttttgagcacctatgaatacaaacggctgatcaaagccgatgacagggctactatgctgaacctgatggtaggactgaatggatataccttatgctccggtattatctgtgaggatcttaatggttccgattactgtgctgtgaagctggattccgatgagatcatgacaatcggttatattgccagaaagggtgttaacatcagtgcccttggaaaaaaatatctggaggagatttccagatataaggataaagcactgaaataagagaaaataaaatctgacagatcactgccggagaagaagggaaaagcttctggtatttatgataccggagagctgtttccctgtgtattctcagatacatagcaatgcgtatcatgcaggaatctgtcagatttttatttacattaaaagtttttggcagtggaaattttatttgcaa

SEQ ID NO: 237 - DNA, 991 bp, Unknown
  gut microbiota DNA sequence
agtgctcagtaagctggggagattttttttcgcggagcagcggaaaaaattccttcacaggcatcccggcagactgttccagagcgttggcagagcagtaggtttccagacagccatggtttccgcagtaacataaagggccgtcaggattgacgcacatatgctcaagggttccgctgtgcatggagcttccctgatggatctgatgattggtgataatggcaccgcctagattccggttcagaaggaacacgacagcgctgtcgagctccgggtgattccacagctccagaaaagcggcggatttggaatcgtgttccagatgacaggggtaaggaagatgctgggaaaaatcctccagcttcattccggtattgttcatgatgtttccatagatcacagtggaattatccggagaagtgatcccctgtgtggcaatggaaatacccaggatcttttcttccggatagtgattctctgcgataaattcccgtactttatcggtcaggtgtctgtaatactcttctgtgttggaatagggaagagcaatggtttctgtataaaaagcatttccatataagtcgatggctgtgatatggaacatgtttttcaggatcccgatgccaatggaaatccgaaaatccgaggtgatctggatggcctgggccttccttccgcccgtggaatcaaaatatccgtttctgtcaataagcccttctttttccagcaggttcaggttctggcttactgtggaaagccccatctgaagatcctggacgatctgcattttggaagtctggtgtgtttggtatatatattggtaaaccttggaacggtttattttttttaaattgatggtggttaatcctttttcactcatgagattctcctgataaaagtaattatagatatgtttaagtcttaaatgtattttagtataaatctgcgggaaatgcaatgcaggagcgcccgagtaaaagtaaacaaaaat

SEQ ID NO: 238 - DNA, 9994 bp, Unknown
  gut microbiota DNA sequence
gttgtatgtactgcgttgttgacttttgtctgtatgcttcggtattggatgtggaacgttgtgccgatctggtttctgtattcttcggtacttatggtggtacgctgtgccgatctgcgatctggttctgggattcttcggtacttatagtggtacgctgtgccaatctggtccctgtattcttcgatatttatggtggtacgctgtgccgatctggtccctgtattcttcgatatttatgatggtacgctgtgccgatctggccctgtattcttcgatatttatggtgatacgctgggccgatcccgtttctgtattcttcgatacttataggaatattctgtaccagtctgacatttcaggacaggacgcccagtctacttccatcccccgcatgttttttcctgtcggctggaagcgtcagccagaggaaggtggcatcgggccgggctgctgcgaaggaggggtgattactacttgggctgcgggagacggcgttattgcggcagggtctgctgtctgagccgcaggcgagttctggccctgccgcaatgcttttagccgtctcacggagccctagtagtatcccccgacggagtccctgcccggagcgatgccaccttcctctggcgtccctctccatccaccacacaaaaccgccccccggaccgatgccaactccctctggcgtccctctccatctcaacaaaaaacggcacccggcagttccaacactgccagacaccggaaccaaaacacccgtcaaacagacctatacaatatataatcaacattcgctatccgctcaactcaattaccaccagaaagttctctcagcaactcaagatcgctggcctgcactttaatattcgtagtcagcttctcaccctcagggctaatatacgtcacctcaagaatgctcccctcacgaatcccacgccgggaaaccgcactacaaaatgccggaaacttcggatgattctgtttaaatgtattccatgcattcataaccttcatcatatttccaatatttccaatattaccaatacccataaccaacaccagcctttcccttactatcatctatgtttttttatctattaacccaaacacagccgccgtacaaaccatacagcggctgaccatatgatcctattcaaaataacctgccgaaaactcacaaccctctgataaaagaaatcgcatcccggatcccagccacataaaccaatttaattcctttaatactctctgtagccgtccggttcacctcaggaagtatcaccgtctcaaacccaagctttttcgcttcctgcacacgctgtccggccatactcactgcacgaacctcgccactcagaccaatttcaccaaacgccatcacagaatccgggatcacgatctccttcgcactggaaataatagcaagacaaatacccagatcgatcgccggctctgtcatcttcatgccacccgcaatattcacataagcatccgaagcagcaagatgaactcccgccttcttctccagaaccgccatcaaaagattcacacgattaaaatccgtaccaactgctgttcttctcggaattccaaaattactctgacacaccagagcctggatctccaccaaaatcggtctcgtcccctccatagaacatgcaacaacagaccccgaagcattctccggtcttccattcaaaaggaactcggaaggattcttcacttcttcaagtccggaattctgcatctcaaaaacaccaatttcattggtagaaccaaaacgatttttcaccgcacgcaggatccggtaagaagcatgcctgtctccctcaaagtaaagcacagtatctaccatatgttccagtacacgaggacctgccacatttccctccttggtcacatgacccacgataaaaatggacactcccatacccttagcgatctgcatcagtacattggtagattccctcacctgagaaacacttcccggtgcagacgaaatatcttcatgaaacatcgtctggatagaatccacaacagctacatctggtttcgtccgctcaatgatctcccggatattttcaagattcgtctcacagagcagtttcaatttatcattaaacgttccaagccgatctgcccggagcttgatctgtctaagagactcctcaccagaaatatacaaaacagaaatcccctgtgaagataaatttctgcacacctgcaacaacaatgtagacttgccaataccaggatctccacctaccaaaacaagggagccggggacgattccgcctcccagcaccctgtcaagttcaccgattccgcagctctgacgttcatctgaagaaagactgatatctttcagaactacaggctccgttttcttttgtgtagttttaatactccctgaggaagattttttggaagaaaccgtttcctccacaaaagtattccatgccttgcatgccgggcactgccccatccacttggctgattcatacccgcattcctgacagaaataaaccgtttttttattttttagcattttacaattttaacttctgctttggtgttcgcatccagttcaacactgaaagaaagcttgccgcccaggtttgtggtcattgtacctgtacttacatcatcaataaatacctgatactctgtctcagcttccagttcaacagtaatctgagaatcctcaaagccctgaacctcaaaactcattgctgttccatcctgctgaagatggaacacactggttcccggaacagactcatatacgaacattccattacgctcaagtttggtgatctccttatatgtttttactttatacatatctccctgatactgataatccgacaatttggatttctgatttaattcataatctccaaaactgatagtcccattatcttctgtgcggatcaattcctgtaccactgccatgatcttatgtcctcctgaaatctttcgttgtatagttttaattttgttaattataacttatttctgtttttttggctatagaaagtaataaaattcttacgctttctccgcatcttttacttcaaagtagattttcttgtctttgaccttcacctgtacggtatcaccggctttgatccgaccttcaaggatttctgttgccatctcatcctcaatctttgtctggatcgcacgacgcagcggtcttgcaccgtatttactgtcaaagcccgcatctgcgataagatctttagctgctccggtaactttcagtatgatatccagctgttcctgacagcgtttttccaggtttttcaaaagaatagtaacgatcttcctgatattttctttattcagagaatggaataccatgatctcatcgatccggttcagaaattccggtttaaacatccgccgcacttcttccatcactccggacttcatacgttcataatcacgcttttccgtatctccggacataaatccaagatgtttcggttccatgatcatctgcgcacctgcgttggaagtcatgataatgatcgtctgcttaaaatccacttttctgccttgagcatctgtaatatgaccatcatcaagtacctgcagaagaatattaaacacatccggatgagccttttcaatctcgtcaaaaagaatgacactgtatggatttctgcgcactttttcgctgagctgtccaccttcttcatagcctacatatccgggcggcgatccgatcattttagaaacactatgtttttccatatattcggacatatctacacggatcattgcctgctcacttccaaatacagcttccgccagcgctttggaaagctccgtttttcccactccggtaggtcccaggaataagaaagaacctataggccttgcgggatcctttaatcctactcttcccctttttaccgcccgggcaactgcagaaactgcctcatcctgtccgatcacacgttttttcagaaccttttccaaatttgcaagcctacgggattccccctctgtcagacgctgtacaggtatttttgtccagtcagacacaataccggcaactgcctcttcatcaactgtaaatggatttttccgatttttccgctccgcctttcttcggatcttttccaattctgcttccgcctcattttgctttgcctgtgctgcttttgcaccttcaagatctgcatttatgactgcctgttctttttgtttcagaatatcgtggatctctctttccagtgcttctgctttcggagacggacgatatcccgccagctgtactttcgacgctgcttcatcaataatgtcaatggctttatccggaagaaaccggtcattgatataacgaacggacatttttacagccgcctcaagggcctcatccagaatctctacaccatgatgtttttcataatatgggcgcagccccttcaggatttcaacagcctcctcttctgtaggctcttccacaataataggctgaaaacgccgttcaagcgctgcatccttttcaatgtatttccgatattcttccagtgtcgttgctccgatcagctggatctctccacgggaaagagacggtttcaggatattggaagcatccagtgcaccttccgctccacctgctccgatgatcgtatggatctcatcaataaagagcaatattccctgctgttcgcttacctcatcgatcacatttcggatacgttcttcaaactcaccgcgatatttacttcctgcgaccattccggaaagatccagaactacaaccctcttatccttcacagtatccggtaccattcctgtgacgatccgctgtgcaagtccctctacaatagccgtttttcctactcccggctctccagtcaggcagggattgttctttgttcttctgctcaggatctggatcagtctggcaatctctttatcccttcccactacaggatccagcttaccttcttctgccatggccgtcagatctcggctatactgatccagagttggtgttacactgctgtttcttccctttgaagcttttacagcctggaattcttccgcaatggcatcgctgtccattcccatagctgtcagcactgccgcataaagtttctggatattggcacccattgtgtacagcagtctggtacccacacagtctgtttctttcaacattgccagcagaatatgttctgtcccgacttcctcaaaacgcatggatcctgcttctgcatatgcaccctccagaactcttctggttctcggactgaatcccggtctctgtgaaacagccgtatttcccggcggtgcgatcagtttatcgatcagagccatcgctttatcagcctggatcccaaactcctccagaactcttcctgctgtgccctccttttcttctacaagcccgaccagcagatgctccgtgccgatataactatgtccgcaggagctggctgcctcttttgccagagcaagaacattctctgcctgttttgtatatcgttcctgcatgatgtctcctcctatctgtctgtgtcatactcgtcaaaaatctcgtccaccagctgatggacttcttctcttgttacatttttacagcatccccatgccattgctactgtcagattctgtttcatttcttccagtgctctgaccttatctgcatctatggagatcaccgctccctttcgcctgtcaatagtcacaaagccttcctgacgaagcagcgcatatgccttattcacagtatgcatattgattcctgcaatgcttgcaagctgccgtacagaaggcagagtatccccttcatgaagccttgatgtagcgatccccattatgatctgattggtgatctgcatatagattgcctcatcactgttaaaatcgatttctatcaccatagggtaatctctcctctacaacagcaaaaggctgcacagtttcatcctggcagcctgctgtgatttttgtttttatttactgatccctgcaatcttctctatctgttctttgttaagaaccagattaaatcccattggatttaccacataagcgtttgcctgcggaatcatcaggctcggaagtttgtctatagtcactttcgcaacacggagattcttgcctcttccaaatttctcaaattccataacatctgtaaacacaggctgcatgatcttatcctctttatttttcagatacggaatatggagctttccatcttcttcctgctctgcattgatcgcgatcagaaattctgccttacgcaggtttgctatcagctcttcttccaactcacggatattcttgtgctcttcctgttttaccgggcgacgcaattcctgcataaaatagattccggaaagttcaagagacgggttcagaagcggtctctttgacggctcgatcttactcatatctctctggtttgcgatctttccgatctcaatctcgatcttctcttctccgtcgatccagatcacactgttcactccgatcgcgtacagcgtaccatacagtcttggatagtcttttttctcatatttcatgcccataagaaggatcttatcctcaaggagctgtttaccatattctttgatctcttcttctgtggcaaaaatccttgcctggtcattaaatgtttcttcatcacaggtcacatatggaagtctggtcgcctgtgaatatgcaacaaatacttcctccctgtttctgagctcatggattgcttcttctacactgattcccatttttctgtcctctctgcctcatcacttggatgcgacacctcatcaaggaaaatggttggttcctgttgtgccctgtcagcatccagcttttcatgttcgtaactactcactgtgtttcatagttgttactattgtacaatgaaatccctgttttcgtcaagctgtgcctgtgaaaaatgaccaacttaagcctcgtcgatagcttttccgatatcgtgacgcatatacttgtttgcaaaactgatccactctgtagcagcatatgcattctttctggcttcttttaatgtctctcctttggcagtgatgccaagaacacgtccaccgtttgtaacgatctctccatctttaaatttagttcccgcatggaaacagtaatatccgtctttgtccttaaaattctcaaatccatggattggaatacctttttcgtattttaccggatatccatcacttgcaagaacaacacaaactgctgcattgtcctcaaatttcagatcgatctgatcaagtttgccatctacacaggcttccattacttcaatgatatcattctccatacgcggaagaacaacctgtgcttccggatcgccaaatcttgcattgtattccagaaccttcgggccatctgcagtaagcatcagtccgaagaaaatgattcccttaaacggacgtccctctgctgccatggcatctactgtcttctgataaacatatttcttacaaaattcatctacttccggagtatagaacggacttggagaaaatgttcccattccgcctgtattcagtccctgatctccatcttttgcacgcttatgatcctgtgcagatgtcatggtacggatcgtctttccatcaacaaaagaaagtacggaaacctcacggcctgtcataaattcttcaatcaccatggtatttccggcatttccgaattttttgtcttccatgatctcttttacgccagcttctgcctctgcaagatcctgacagatcagaacaccttttccaagagcaaggccatctgccttcaaaacgatcgggaattttgcctcggtccttaaatattccagagctttttccggatcatcaaaattctcataagcagctgtaggaatgtcgtattttttcataagatccttggaaaaagccttggagccttccagaatagcagcatttttgcgcggtccgaacacacgcagtccctctgcctcaaatacatctacgattccgcccacaagaggatcatccattcccacgatagtaagatcgatctctttttctttggcaaaggctgccagtttttcaaactccattgctccgatatctgcacattccgcatactctgcgattcctgcatttccaggtgcacagtagattttgtcaactttcgggctttttgcaacactccatgcaattgcatgttctcttccgccgcttcctacgattaatactttcatctgtttactcctttgtttcatctgtctgctgattactttaaagaaacaattccatctgtcactgtgatcttgtcattggcgataagattgattgcttccggaaggatcttccactctgctttttccattacacgtctctgaagctccttggatgtatctccgtcttttacctttactgccttctgaaggatgatcggacctgtatccgttccggcatctacgaaatgaaccgtagcgcctgttactttcactcctcttgcaagaactgcatcatggaccttaagtccataaaaaccttttccgcagaaagacgggatcagagatggatggatattgatgatcttgttgggatacgcttccaccatcatcggagggatcgcaaccagatatcctgcaagaacgatcaggtctacctctttttcctgaagcttcgccagtaatgctttatggaaagcttctcggtccggatagtctttcggtgcgatgcataccgcctctatatcgtgctttctggctctttccagagcataagcggaggcattattgctgatcacgatatccacctttgcatttgtgatccctcctgcatcaatggcatccaggattgcctgaagatttgttcctccaccagaaacaagaactccgatctttaacataaggtcactcccttttctccctcttcaatggttcctaccacatatggcttatcaccggttttgcggatagcttccattgttttgtcaacatctgcaggatctactgccaggatcattccaagacccatattatatgtattatacatcatatgctcatcaatatttcctttttcagcaaggagcttgaagatcggaagtaccggatagctgtcttttttgacaacagctctggttccctctttcagcatacgcgggatattctcatagaatccaccacctgtgatatggctgcatgcatggatcttcacgccagactctcggatgctcttcagcgcttttacatagattctggtcggtgcgatcagtgcctctcccagagttgttccaagctcttcataataagtatccagagactcttttgtcatgtcaaatactttacgtacaagagaaaatccattgctgtgaactcctgtagaagccataccgatcaggacatctcctggtttcagggcctctcctgtaagaagatcttttttgtcaacgactcctactgcaaatccggcaaggtcgtactcatcttccggcataagtccaggatgctctgctgtctcaccaccgatcagagctgcctcagactgtacacagccctctgcaacaccttttacgatctctgcgatcttttccggataatttttgccgcaggcaatgtagtccaggaaaaacaatggctcgccgcctgcacatgcaatatcatttacacacatggctacagcatcgattccgatggtatcatgcttgtccataaccatggctaccttaaccttggttccacatccgtctgttccggaaaccagagtaggctcttccatatctttgaatttctccatggaaaatgcacctgagaatccaccgattcctccaagtacctccggtctcattgtcttggcaatgtgctttttcatcagctctactgatttgtatcctgcctcaatatctacgcctgaagtcttgtaatccataatgtcctccttatgacaacacctttttatttttatggtaaaagatttatttagtaatttttgtatccaacttcctgaagccttgcgtctttcttctcaacctg

SEQ ID NO: 239 - DNA, 23923 bp, Unknown
  gut microbiota DNA sequence
aaaggccatcctgtatttctggcccagcatgcctgtgcctgttgctgccgtggctgcctggagaagtggcacgggataccaaaagggcgtgaactgaccggcgaagaacaggaatacgttgtggatgtgctgatgacctggatcgaccggcagatggaaggataccggccgtcgaaaagtttggcttcagcttccgggaagaaagcgaaggaaccggagtatgagcagctgacgctgccgtttgtatagttgatcagaagcgcagcgacaggttcaattgtgcttgtttgtacgaaaaaaagaaataacgataagaacaggaaaaagtttctgattatgttgtgcccggtatttttatatcgggcatttcgtttgtaatggaagaaagagctggaaatccgggtaaaatttttccgggattttctgtaacgtttttgaaacgggttcgtcttataagtgagaagggaggaaagagaaaaaccgatgaacatagaggaactttaccggacatattttgacattgtatatcggtatatccgttctatctcacaggatggagcgctggttgaggaagtgacacaggaaacgttttttaaagctctggaaaagatagaccagttccggggtgactgtgatgtgcgtgtgtggctctgccagatcgcaaaaaatacgttgtacgatcatctgaaaaaacagaagaagcaacttctcggggatgagaagctggaagaagcagaaagtgatggcggagagcttctggaggaaaagctggcgcagcggagccaggctatggagatccacaaagttctgcatagactttcggaaccgtataaagaagttttttccctgcggaccttcggagagcttaagtttagtgagatcggaatgcttttcggaaaaagtgaaaactgggcgagggtgacttattaccgtgcaagagtaaagatcagagaggagttggagcaatgaggatcacatgtgatgtaatacaggatctgatgccatcttatgtggacggcattttaagtgaagacagtcaggcgttggtaaaagagcatatggaagcttgtgaggaatgcagaaaaatgttggagattatgaaagaggagcagggaaaagagcaggctcaaatgatatcatctgcagcctccggagcacgacgcagagctgatgaaacggaaaatatcggaagtgcagccgcactgaaaaaaatccggaaaaaattaatgatacgcagagtgctgacagcagcagtggcagttatcctgacactcatcgttgcggcagcaagctacaaccactggtatttcaacgaaaaatacatgaccctggaaaatagcggaatgtacgtaaaaaataataatttgtattcttctaataatctcatcaatcgaatgaaagtacagtacacagaagatggaaaaacagagttcgtctacgccattgacgcgccatatgcaggaactctggaactgaaaggcgatgacatgctgcttcaggatttttccaaaaagacagaggaagtatcaccggaagatgacagcaccccggaaacggtaacagaggtttattatatgagtgcggaagccggaaagaagagcctggaattaacagagctggaagtaaagggagatctggatgcagcggagaaaattgtggatgagatgaaacaggaatcaaagctgatatggtcggaacaatagaataaaactctgtttatgaatcaggtagagatttgtaattcacaaaggatttattcactctggttaaatggaaacaggcaaaggtactgttcactggcaaaatcaggcaaatgcaggaagatgagcagatacaggatagaaataccgcatcgtctatgttaaaataaaacctggacagtacagtaaaaaaagttctataaaaattctgtgctgcaggcgacaaaaacagacagcagtgaatttatttactgctgaagaacaggagggacacaacatgttatttgtatgctatccaaaatgcagtacctgcaaaaaggctcagaaatggctggatgagagtggcgcagaatatacgttgcgtgatattaagacggacaatccaactgcagaggaactgaaagcctggtgggaaaaaagcggtcttccgctgaagcgtttcttcaataccagtggaaatatttataaagagatgaaactgaaagataaacttccggagatgagtgaggaagagcagcttgcgcttcttgcaacagacgggatgcttgtgaaacgaccaatccttgttgggaaagacaaggtgctggtgggcgctaaagaaaaagaatgggaagagtatctgaaatcatgaaaaagaaactgaattatgctgatatcgttaaggaaaccgtgatcctcaccgtggcagtggcgatcattgcagcagcggtatattttttcctggtgccaagccatacgtcggtcagcagtatttccggtcttggaatcgtgctttccaactttgtgccgctgcagctgtcggcgattaccatgatcctgaatgtggtattgctgatcattggattttttacctgtggaagagagtttggagttaagacggtttataccagtgtgatgctgccgttgtttctgggactttttgagattatttttccgaatttcggttccatgacagacagccaggaactggatgttctgtgttatattctggtagtgagtgtgggacttagcattctttttaacaggaatgcatcctcaggcggactggatatcgtggcgaagatcatgaataagtatctccacatggaacttggaaaagccatgtctctttccggtatgtgcgtggcactttccgcggcgcttgtgtatgataaaaagacggtggtcttaagtattctgggaacgtattttaacggaatcgttctggatcattttatttttgacaataatatcaagcggcgtgtctgcatcatcacgaaaaaggaagaggagctgaggcagtttatcattcacgacctgcacagcggagccacgatctatgaagccatcggagcctataaaatggaaaaacgccatgagatcataaccattgtagataaaggtgaatatcagaagctgatgaagtttataaaccaggaggacccgaaagcatttatcacggtttataatgtgtcgaatatgcggtatcagccgaagaaataaaaaaaattcccggaccatatcatatggcaccgggaatttttatgccctttttacaggaaaatatatttcaggataaacagcactgccagtacatacatcagagcgctgatcttcttttcttttgccttacctgtgatcaggttgatggctacgtatgtgataattcccatggagataccttcggaaatgctgtagaagaacggcattgcgatgatacatacataacatgggatcgcctcggacatatcgctgaaatcaatgctgataacattgctgagcatgtacagaccaacgatcaccagagccggagctgtggcaaaggacggaattgccaggaagatcggtgacaggaacagggacaggccaaataagatggcagttgtcactgcagtaagtccggttcttccgccttcagatacaccggaagcactttctacgaaagttgtagttgtggatgtaccaagaacagcaccggcagttgtggcaactgcatctgcaagaagagcgcccttgatatttgggagcttgccttcttcgtccagcatgccggctttggaagatacaccaacaagagttccaagagtatcaaaaagatctacaaataaaaacgcaaacaggataacaaggaaatccagtgagaaaactccgtcaaactgcagttttgcaaagatcggagaaagactcgggatggaaagtccgttgctgaaatccggaagcaggctgtagaagccgatctccgggttcggaacataaagtccggcgaactgacagatgattccaagtccccatgtgatcaggataccccagaggatgtttccctttacattcttaacaaccaggataccggttacgatgataccgatcagagccaggataacggtgatccccacattgttgaaggaagcctccacgcccttagctgcattatatccgtctacagagaaaagctgcagcagtgtggagccgccgatcacgatattggaattctgtaaacctacaaatgcgatgaaaagaccgataccaacgctgactgcggatttcaggttcagagggatcgcattgaagatcgcttcacgtacattggtaagtgaaagaacgataaatacgataccttctgcaaaaactgcggtcagtgcatactgccagctgtatcccataccgataacgactgtataggcaaagtatgcgttcagacccattccgggtgccagtgcgaacgggtagttggcgaagatcgccatcagcagtgttccaaggaaggctgccagtgcggtagctgtgaatacagctccggaatccatgccggtcgcggacaggatgttcgggttaactgccaggatatacgccattgtcatgaaggtggtgatacctgccagaacctctgttttagcgtccgttttatttgcggacagcttgaagattttttctaacatatttctttccctttcttaaatatgtttttggacaacatgtctagtttatcatataaaaatttcatatgcaattgttagtgtgcacagatatgattataataggtgtttttttgtaaaatacttttacaggaaggcaatttgtgtgtaaaatataggaaagagagtatttaatttacagacgagtttattttgcaatgaaagggggatggataatgtctgagaaaaaactgcggaatattacagatgtgctctgctttctgatgatccttgggtacgtgatgtatcttgtggccacctggggaaatctgccggagagggtgccgatacattttaatgttcatgggatcccggaccggtatgggaagaagggcagccttcttctggagccgattttggggctgctgatcctggcacttctgatgttctgtcagagatttccacagtggtggaattatccggttgaggtgacagaggaaaacagagagcatatctttgagatcgcgtcaaaaatgatgtctgtgatcaagctgttatccattggagtatgtcttgatgccgggatcagcgggaatctgggaacggcacctatgtggccggtgtggatactgatcacagggattttcgtgacattgatcctggggatccgggggatatataaggctggtaaagaaaatggcatggatgaggaggataaatcgtgaagcggtcgcgtttgtgattatgcagaagagtggaagggaaatgttcgatttattgtactgaatatggatggaaccagcgaaagcggatcgcgaatatccgcttggtgaaattataataaaaacaggaaaggaatctcaggaacatatggcagatacaagaacagatgagctttacagagcgcttcaggataagggatatcccgatgagctgtgccgggaaattgcctataaacatatgaataccgattacacagctacacggatgctggggtatttatacagggtgacaagtcccagagtggaggatgtgatcgatgagatgctggcgatcttaagtgacagggaagccatcatccggaaaaaagagctggagcacgcccaggctacgatcaacagcgtgtatcgggagggtttgtaacggaaatcccggagctgtgccagtgctggcaatcagaagcactgcagcagttccgggattttttgatttgatactggttcatgaacagatacctttgggggttcagatgctgagttcacaaaaacacttcgcagaacattatcggtgaacagtaacagggatccaacatcaaaaataagaggtagaatccctgtacttaatacaaagagatcaccgactgcctgtccacgatctcaacatccaaggcggcctggcaggaggagctgacagaaccggtgcggatcttttccagaagaaggctggtggccagctttgccttctgggggatgttctgggaaaccgaagtcagttttggcagggtgtactggcagagagtcaggttatcatatccgatcacagaaagatccacaggaatgcggtagccgcccaggcgggcaccctccataattccgatagcacagatatccgccgtagttaccgcagcggtaactggagagctgttggatgcgatctcacggccggcctggataccgccctcataggaaggagagtactcataaacataatccgggttaaaagtaatatgattctcctccagcgcccgtttatagccattgaaacggctggtaagaacgtggttgtttttgtaatcggccacaaaggcaatggcggaatgaccgtgattgatcatatattttgtggaaaggtaaagacccttctcatcattggaagtgatattgataagattggggtgttccagttcacagtcaaaggtggcgatggggcaggtggcagaatccatcagccttgccatgtattcgccggcggcaggataaagaatgatgattccgtctacattccaattcttcagaagagaaatgatgtccgcattttttgatacagagcggatcatggtgaaatattcattcttctgcagctctctttcgatagcaccgaccatggtgctgacataagggttctcaaaatagttggttcccaggagcacatctttttcatcgagggaaatgatgatgccgatgatatgggattttttattggataagctccgggcattcaggttgggaacatatccgtattcttctatgatcgcattgaccttgtctctggttttctgggaaacgcggctggttttgccgttgatcacattggagacggtcatcatactgacaccggccaggtctgcgatatcttttaatgtcatactacacacctctgttcttccatagcagtttccgggaaggaaactgctgtcatacatatatatataaaattctgacacatttctcaggtaaaaataaaaatacaatgaaaaatccagaattcatgtatcctcttattacattattacaggtttacaaggtttaaacacgaaatataaatgttcgaaaaaaacggtttataaactatatatattatagtccaacatagtgaaaaaatcaatgtatgattgcgggaaaataaaaaaatgcagccttggaatatgaaaaatgcacaaaaaactcatataaatactagaaaaatcgacgaaataataaaattatattgacgaatctatatgcgcgtgatagattaacaatagatttagcgctaaactaaaaggaacggaaaacgtagtcagaaaacaggaaaataccggaaagaaagaggtaatgcatgaaaaagagagtttttgcagcggtagttgctgcagcaatggttgtaactgcatttacaggatgtggcagtacaggaagttctgccggaagtgacagcaaatccgaagccaaggcagaggtacctacagagcctttcggagatacggtcaaatatgaccccagcgtggagctcaatgacggaaaagacatcaccgtagagctttgggagtggggcagtgacgagttgttccagcagatcatcgatggatacacagcgatccatccaaatgtaactatcaatcttgttgataatccatgggaggattactggacaaagcttcctcttgcactggatggaaacaacggaccggctattttcaatgtacataacagctaccatgagaacctgatcaattacatggctcctcttgatatccccacagaggatctggaggcagatttcaacggtgtaagcgcccatgtgctcgatggaaaggtttactatattgattacggtatgatgaccggatctgtatactacaacaaagatatgtgggagaaagcaggtctgacagatgctgatatcccgaagacctgggacgagatgatcgaggttgccaagaagcttactattaaagacggcgacaagatcgttcaggcaggtctgaacttcaacgatgatttccatcagaattacctccttggcctgaattatcagctgggagaaaacctcttcaaggaagacggagttactccgaatgtaaactctgattcaatgaagaaggtaatgcagatgctggtagatatgtatgacgtagatggcatcggttccaaggacttcggtgagaaagcagcagacagcttcggacagggacagtcagccatggtcatccagtggggacactactacaacactctgaaaacaacatggagcaacatcgactttggcgtatttgagatcccgacctttgacggcgagccatatgcttacaaccgttacaacggtgagtctacctttggcgtaaacaaaaacgctccggctgaccagcaggcagttgcacaggacttcgtaaaatatttcctggcaaacgatgacgcacagatcgcatttaacctggcaatgagtaccttcccggctaagaaatctctggcagataatgagaagatccttgagaatccttctctgaaggttctttccgagcacattgaccactatatctggccgggcccgatgcctgcaactatggagacttctctgaaaaaagcaggagaggatgtattcttcaacggtgttgacattgatactgccctggacgaggcagaagccaacatcacaaaggatatgaagaacagtacattcaaatctgtagaaaacctttatgagtatgcaaaataaaaagatgccgtgagcaatccgcaggtatcagagcagaaaggcgcacttggaaaagggtgcgcctttctcagcaaaaagatgtgtatcgaaaagataaggaggatgcatcgatgtttaaaaaaacaaatccgctgcagagcaaaagcgagatcattttgagaaatatcgttgttctggcaatggtgatcttcttcacggtatttctgatcgtacctattggaatcgcttttgcaggaagctttcatgagtggaacccgttaagcggtacttaccggttcctgggacttgagaattataaggaagtatttaccagtgctctgtttggaaaatccatgctgaacacagtgatcttctctgcagtagttattttctttcgtgtaggtcttggacttggaatcgcctatgcgatctattccacactgataaaatataaaagctttttcagagctgtatattatatgccggttgtaacgcctatggtagccgtagcctttgtatggaaatttatgtacaatcctcagatcggtactatcaatcagatcttcggactggatgtaaactggctgatgaatccgaaaactgcccttcttgcaattatgatcatgaccatctggaaggatttcggatacgcagttgttatgtacatggcaggtctctattctcttccgacagatgctcttgaggccgcaaaagtagatggcgccaacgcatggcagacgttccgttacatcacacttccgctgctgaagcctatgacactgttcgttatcatcacttctattatttcctaccttcaggcatatgttcagatcctgatcatgacggaaggtggccccggaacagcaacttaccttgcgtcctacatcatctatgatgaagcgtttgtaaaatacaacttcggatatgcatctgcactgtcctttgtattgttcgttatcacagcagtatttacctggttatcattccgtgtttccggaacagaagattaaaggaggaaaacattcatgaaaagaaaagtcagtagtattgctttaaatgcactccttctgatccttggagtggttaccgtatatccttttgtatggatgattttttcatccttcaaggaaaatcaggagatcatggctctggagcagcatctccttccgcagaaattcatcattgataactacatcaatatgaacgcacattttaattttgtccgtttctttttaaacagtattgttattacggtagtgatcactctgatcgtaatttatacaagtactatctgtggttttgtactgagtaaatacaaatttaaaggaagaaatattcttttcggattcgtactttctactatgatgatcccgtggtgtgttaccattatcccgaagtattccatgatccaggcatttggctggatggacagctacaaagcactgatcatcccggctatgttcagcggcttcggaatcttcatgatgaagcagcatatctccgcacttccggatgagatcctggaggcggcaagaattgacggagccaatgagttttatattttccacaaaatcgtattaccgatgtcaaaaaacggaatcttcagtattgcgatcttccagttcctttgggcatgggaggatttcctgtggccatacctggtaattacaaacaaagacaaacagcttcttgccgttggtcttaagatgtttaacggacagtattccacagattatggtgcactgtttgcagcaactgccatttctatcatcccggtacttctgatctatctgttcttccagaaacagtttatcgccggaattgcagcttctgctgtaaagggatgatgacatacagataataaacggaggaacataaatgcaggacatatataaagtagaaacacatcctctggcgttaagtgaaaatatgatcacaggggataaatacaggattacgtttctcacagagggactgatccgtctggagtatgatgaggagggcgtatttgaggatcgccccacgcagatggtgtttttcagggattttccgaaaacggactatcgtgtagtgcgtacagaggatgggatcgaggtccatacgaaaagaatccatcttatttacaatgagaaggaatttaccagctggggattaagcattcaggtaaaaggaaacctaagtgcctatcacagcatctggcactacggagaagaaatccatgatctgaagggaactgccagaacactggatatggtgaacggagctacagagctggagcatggtattctttccaggttcggatattctctggtggacgacagcaggtcgcaggtgcttttgccggacggctggatcgagccaagaagaaagggcatcaaggatctgtacttcttcggatacggacatgactacaaagaagcacttcatgatttttacagactctgcggaaaaacaccgatgcttccaaggtttgctctcggaaactggtggagcagatattataaatattctgaagaaagctacaatgagctgatggataaattccaggaaaaaaatatcccatttacggttgcagtcattgatatggactggcatgtgaccgatgttgatccgaaatacggaagtggctggactggatatacctggaataaagagctcttcccggacccgaagcgttttctggatggtttacataaaagaggaatgcgtaccacattaaatgtacatcctgcagacggcgtacagggctgtgaagaaatgtatgaggacatggcaaaggccatgggtgtggattatgaaaatgaagatccggtagtatgcgatccggcaagtccgaaatttatagaagcctatttcaaatatcttcatcatccgagagaggaagaaggtgtggatttctggtggatcgactggcagcagggaagcaattgtaagatcgagggccttgatcctctttggatctttaatcacttccatttcctggacagtgccagaaacggaaaacgtcccatgaccttttccagatatgcaggtcccggaagccacagatatccgataggcttttccggagatactcatattacctgggattcccttgattttcagccatactttacatccacagcctccaacatcggttatggatggtggagtcatgatatcggtggacatatgcttggatataaggatgacgagatgaccgcccgctggacacagtacgggatcttttctccgatcatgcgtctccacagctcatgcagtgacttcaacggaaaagagccgtggcgtttcaaaaaggagacagaggttgtcatggaagaagctctccgtgagcgccacagaatgatgccgtatctttatacaatgaactacagaagctatcaggaagatcttcctctggtggagccgatgtattacgaatatccggaggcaccggaggcatatacggtaaaaaatcagtactttttcggagaccagctgatggtagcggctgtgacaacaccgagagtaaaaggccttaatgtagcaaagacggcagtatggctgccggacggggtatggtatgatatttatacaggcctgcgctatgagggtggacgaatggtggatatgtaccgtactctggacagtatcccggttcttgcaaaagcaggcggcattctggtgatgaccgatgagatccgtggaacagaggcggaaaagaatccggaaagcctgaatatccgggtattcccgggtgctgacggaagcttcagattgtatgaggatgacaacgaaacctgtgcttacgaaaatggtgcctgtgtatttacggaaatggattataaggaaaaggatcagggagtgtttaccattcatcccgcacagggaaaaacagagctgatcccggcaaagagagcttataccgtggagttctgtaattttgcgaaaacaggaacagatactgtgaaggttctggttaacggagcagagactgaggctgctgtaaaatatgaggagaagcttcagaagatctgtgtggaagtggcagcagatacagcggcagaggtgcagatcattctcgcaggagatgtagcggataatcgtatagagaaacgtatctttgatttcctgaaccaggcagagattggttttgtgctgaaagacagattatatcagctgatcacagccggaaagaagctgcaggttcttctgtcggagcttcagtctatggaactggaaaaggatctttacggagcactgatggagatcctgactgcgtaaaatatgaataaaatcgcgtttccaaaccatactatcattattatcaaaagaaaggatgatcataatgatattaaaggaaaaagaacgcacggtgatccaggatcttcagacacaggaaaaaagctgcattgaaaaatacggaaaatacgcacagcaggccagggatccggagcttaaaagcttatttcagactcttcagaaaaaagagcaggagcattacgattccctgagccaggtgctttccggcacagttccacaggtaaactgtaatgacagtgacggccgtgattaccagccaaagactacttacacatctgtgatgtcctcagaggataaggaacacgatgcttttcttgcaacagactgtatcggaacagaaaagctgatttccggagaatacaactcggaggtttttgcttttgaagacagtggtgtgaggaagcttctggcagatatccaggtggaagagcagaatcatgcggagatgctttacaaatataagactgcgaacggaatgttctgatatataaaaaaagggaggatttcagtaatggaattcttcctttttttattatataatcaggagaacagcagggagaaatacttttctgcaaagagaggagaaacaaacatgaagggaaccagctgcgaatactgtgcaaactatacatatgatgaagagtgtgacgaatattactgtgatgtcaatctggatgaggatgaatattatcgttttgtgagcagtgattacaaggaatgtccgtattatcgttccggagatgaatataaggtggtacgtcatcagatgtgacatagagtaacggaaaaaacagagcagaaaataaggtgataagacaaatgcagattttccacgaaaaggaatgagagttttggggaaaatctgcattttgatgttttgatatgtgcaaaaggcttcaaatttgtaaaaattggcgtgtttacatttgaaaaaaatatctttataataaaaacattggtctgacaggtagaacctttataccatccagacgatgataatgctacaggattttgtctgagacaaaatttcgggtaagcgtctgacagacttataatagattttttgacttgatggagggtgtgacagattggatattataaagaaatttggggatatggtgggagaggaatccatcagggacccggaaaaagcacgaaaacttcttcttactggctaccggcttcaggaaaaacgtctgcagctttttcctgacaggaagcttccggcttcgggacagtatgtagcccgtgtagttatgcagaatattatcaaagcccttgcaaaaccggacgatactgctcttgtgagtatttttgtaccgggagaacttctgacagcagcagggatcactccgtattccgtggaggcaatgtcctgcttcatcgccggaaccagatgcgagcaggcatttctggcacagacggaatcagagggctttccggaaaccatgtgctcctatcacagagtttttctgggagcgtccatgacaggactggtaccgaagcccaaatgtaccatctacacaaaccttgcctgcgatggaaacatgatgacgtttccttatctgaaacagaaatatcagatcccgggcttttatattgacgtaccctatgaaaaaaatcaggattccatcagctatgttgcagatcagctccgcgagatgaagaaatttctggaggatgtcacagggaaaaaaatctccgagcagtcggtacagcgtgcagttgccaacagcaatgaagcggcctcctattacagccgccagcttgccctcaggaaggatcacgatccggtgacttccctgacaaatgagctgtatgcgatctttatgtgccatcttcttgcgggctcagaggaatccctgaaatacacaaaaatgcttcttgaggatgtgaagaaggcaccaaagggggaaggtcttcacattttgtggatgcatatgatgccgtttttgcaggagccggtaaaggatgtatttaattacagccggaacgtgcacatcagtgcctgtgattttgtcgcagacggctttcagcggatgcaggcctcggatccttatgaggcccttgcggaaaaaatggtcaactgtatttacaacggaagtgtgaagcagagaatccggcgcgcccaggagctggcggaccttacagaggcagacggcgggatcctttttgcacactggggctgcaagggaaccatcggagcttccagcctgatcaaaaattctctggaaaacgcaggacttccaaccatggtcctggacggtgacggctgcaacccggccaattccagtgatggccaggtatccacacgacttcaggcatatctggaaatgttgtcagaaggtaaggagggaaagaaatcatgatacattacgtctgtaaatatacaccgctggagctttttaagggttttggcgaggaatgtgcggttcttgaggaaatgccggagaattttgagctttcggatcagatcgcacatgccaacctctgcggcttcggaaaatctgtgatccaggcagtgctggagggaaaggtagagcagcttgttcttgttaactgctgtgattccatgcgccgtgtgtacgacattgtggaaagtaccggtaaatgtaaatttctgtacatgctggacatgcctcatgaggataacgactgtgaaaaggtgaagcttgcccagggcatccaccgtctgaagaaagcttatgaaaaattttcggggaaaaccttcgataaaagtggatttctgaatgctttttcccatgaagatgtggataaccagccatacatcggcgttctgggtgtccgtgtcagcggtgtcctggaaaaaatgatccgggataacatccgcatggatgtggaaaacctgacctgtacaggtggaagacgtcttgcagtgatccgtgaggagctggaaaaaatggaagacgatgccatgttcctggcttatgcggatgcacttctttcccagatgccctgcttccgtatgaacaacagcacccgaagaaaccggctgtatatggatccgaacctgaaggggattatttatcataccatcaagttctgtgattattatggttttgaatatgcaagtatcaagagagatatcaaggttccgcttctgaagattgagacagattttacaagccagagtgcaggtcagctccttaccagagtacaggcttttgcggagaccctggaaggctctgaggatatggacccatcaaaaggaattagcgaggagataagaaaaaaaatggaatcaggagtttattatgtggcagggatcgacagcggttccacaagtacggatgttgtgatcctggataaagacggaaaaattaaatcgaccatgatcatccccacaggcggcggcgctatgatgagtgcagagaagagcctggagatggccgtggaaaaagcagggatcaggaaagaagatatcgtgcgtatcgttactaccggatatggacgtgcctatattgacagtggtgatgacagtatcacagagattacctgtcacgcaaagggagcccattatctgaatccgaatgtgcgtacagttatcgacatcggcggtcaggatatcaaggcgattagcattgatgacaacggtgcggtaaaaaatttcctgatgaacgataaatgtgcagcaggaaccggacgcttcctggaaatgatggcccgtactcttggactttccctggaggagatgagtacccgtggtctggagtggaaagagaacgtagtgatctcaagcatgtgtactgtatttgcagagtccgaggtagtttccctggttgcccagaataaggacgtggcagatatcatccatggtctgaatgtatctgttgcttccaaggtaggagctcttgcagctcgccttggcaaaaagaatccgggggaatacatgatgaccggtggtgttgccagaaataaaggtatcatccaggcactggaggagaagctgggtgcaaagctttatatctgtgatgaggcacagctttgtggtgcacttggtgcggcactgtttgcttatgagaagtgtaatgcggcacggtgatcagatcagacaagttgcctgcgcagtgaatgcagagtgtgaatatccttttggtcaggggcggcgtgcccactcactgggcgaacagccacagttctttcggaagtaccggctgaagtgcgacagattggaaaatccacatagcagagccacctgctgaaccggcagagcttcgttggtgagcagatttttggctttttccagacggagcagattcaggtcagcatgaggggtgctgtcaaaaaaattccggtagcaggaataaaactgacttttttcgagattagccatggcgcagagtttttctgttgtccatggcttttcgtaattggtgagcatttccaggcggatcttctggaacaggctgtatagctccgagtcggaagaactgccggtatctgtactacggagttcccgtgtggcagtgatcatcagctggcagagcagagcatattcataatcccgggaaaaagcttctctggacagatattcatgctgcagtttccggatacagcgatcgatctcctggcagtcattagggtaaaaaatctcgttgcagggaagtccgaaccgttttgccagattttctccgcaggaaaaatggacataactgttccgaaattttcgcacagcctgataatgctggggatttcccggaatataaaagatgcaggcattatcccgggtgacagtaagctgaccgcccagataaaccttcattggtgttttaaataaaagaaaaagaaaatctccgcttccctccggccggaaaatcctgtcgtaatcggagttggaacggttgtattcgcagaaatttaaggtgaaatccatggaaatgctgcgctcctttcattacgtagatcagacaatccgactgtggcattgtaaagaactttctgtctggaagtataaagtaaagtgacagagggacgtccgtctggtaagactgtctttacgataaatcttaccggaaaaaaagtcaactatttcggaagataatcactggtatggatagaacaggatggtaaaatgaaacatagaaacggttgatttccgctgagagtgtgtgagcgaacagaggcgtaagagccggtatatggcggaatcggaaacagagctaaatgcggtagcagcagaaaataataatttacaggaggatttttacaatgaaaaaagcgcagatcatcgtggacaaatatttcctcaccggaaaaacagacaaaaggatctttggttcctttatagaacatctcggacgtgcggtttatgaggggatttatcaggaaggcagccctctttctgatgagcagggattccggaaggatactctggaactggtaagagaacttcaggtaccgatcgttcgttatccgggcggaaattttgtatccggattccgctgggaggatagtgtcgggccgaaagctcagcgtccgtccagaccggaactggcctggggtgtcatcgagacaaaccagtttggactcaatgagtttgtggactggtccagaaaagccggcagtgatgtgatgatggcggtgaacctgggaacaagaggaccggaggatgcgaaaaatcttctggaatactgtaactttaagggtggtacctattacagtgatctccgtaaggctcacggctatgaacagccgcatgatatcaaattatggtgtctcggaaacgagatggatggtccgtggcagatgggacataaaactgcgtcagagtacggaagagttgcagcagagactgcccgcctgatgaaatttatggatccggaggttgagactgttgcatgcggaagctccaatctggaaatgcctacctttggctcatgggagtatacggttcttgacgaggcttacgatcaggtggattatctttccctgcatcagtactatggaaatgcagcgggagacactgccgattttctggcaagctccaagggcatggatgattttatctcaggagtggtttccatctgcgatgctgtaaaagcaaagaagcatggaaaaaaacagataaatctttccttcgatgagtggaatgtatggtaccacagcaatgaacaggataagaagctggaaaaatgggtacaggcgccccatcagctggaggatgtttataactttgaggatgcacttcttgtgggaagtatgctgatcacacttctccgtcatgcagatcgtgtaaagatcgcctgcatggcacagctggtaaatgttattgcgccgatcatgacatccgatacaggcgcatggcgtcagacgatcttttatccgtatatgctgacaagtgtgtttggaagaggaaccgtccttaatacacaggttcttacacctatatatgagagcaagacttatggagaggctccatatctggattcggtgtgcgtctggaatgaggaaaaggatacactgacgatctttgcggtgaataagagtctggatgaggatatggaagtttcctgtgatttaagacagtttgaggggtataagatcatagagcatatcgtgctgaataacgataatcttcaggcagttaatacagaggcgcagcccgagaatgtagttcctgtaaaagccagtgcagaatgctcaaagctggacggcggaaaactggaagcagtatttacaaaacacagctggaatatgatccgtcttgcgaaataggtgtgggtgaagtatagtagaagtagttgcagataaggtaaatcatgggacattatgggaggatttttttatgtacgcacctgcaaaggaacgatacgaaaccatggagtataaccgttgcggagaaagcggtctgatgcttccgaaggtatctctcggattatggcataatttcggagatacatctgattatgaaaatatgaaacagctttgtttcacagcttttgacaacggaatcacacagtttgaccttgccaataattacggtccggcttacggaagtgcggagcggaattttggcaagattttgaaagaagaactgatgccgtaccgtgatgagctgatcatcacaaccaaggcaggctatgatatgtgggagggcccttacggaaactggggcagccgcaaatatcttctcgcaagtcttgaccagagcttgaaacgtatgggcctggaatatgtggatattttttaccatcacagaatggacccggagactcccctcgaggaaactatgggcgcgcttgcaacagcggttcagcagggcaaggccctttatgtgggactttccaattatgatggaaaaaccttaagccaggcggcaacgatcctgaaggatctgaaatgtccctttgtgatcaaccagaaccggtattccatttttgacagaactgtggaagaaaacggtctcaagagaaccaccggcattttgaaaaaaggtctgatcaccttcagccctcttgctcagggacagctgacagaccgttacctgaacgggatcccggaggacagccgtatccgcaaagatggaagattccttaaggaaagtgtgctgacgccggagcgtctggatcagatccggagactgaacgatctggcagcccagcgtggagagaagctggctgatatggcgcttggctggctgcttcagcataaggaagttaccagtgttctgatcggagcttccaagccgcagcagatccttgataatgtgaaagcgatccactgtgcaccgtttacagctgaggagctgcgtctgatcgacgagatctcaaaataggatttatatacttcctgttttactatgaaaagtagtgaagcagggagttttttatgtcgaaataattgtttaactgaattaggaaagtttccgggttactgtccactggtaatattccgcgaggtgttttttgtgagcggaggtcacagaaaacccgagacatactgcgcgaatttatgcgattagcataaattctgtgcatcgcgaagcgtgttgctgagaacggagtgaacagtaacgtctccggcgggagtgcaaagagcaataagcagtggaggtttgacaacgggataggtgtgtgctatattgaaaaacagaaaagaaaagagccagcgggagcttgtgtgacaggctgagaggaagatagatcttcgaccgtacctgatttgggtaatgccaacggagggattgtgatctgagagcgtgtctccgtggagtttgccatgggatgcgctcttttcggatgcaggaatggaactggaatggtctgacaatgtggggatgtgaaagtgacagagactgcatgtggagcttctgcgaaagagcgggcaggaaggggagcgccttaatgtctggcaggagagtgatattccggaggatttttccggaaggatcatgtaagcgatgggaatccgtgttttcggagtgagaggaagtaagggaacttcgaccgccaaaatctaagggcagactgcagcagacgggaagcttttgcccggatctgacagggctctgcctgatatttcagggaggaaaaacactatggaaaaacaaaggatgcacacgcttcgtatggtaatgctggcaatgatggttgcgatcggtgtcgttatttcaccgatcctgaggattgagggaatgtgccccacggcgcatcttgtcaatatcgtatgctcggttctgatgggaccgtggtattcccttctctgtgcgaccatgatcggcgtgatccgtatgatgttcatgggaatcccgccacttgcactgaccggtgcagtatttggcgcatttctttcaggtgtgttctacagactttccaaaggcaagatcatctgcgcggtgatcggtgagatctttggaacaggtatcatcggatccatggtttcttatccggtgatggcattcctgatgggaagaggcggactgacagcattttattatacgccgatgttccttgcagcaaccacaatgggaggatgtgttgcctatattttcctgaaggctctgagtaaagcaggtcttctggtgaaattccaggcagctttgggttcaaaaacatatgagacaaagaattttacaactgcgaaagcgaattaaagaagaaaagccgctgatccattgcatcaccaatccgatctcgatccatgactgtgccaacgtggtccttgcagtaggtgcaaggccgatcatggcggagcatccggcagaggtgacagatattacggcatcggccggtgcgctgatgctgaatctcgggaatattaccgatgccaggatcgagtcaatgaagcgttctatgagaacagcgatggaaaataagatcccggttcttctggacctggtaggggttgcctgcagtgatctcaggctggatctggcacgggagcttttgagcatcggccatccggcagtgctgaagggaaatatgtcagagcttctggctgtttccggactgccgtctcatgcgatcggaatcgatgcgggggcgcaggatgccctgactgcggaaaatatggagactgtcagtgaggtgctgagggctttttcaaggagtaatcaggcaattgtgctggctaccgggaaacaggattttgttacggatggtgaacgggttgttctggtacaaaatggcagtgcggcgctgtccgggatcacaggaaccggctgtatggtcggtgcactgactgcggcgtttttgccggggtgcgaagataatattgcgaaagagatgacggatagtatagaggcaggtgtctggtctggcgttgagatggaattaaatgggagatccgggaattatctggctgcggcagtgcttggtactgcacttatgggtatcgccggcgaggaagcggagaagatttcccgcggtccgggaagctttcaggtaaatctgctggatgagatctatgggctttcggatcgacagctgctggatctgttgaagattgaaatgtactgaaaaagaggggattaggatggatagaaaagatttggatgtaacgttgtatctggtgacggatagttcttatcatacggaggagtctttgctccgtacggttgaggaggcttgtaagggtggtgtgactctggtccagcttcgcgagaagaataagggtggacgggagtatctggataaggcttttaaggtgaaggagatcacagatcgttacaatgtgccgctgatcattgatgatcgtgtggatgtggcgctggcctgtgatgcggctggtgtgcatgttggagcttctgatattccggttgctgtggcaaggaagctgatgggaccggataagatcgtgggggctactgccaagacggtggaggctgctgtgaaggcttatgaggatggtgcggattatcttggtgtgggggcgatttatcctactactactaaggtggtgacgatccttaccaaggtttctacgttgaaggatatctgtgaggcggttccgattccggcggttgcgatcgggggattgaatgccgggaatatggatgtgcttgagggcgccggtatgagtggtatggcggttgtttctgcgatcatgaaggcggaggatccgaagaagaatgcgcgggagctgaaggagaagattgttgctttgatgggaaagtgatttaggaaataaatggagagcagtggtggatttgaggttcattgctgttctttttttgttgaaatacggacgcccgtgaggcgtgtgctgcctgtcgccggggcttcgtcgggggctggcttctaggctgccggaattctgctaaaaccgttttccaaaagtccgaactcgcgtcttgcagccgctcagacagcggacttttgaaaaacaacgcagatttcc

SEQ ID NO: 240 - DNA, 182 bp, Unknown
  gut microbiota DNA sequence
gcagtcatttctgactgttatccccctgtataaggcaggttacccacgcgttactcacccgtccgccactagaaacaatctaaatccgccgaagcttcaataaaaggtttcccgttcgacttgcatgtgttaagcacgccgccagcgttcatcctgagccaggatcaaactctctgataaaa

SEQ ID NO: 241 - DNA, 149 bp, Unknown
  gut microbiota DNA sequence
tacatttaaagaacggtttaaacaaaccaaaagcagtaaaaacgagagatagccaaacggttgtcttgagtaaacgaatcaaacattttatcagagagtttgatcctggctcaggatgaacgctggcggcgtgcttaacacatgcaagt

SEQ ID NO: 242 - DNA, 37569 bp, Unknown
  gut microbiota DNA sequence
gatatcatcggtgcgggaatcggcgaatatgtattggtggcacaaggaagcgcagcaagaattggctgcggcgtagaaacagcaccggtagatgccgccatcgtcggtatcgtagacgacggtgcaggattggagtaacgccatggatatcaaagaattacagaaaattatgcaggagaatggtgttgtcggagcaggtggagcaggtttccctacatacatgaaactgacagacaaagcggataccattcttatgaactgtgcagagtgcgaaccattactgaaacttcacagacagttgttggagaagcacgcatacgagatcatgaaaacattcgatatggttgcggagacggtaggagcttcacaggccattatcggaatcaaaaagtcttatgtacagacgatcaatgctttaaatcagcatattgaagaattcccgagggttaagatccatcttctggatgaggtttatccgatgggtgatgaggttgttcttatttatgaggcaaccggacgtgtggtacggccaggaggactgccaatcgagcagggagtagccgtattcaatgtagagacactctacaatgtataccgcgcggtagaagaacacaaaccggttacaagcaaatatgtttccgttgttgcagaagttgagaatcctgttacagtgaaagttccactgggatgcacactggaagaggttgttgcccaggcaggcggaacaactgtgaaagatcctgtatatttcgtaggcggcccgatgatgggacgtatcggaaacggttctgatccggttacaaaaacaacgaacgcaatcctggttcttccaagggaccatgttattgtcatgaagaagcagcggacttcttctatagatctgaagagagcagcatccatctgctgccactgccatacatgtacagatctttgcccgagacacaatctgggacacccgatcgatccggcaatgttcatgatggcagcatccaatcaggatttcagaaatgtaaatccttatatcaattctgcattctgcagctcctgtggtgtctgcgagatgtatgcgtgtccgcagagcctggctccgagaacactgcttgcagatatgaagggtggacttcgtaaggcaggaatcagaccacctcagggtgttcagccgaagccggttcaggagtccagagaataccgcaaggttcctgaggagcgtctgatggcacgtctgggacttaccaaatatgacaaggatgcaccgcttcaggaagaacttgtaaacgtatcgaaggtaaaggttctcttaagccagcatatcggtgcaccggcacaggcaatcgtaaatgtaggcgatatggtaacagaaggccagatgatcgcacagcctgcacagggattaagtgtcggaatccatgcaaccatcagcggtaaggttacagaagtgacagaccgccatgttgtaattgcaagaaattagaaaggacgtgcacaaaatgagtagagcaatcggaatgattgagtttaaaaccacaccagctggtatcactgcagcagatgccatggttaagacatctgaagtagagatcgtggaggcgcagacagtatgtccgggaaaatatattgcaattatcaccggagatttaagcgcagtaaaagctgctgtagacacagctgtaacaacatacgaggacaaatgtattgacagttttgtactgggcaatccacatgagtccattttcccggcaatctacggaaccacacaggtcgaggagattagtgccctgggaattcttgagacctatgatgcagcatctatcatcgaggcggcagatcaggcagctaagacagctatcgttgatctgatcgagcttcgtatcgccaagggtatgtgcggtaaatcatacatgcttcttaccggcgaggtttctgcagtggaggcttctatcgaaagagcaaaagagctggtagctgaaaaaggaatgtacatggattcctcagtgatcgctcatccggacaagagaatgatcgatacgatcctttaatattgtctttatatctgagggatatccttttgaagggtatccctgcaatgacatctgaaaaggaggcatcttatgctagcattagagagaagaaatctgattctcgagaaattacaggaagagaaaagggttgttgtaagtgaactaagccagctttacagtgtctcagaagaaaccatccgccgtgatctggacaagctggaaaaagagggacttgccacaaagagttatggcggtgcggtgatcaacgaagatgtcggtattgatttaccatttaatgttcgtaaaaaccagaatgtacagggaaagcagaaaatggcggagattgctgcttccatggtgaatgacggagatcacatttttctggatgccagcacaacggcagtttttgtggccaaggcgctgaaagaaaaagaacgtctcaccgttgttaccaattctatggagatccttctggagctctcggatgtatccggctggaatattatttccaccggtggagtgatgaaggaagggtatcttgcatttcttggtgccagaaccgaagaagtgatccgttcttattatgtggacaaggtgatcttttcctgtaaggcattaaacgaggatatggggatcatggaatccaaagaagcctttggaacaaccaaaaaagccatgatcaattccggaaaaatgcgtattctggtggtagacagcacaaaatttgatcagactgctttttccgtggcaggacagctgcgggatatcgagacggtcatcacagacaaaaaaccgtctgaaaagtggttggatcatttcaacaggcataagatcgaatgcatctacccgaaatagattgaacatatatcgtgaaacgatcttgttcatgagcatgtagtgtatgcggaatgcggagatccgctttactttatccgaacacaggcagacaaaagagaactgtgtttcggtatgacgagagggagcagtttctatgaatacatttgaaatgaaaacagccatccattttggagctgatgccctgggaagactgagagatattccatacaaaagagtccttgttgtcacagatccgtttgttgtaaaaagcggaatgatcgatatgatcacaaaaccgcttcaggcaggtggaaaagaatttgatattttctgtgatgttgttccggacgctccggttggaaaaattgccgaaggagtcaaaaaattccttcagtatcagccggaagcgatcgttgcagtaggtggtggctctgccatcgactcctccaaggcaatccgtgagtttgccctgaagatcaacaattacggaaaggttggactggttgccattcctacaacaagtggtactggctccgaggttacttcttttgcagttgtaaatgatacagaagcacatgtgaaatatccgttgatctcagacagcctgacagccgatgaggcgatcctggatgctgagcttgtacgcagtgttccacctgcgatcacagcagatacaggtatggatgttctgactcatgcaattgagtcttatgtcagcatcaatcacaatgagtttacttctgcacttgcagagaaatccattgagatctgtggtgtatatctttaccgtgcatatgttgatggtaatgatatgcatgcaagacagaaaatgcatgtagcatcctgtctggcgggactttcctttaatgccgcaggacttggtatcacacacagtatggcgcatcagctgggggctattttccatattcctcacggaagagctaatgcgatgctgttgccgcatattgttgaatataatgcaaatatcaacaaacgcagcagaagccagaaagaatatcttccggcagtaaagagatattccaatattgcacatcttcttggactgagcaattataacgaagttatgagcgtaagatctcttgtaaactggatccagtttatgcagaaagagatgaatatcccgcttaccatcgaagagatgaagacgatcacaccggatgcttattttgcggcggttgataagatggcggatatggcacttgcggatgcctgcacagcggcaaatccgcgtgtaccgaagaaagaggatattgttaagatttatactaaactttggtctttttgataaaagatgaaaaccgcaaaggggccgcaaagccgcggcccctctgcacacccctcgggctttttttagagtgcttgactgtggcgggcggaagggtattgacttgtgcctgtatgctgcggttgttccgggttgaacgttgtgccgatggggcgctgtggcgccttgaatgtgtgacgttttggcggaggctggcgcgtttgtgaacgccgcgcctggtttgctgggatggttgtggtgtgtgttacgtatgtgtggtatgcgtagcatttcgaggattgtaaaattggtctgatatgggtgggattatttatcaggagttgctgggaggttgagctgggatggaggtttataccgggtatggtgataaggggatgacggatctttcccatacgaagaatgtttcaaagtcggatgatcggatttgtctgatggggtcggttgaggagctgatgagtcatattgggcttgtgcgggttctggttgatgatgtggatgttgtccggatgctggagaagatctcggagactttgaagaagatcatagatggggtttctgatccttataatcgggagtttaaggtcagtgaagaccggacggagcttctggaggaggagattggccggatgaaagagattttttccggagagaggcttccgattcttccgggggattcccgagttgcggctgagattgatgtgacaagagctgtggcgcggagggctgagagagagcttgcgctggtcagtgtgaagtttggatcggataccggagccaagaaatatatgaatcgattgtcggattatttttatgtgttggcaaggtatgtggatgcagcgaagattgaagagaagaagacagatatttctgaaagtgttcaggaatctgtgaaagcagaaactgctgggattgtagctaatgttggggcagaggctgtaggaactgttggaagtagtgcagatgttgcagcgggtatatcagcggtggatgtaagagcacaggatccacagatggtgcagaaaagggatgtacaggcttttgatgtgcagaatgggactgtgacgacagcagtgggaggaaatacggcaatggcacagaatgacagtatggcagcaaatacggcgatgatccaggaagtgctgaagcgtatgggtatccaagggcgtatcacattggattctgccaagaggcttattgagaagatcgagcaggaagctttgagaagaaacaagccttctgtaattgcgatatgcagcccggatggaaatccggttgcggttcatgtgatggatggatcttttcttgtaagctttgaggtggctttgaagaaggcctatacatcggttgcagtgaagatgtccaccatggagctttccagactgacacagccgggtcagaccttttatggccttggaaaaatgagtgacaatattgtgatattcggaggcggtgtacccctgaaggttggagacaccatcatcggcggtctcggtatcagcggcggtaccggcgaagaggataacagccttgcagagtatggactgcaggtactgaatgaggtactgtaggataaaaacaaaacgtatagacagctcagagagaataaataaaagggacgtgttgtagtgatgatttttaaatcaatactgcggcacgtcccttttgaattatttatttccagctaatcttcagacatttaacggaaatatcacttttttccggtgcctggaccatgttctggatgaaataggtttttgtcatggtttttccgggcttcaggttcagtgtcagatccttggtccagtacatctggtcatagataccggaaccggtggtgatctttacttttgcggtggtgatggttttcgcagaagtattggtgaattttaaggtataataggtcttcatgtcattggggccatacttgatacgggcaacactgatcttcagatttttgacggtaggtttggcggccggtgcagatacagtaatagtgatcttacgattgacaccgtttaaatttgcggtaaccgtggctgacccttttttctttgggacaagatagtttccggaaatggcaagtacggaaggcttgctggattttgcatttttaatggtcagactggtaccgcccttcagattaatgagggaacgcatgctgaccttggaaccaaccttgagtgtagttttggaagcgcggaaggttgctacggtttttgaaggtgaggttacttttacggtcagcttacaggctgcggcctttggataggataaagtgatctttgcggatccggctttcatgcccttcagggtaactgtgaaacggctgcgttttttggaatcctgagtgatgctttgtaccttgagaacagagctgttggaagaagtaaccttgaattttgatttgctgatggtttttacgtagggatcagaaatctcgattccgatggaagtggtttttccggttcggatgctctggttcagataattgttgttggtgataaaaatttcaggcactgtctgtttgatggtaacctcatagtcacagtctaccggtaccggacattctttattgccgaaatcgaactccaggtagccatcctctatgttgtcatcgtaggtgaaaaaggtttccttgtatgccagcggtgtataatttgaagtgttcagcttaaccacattgatcccatcgatggaaaatgtggtgctttttgggatgactcccttgggtgaataaaagcttacacgaactgtcacggcatagacccgtttttggcagtttgcatttttgatgttgatcgggaaattaatgtctgaaaattcatcttcgatcacaccgtcggtatcacggatagtggaagtggttcctttggtcacgacccggactctggcgtgggcatcctggggaagcaggagcacaataacggaaaaaagaaacaggaaaaaaattgcttcgatggtttttatttttcttttacacatgacaaaccctcctttttttatgagcataccggctgttactgaacagaggagcgggtactccatgaattcatggtcctctgttgtgggacagtataaacagactctttctcttatatcattataacaggaaaccagggaggaagtgctttgtgatttttttgtatcaattggcaatttatctgtaaatatgttaaaataaaatattcggaaaacagcagcgattcgacaatgaaaaaaagaagcgttacagttccggtgggaacgtaacagaaaggatcatgtcgatttatgacgaaacaggaacttttaaagacccatttcgggtatgatacattcagagaagggcaggaagcggtgatcgatgcgcttcttgcaggaaaagatgttctggcagtgatgccaaccggcgcaggaaaatcaatctgctatcaggtaccggcactgataatgaaggggatcacactggtaatatcaccgttgatctcccttatgaaggatcaggtgagaagcctgaaccaggtcggtatctcagcagcatacctcaacagctctctgacgcaggggcagtatttcacagccttgcgctatgcaaaggcaggacgatatccgatcatctatgtagcaccggagaggcttaccacagaggcgtttctggattttgcgctgagcgcggatatttccatgatcgcagtggatgagtcacactgtgtatcacagtggggacaggattttcggccaagctatctgaagatcacagagtttgtggcacagcttccaaaaagaccggtgatcggtgcatttacagctacagccacgaaggaggtcagggaggatattgcaagacttctggggcttcaggatcccttttgcacaaccacaggatttgaccgggaaaatctttattttgcagtgaaaacaccgaaagataaatataaggaagtacacgattacatactggagcatccggacgacagtggaatcatctactgtctcaccagaaagctggtggaggaggtctgcggaaagctgatccgtgacggcatcacggccaccagatatcatgcaggactttccgatgaggaacgcaggaacaatcaggatgattttatttatgaccgctgtcgtgtgatggtagccaccaatgcatttggaatgggaatcgacaagtccgatgtgcgttatgtcattcattataatatgccgaagaacatggaaggctattatcaggaagcaggccgtgcgggccgtgacggcgatcctgcggaatgtatcctgctttacagcgggaaggatgtggttaccaatcagtatcttatcgagagaggacaggataaccaggaaatggaagcggcagtctggcgccttgtccgggagcgtgatcaggagaggctgaagcagatgaccttttactgctttacccatgattgtctgcgtgagtacatcctgaaatattttggggaatacggaaaaagctactgcggaaactgcctgaactgccagaccgagtttgaagagcaggatgtgagccgggaggccagggcaatgatccggtgcgtggaaagcagtggtcagagatacggggtgaccgtgatcctggatactctgcgtggtgcatctacggcgaagatccggcagtatgagatggatggaaatccggaatatggagtctgtgcaaagattccggcacaccggctgcggcagatctttaattatctggtactgaaggaatatcttcatctgacggatgacggatatacgattgtgaagctgaccgccgcttccaggtcacttctggaggaggcgcatatcctcacaatgaaaatgtcaaaagagctggagacgaagaaaaaagagaaacggagcagacttccgaaatctgcagtcggggagctgggagaacaggatgagcccctttttcagaagctccgtgctcttcgcctggagatcgccagagaggaaaaaatccccccttatatggtcttttccgacaaaacccttatccatatgtgcattctgaagcccggaaacgaggaggaaatgctgaatgtgacaggagtcggcaggcacaagtacgaaaaatacggaaaaaggtttatagacgcggtgaaaaatctgtaggaaagagacttttgccgtcggaaaatgaagagcgaaatgttctgaaatttcttgcattttaaagaggcatttgttagaataagacaagcaggaaacatccggcggctatagtgcggccggatcgtttttaactgtatcatattctgctgcacgttccggtgcagcgtacaggcatttcgcaagcagagttctatgcagcagtggaatcccttcgagtagatggaccgactgtgtgagatatccgttggtcagaagcaagcagtgaggtggatgatcgtatccgctttcaattaagacataatctggtgctggtcactgcgtgaacagagatcaggctccttcacgatctgcgtcggctttttcatgcagaaaatctgccctgccggcttttttctcatacagaagagtagcatgtattcataaagacatgaacatagcccgtctgcaaaacgggaatccgttccggcatgactgttctccaccaggccgaaaaagctgtatttacataaaacagcccaattcctcaaaaagcaggatatccgcaatatgtgcgagatcctgctttttgtcatgtaatactctgatatgtgccattaagacgtggaaaaatatttcagcgtcttttatatttgccgggggtgatccccttgtactttttgaaggtacggataaaatagctcagatcattaaagccattccgataggcaatctccgtgatggaatcatcggtggtagccagctggcagcaggcctgctcgatcctctggcggttgaggtaatccattggtgtctgatgcgtcatctcggaaaagaaccggcagaaatatttgggagacatggaaaccgaagcggaaagctcctgcagggtaatggggctggcatagttcttttcaataaattccacgacttgcttcagctggacaatgcgcttgtaatctcgtctggttttccgcaggctttccaggtagtaatgattaccaaaaaccaatccgaaaaagtggtaaaattgtccaaacacaaccagctcatatcctggcttcctctgccagaaagaatcaaaaagagagttcactgctctctggatatcaggctgcttttcagtgaaatggtgatagatcagaagctcctggtggctgatcttctgcatatattctgtgcagacggaattaaatttcagaaacatgttcatatcaaaaacaatgcactgatagatacaatcctgaggaattccggaatgcagaactccactattgacaaaaatcacatctccggcttttgctgtaaaacttttttcgtctaaagtgacggtgagagtgccctgtaatacacgcatgatttcacattctacatgccagtggtaggacatgacatagcgtggatggctgctgtcaatgtggtggaattcaaaaggaaattcataggtacctcgaagtctgtcctcatttcttccaagatcgtgcaaaatacaacccttctttcttaaattttatagtttttttaggaactcatatgaaaaagtgaatattgtactgttttttgctattataacacaagtaatttaaaagatgcaatcgtataataaaagcatagttcggacaggagttgttggaacgtaaaaaaactgtaagttataatagtgaatataaatttaggaggtaattgttactatggcaaagagcagattagtaggcagctatccggttatcggtatcagaccaaccatcgacggacgtagaggagccctcgatgtaagaggatctctggaagatcagactatgaacatggccaaatccgcagcaaagcttttcgaggagaacctgaaatattcaaatggtgagcctgtaaaagttgttattgctgataccaccatcggacgtgttggtgagagcgctgcatgtgcggataaattccgtaaagagggtgtagatatcactcttacagttacaccatgctggtgctacggagctgagaccatggatatggatccacagaccatcaaggctgtatggggattcaacggaacagagagacctggtgctgtatatctggcatccgttcttgctacacatgcacagaagggccttccggcattcggtatctacggacatgacgttcaggaagctgacgacacatccattccagaagacgttaaagagaaactgttaagattcggccgtgcagcagttgcagctgcatccatgagaggtaaatcctacctgcagatcggttctgtaacaatgggtatcggcggatctatcatcgattctgatttcatcgagtcctatctcggaatgagagttgagtctgttgatgaggtagagatcatccgtcgtatgacagagggaatctatgatcacgcagagtatgagaaagctcttaaatgggcaaaagagacctgcaagatcggctgggacaagaacccggaagagcttcagttctcaccggagaagaaagaggagcagttcgagtttgttgttaagatggcagttatcatcaaagagctgatgaacggctgtgataatcttgatccgaaattctctgaggaagcaatcggacacaatgctcttgcagctggattccagggccagagacagtggacagacttctatccaaacggtgacttcgcagaggctatgctgaacacatccttcgactggaatggcgctcgtgagccgtacatccttgctacagagaacgacgttctcaacggacttggaatgctgttcatgaaactccttacaggacgtgctcagatcttcgctgatgttcgtacatactggagcccagaggcagttaagaaagctacaggatatgaccttgagggtgttgccaaagaagctggcggattccttcatctgatcaactccggtgctgcttgcctggatgctaacggacaggctaaagaggctgacggaacaccagttatgaaacagtggtgggatgttacagaggcagaccagaaagcaatcatggacaatacagagtggtgtatggccgacaacggatacttccgtggaggcggatactccagccgttatgaaacacgtgctcagatgcctgcaactatgatccgtctgaatcttgtaaaaggacttggaccggttcttcagatcgcagagggatggacagtagcccttccggaagaggtatctgacaagctctggaaacgtacagattacacatggccatgtacatggttcgctccaagatgcgatggcaaagagggaccgttcaaaacagcttacgatgtaatgaacaactggggtgctaaccacggtgcgatctcctacggacacatcggtgcagacctgatcacaatgtgctctatgctgagaatcccggtatccatgcacaacgttcctgagaaggatatctatcgtccggcagcttggaacgcattcggtatggaaaaagagggtgcagacttccgcgcttgcaagaactatggaccactttacaaataaatcatattgttaagataacggaatatcaaatcctccggcatgcatgtgccggaggatttttttgtgccgtgttatatggatagttgggaaatatactgttcggatctacggaaaaaagttataatagaaaaagatatatatgaatacgggaggttacgtagatgaaatatatacagctgaacaatacagatctgaacatcagtcctatctgcctcggaacagcaggatttggagataaatcagacctggaaaaaagctttgagattctgaatgcctttgtatgggcaggcggaaattttattgatacggcaaatgtatattgcaaatggctaaaaggacatggaaattgcagtgagcagatcataggaaaatggctgaaagagagtggcatgcagggaaaagttattgtggcaacgaagggcgcgcactattcctttgaggatccgggccgcagcagagtgaacaaagaagatatccgcatggatctggatgagagctgccgcacactgggaaaagatgagatggatttttactggcttcacagagatgatccggagaaaccggcggaggaaatcgtggatattctggaagaattgaaaaaagaaggccggatccgttattatggattttccaattaccgcacagagaggctgaaagaaattgctcagcgtctgagagaacgaaatctttcagggatcacagcagtatccaatcagtggagtcttgcaggaatcaatcccggaggaaatacaaatccggatcctacacttgtggagttttccagagaagaatatcagtggcactgtgagacaggcgctgctgccgttccgttttcttccactgcaatgggatttttttcaaaacttcagaaaatggggctttcctgtacagatgcagaggtggatgcatcctgggtgcgggagaaggaaacacagatcacaggtctttcagaaagtatgaaaagatcctactggaacgagacaaaccttcgcacctatcagaagctgttaaagctgcagaaagaaaccggccacagcctgcaggccctgtctttggcatactttttccatcagccattccagactgtgccagtaaccggcgtcagcaatccttcacagctaaaagatgtactggatgcctgtgagatcgaccttgcaccggaactgttcggaggctgggtgagtgcaggaggatgatataagtaactaaatatattgtaaaaagatattaaatgtgtttaaatatacttatggaggtatattatgaacacatcaaatatcacaaattataaaccaaaagattttgctgaattattaggtgtttctgtaaaaacgcttcagagatgggacagagaggggatcttaaaagcaaaccgaactccaacagacaggcgttattacacatatgaccagtatcttcaatttaaaggtataaatatagaacatgataaacgaaaagttgttatttatgcaagagtatctaccaaaaaccaaagggatgatcttcaaaatcagacagcatttctgcgtcagttctgtaatgccagaggaatgatcgtagaccagtgcattgaagactatggaagcggacttgattataaccgcaagaaatggaatggattactggacgaagtcatggagcagaaggtcaaaaccatagtgatcgcgcataaagacagatttatccgttttggatacgactggtttgaaagattctgcatgagattccacacaacgatactggtggtgaacaatgaagaactgtcaccacaggaagaacttgtacaggatattatttccatccttcatgtgttttcctgtagattatatggacttcgtaagtataaaaaacagatagaaaaggatgaggagattgctgaagagcttcaagacagagatcgatcctacagaagagcagaagatcaaaatacataagacaatcggcacatgcagatatatttataatttctacctgtttcataataaagaacgttatgatgccggtgaaagatttatgagcggcaagtcgttcagtgtatggctgaacaatgaataccttccagggcatccggaatatttctggatcagagaagtcagttccaaatcggtaaagaatgcaatcgaaaatgcctgtaccgctttttcaagattttttcatcatcagagtagtttcccgagatataagaaaaaaggaagatctgatgtaaaaatgtattttgtaaagaataatcccaaagactgtctctgtgaacgtcacaggatcaagatcccaacacttggctgggtaaggctgaaagaaaaaggttacattccgacctctaaggatggatatgtgatccgaagcggggcagtttccatgaaagcaggcagatattatgtgtctgcacttgtcgatatacctgctccggaagcagatggaaatctcactgatgggatcggaatcgatctggggctgaaagactttgcagttgtgtcaaatggaactgtatacagaaatatcaataaaacagcacggatcagaaaactagagaaacaattaagacgggcacagcgaaagctttcccgtaaatatgagaacttaaagaaaggagagtccactcaaagagcaaatatatgcaaacaaaagcttaaagtacagaaacttcatcatcggatagaaaatatccgtacagatcatatcaacaaggtaatatctgagatagtgaaaaccaagccgtctcatataacgattgaggatctgaacatatccgggatgatgaagaaccgacatctctcaaaagcagttgcgtcccagaaattctatgaattccggacaaaattgaaaacaaaatgtgctgaatatggaatcgaactgagggtagttgaccgatggtatccatcttccaggatctgccactgctgcagcagtattaaaaaagatctgaaactttcagacaggatctacagatgcacatgtggatatattgaggacagagatctcaatgcagcactgaatctgagagatgcagagacttacgaagttgcatgatcccacaaacgtaagtatgtaccgaaggctatttcgggaattaacgactgtagagtgtacttaggatctgtgagtagagataactccggttactcaaaagcatacacaaagaaacagtaagcggtattcgtgagaatccgcattatctcgatgtgagcatgtttaatcacattttgagtggcaggtgatcgatgaaactgatccatttatcagaccttcacctgggaaaacgtgtcaatgagttttccatgatcgaagatcagaaatatattttgaacgaaatcctgaggatcattgacgaagaagcaccggatgggatccttctcgccggtgatctttatgacagaccggttccgtctgcggaagccgtgcagctttttgaccggtttcttacgcagttggcagaaaggaagattccggtgtatgccatcagcggaaatcatgacagtgcggaaaggatcgctttcggttcacagatcatgagcagcagcgggatctgtatgtccccggtatacgatggaaaaacagaaaagtactgtttaacggacagctatggagaagtttggatccatctgcttccatttgtgcgtccggcaactgtgaggcacggactggaaggagaagaagaggtggatgagatccgtacctaccaggaggcagtgcagggggcagttgcacatatggagattgataaacgttatcgcaatgtattgatcgcccatcagtttgtggtcggtgccatgcgctgcgattctgaagagatctccgttggaggtatcgatcaggtggaggcagatgtgttccgagattttgactatgtggcacttggccatatccacagtcctcagaatgtgggaagcgagcacatccgctattgcggaactcctttgaaatattctttttccgaggcaggacagcagaaatccgtgacagttgtggagcttctggaaaaaggaaatctcaggatcatggagattccgctgaagcctcttcgggatatgcgaaaactgaaaggcacatacatggaggtcacatcactgtccagttatcaggacacaaacacagaggattatgtgcagatcacgctgacagatgaagaagatatcgtagatggaatgcagaagctccgtactgtttatccgaatctgatgaggctggaatatgataaccgacgcacaagagaaaaccaggagatcgcaggtgcagaaacggtgaaaaggaaatccgagctggaatattttgaggaattttttgaactgcagaataaccagcccatgaatgaagaacagcggaaatattccgaagatctgatccgtaagatccaggaggtgaaataatgagaccgaaaaaactgaccatcagtgccttcgggccctatgcagataaaacagagattgatttttcaaagcttggagagggcggtctctacctgatcaccggtgacaccggagcaggaaaaactacgatctttgatgcgatcacctttgcgttatatggaagagccagtggagaggtaagggatccggccatgtttcggagcaaatatgcagagccttccacagagacctttgtggagcttgttttttcctatcaggggaaaaattatcacgtgcgccggagtccggaatatatggctccgaaaaaaagaggcaccggacagactcttagaaaagctgaagcacagctgatctatccggatgaacgtcagccggtgacaaaggcaaaagatgttactgcggcagtggaacagcttctgggactgagttatgatcagttcacacagatcgcaatgatcgcccaaggggatttccagaaattacttctggcaggaactacacagagaggagagatcttccgacagctctttcacacaggactttatcagcagattcagatgaaacttaaggatacgtcaatagccagatataaggaatatgatgaaatgcgccgcagtattgcccagtatttggatggagtgaaaacggagactgcttcatggcaggaggcagaggaatttgacgaactgaaaaagataaaattcgagggaaaactggagcggagtctggaacttctgaagcagtttctggaatatggtgaagcacaggaaaaagagctccgggaaaaagaagactcgcttaatcaggatatacgaaaagcagaagaggcacaaaatcttgtggctcagaaacgaaatctggagctgaaaaagaaaaaagcggaaaaagatctggaagaattaacaccacttctacagcttgcagtagaagaggcggaaaaatataaagatgcagatcacagatgtgaagagcttggaatcaggatccgtgaaaaagaagaaaagctgaaaaaatatcaggagctggaaaagctgaaaaaagagctggaaacaatcgaaggaaagcttgaaacagtcagtgaaaaaaaagagaaggatatttccgaagagcagcttttgcagaaaaaagatgaggaagaaaaaaaacgcctttcaatactggcagatgcaggagaagaactacaaaaatacaagtttgagtacgataaactggacagtgaaaaacgaagctatgacagctgtctgctgacggaagaagagatcaaaaaagaacagaaacagatagatggatggcaggaagaaatcatccggaaagaaacgcagcagaaggaagagctggagcagcaaaagaaagacaaggcgctgttggacagcgcggagctggaacttcagaaggcagagacgaaaaagacagaagggcttcggaaaaagaaagaattagaaggactgattgctctggttaaggagtttcaagaggcttataatgccacgaaagagcagcaggaaaaatataagatttccattgaaaaagtacaaaagcagagagaagtttaccagaaactgtttcagagttttctggacgcgcaggcagggctcctggcgcaggaactgaaagaggactgcccatgcccggtatgtggttctttcgagcatccgcgtccgggaatacttcccaaaggacaggttgtggatcaggaaatcctggacagagagaaacaaaaactggacagactggagaatgacgcaaatacgcagagtgtggaagcaggaaaacgaaaagaacgccagaaaacattatggcatcagatccagagggaggcacaagagcttttacatgagacggaatggaaaaagctgatccctttgctgaaagaaaaacaggaccaatgtgaaaagcagctggcagacagcgaggaagagattcgcatagcaatagaacgtaaaaaaaagaagaacgaaacagaaacgtggatcgaaaagctggaaacagagatcgttcagttacaggaagagaaaaatcaatgtgacagaaaacaggccggtcttcagacaagagacgtggaaaacaaaaagcagcagcagataacagcagaagagatccgaaaactgattcagaaaagtctggtggcaggaaatggagaagtgacggacaacacagctgcaggatttgaaagacagatacaggatatgctcagctgcctgtcagaaaaagttcagggaaaggaaaaagaagcaaaacagaaacaggatcttgagaagctgatcatagaaagagaaaagactctgaaagaactgggaagagttatcaatgaagctgcacaggacatcgtacgtctggaaacagagaggaagaacaaagcacagaaagtggatgagctgaacgaagagatcggagaaggtggaaaagaatctctggaacaggaaataaaaacacagaggaagctgtatgaagagctgaaagaaagcagcagaagagctcaacagaaattacaggagatccgggcggaaaaggaaagaataacagcggttgtaaaaaactttgaggagcagaaaaaagaaatcggagaagtagatgaggatgcgctcagagagcagtacagccgttttagggaagagaaaacacagctttcggaaaaacgaaaagcacttttttctgttcagaagggaaatgaggaaatatatcataaagtgcaggtacgtcagacggaaatgactgcggcggaaaaagaatatgtctggatgaaaaatctttcggatacagccaatggaaaactgaacggaaaggcaaagatcgagctggaaacttatatccagatggcatattttgaccggatcctgcgaagagccaatctccgtcttatgaccatgagtagcggtcagtacgaactgaaacgccaggagcagagcaaaaatcagaaagaaaaagcaggtctcgatctgaatgtcatagatcactataacggaacggaacgaagcgtaaagacattgtccggtggggaatccttccaggcatcgttatccctggcgctgggactttccgatgagatccaggcctcagccgggggaatccggctggattccatgtttgtggatgaagggttcggttctctggatgaggagtctctggagcaggcattaaaagcgctgaacagccttgcagatggcagacgtctggtagggattatttcccatgtttccgagctgaaggaacgaattgacaataagatcatcgttaccaagcaatgtggcggagaaggtgtgggaagcagtatccggatacagtaacgcagaaataagataaaaataagataaaaaaactccggccgggatgacatatatatgtatcgtcctggtcggagcttcttatatagctttttatttatacagaaggtatgttatcagagaatcagtctttctgatagtttttcttctgttccttcttagcttcgcaggtaagctcaacaccaagcttacggaagctgatcacatccacatcggaaagcattacggaagtatgagcctggcatccacggagattcgggatctgttccagggcaaggcgtgcggcatcgctggttgcggcacttatggaaagggcgatcaggatctcatcaatgtgaagacgtggattcctgcttcccagatatttggtcttcagctgctggatcggatggatggcatccggagagatcacatgaagctcgtgatcgattcctgccagctctttcagggcattgagaagaagagctgcggatgcgccgagaagatcggaggtttttccgcatacgatctttccgtcaggaagttccagagcggcagcagggccattggttgctttttctttttcgagggcagccggaacaaccttacggtcagtgatctctgcatgagcctgctggagaagaagctcgatcttacgtacctcattctctgtgccggagccggaaaccagagcgttcatgctcttataataacggcggatgatctcctggcgggaagcctcctggcatacttcatcgtcaacgatgcagttacctgccatgttgacacccatatctgtcggagatttataagggcagctgcccatgatcttctcaaacatggcctgtacaacagggaaaacttctacgtcacggttgtagttgacggtagttttgccgtaagcctccagatggaacgggtcgatcatgttgacatcgttcagatctgcagtggcagcttcgtaggcaaggtttaccggatgtttcagaggaagattccagatcgggaaggtctcgaattttgcatagccggcttttaccccacgtttgtattcgtggtaaagctgggaaaggcaagttgccatctttccgcttcctggtcccggtgctgtgatcacgaccagaggtctggtagtctcgatataatcattctttccataaccctcgtcacttacaataaaggaagtgttgcttggatagccggggatcaggtaaagcttgtagacacggattcccagtttctccagacgttttttgaagagatcggcgctttcctggccggagtactgtgtgatgcatacgcttcccacatacaggccacggcttgaaaactcatccataagacggagcacatcttcgtcataggtgatcccaagatcgccacgtattttattcttgtcaatgtcattggcactgataacaataacgatctccgcctgatcagaaagctgcatcagcatgcggagcttgctgtccggttcaaaacccggaagaacacgggatgcatggtagtcgtcaaacagtttgccaccgaattcaagataaagcttgttgccgaactgaccgattctttcacggatgtgttctgactgcattttcagatatttgtcattatcaaaacctattttcatttgtctgatttcctctcctctttaattttccaattcactgggaacagtatactacaactttacgttcactggcaatatccagtgtggtgttttttcgatggtatttttgtaatctcgcagttgatttatatggtttttctctttataataaagaaatgacaagaggaggaaaaaaatgaataatcaactgaataatgatcaggacgggaagcgacctgacaacaaagatcccaggcagggatcaggtaagaatcatcagtcgattctggcttttctgatatgcctcctggtcacactggtgtgcttcgcgttgtttaccaatatgctgaaggataacagcagtgagatctcctatgataaatttatcgatatggtggataaggaccaggttaaggaagtaacgatccagtccagtacattgacgatcgtacccaagaaaaagaattccaagtacgaggatatgagctattacaccacgaagaccgaagacagtacagcacttaccaagagactggaaggaaagggaatcaagtttgagaccgatccgccggatgtttttggtgaatttgttgcaatgatcctgagcgtggttctgccgacactgcttctgttcggacttctgatgttctccatgcgccgcatgaacaaaggcggcgggatcatgggcatgggcgtaggcaagagcaaagccaaggcatatgtgcagcaggaaacgggcgtttcctttaaggatgtggcaggtcaggatgaagccaaggaatctctccaggaagttgtggattttcttcacaaccccggaaaatacacagccatcggagccaagctgcctaagggcgcacttcttgtaggccctccgggaaccggtaagacattacttgccaaggcagttgcaggtgaagcgcaggtaccgttcttctctctttccggctcggaatttgtggagatgtttgtgggtgtgggtgcctcacgtgtccgtgaccttttcgaggaagccaagaagaatgctccgtgtatcgtatttatcgatgagatcgatgccattggtaaaagccgtgattcccgctatggcggcggaaatgatgagcgtgagcagacattgaaccagctgcttgcggagatggatggctttgatacatccaagggacttctgatccttgctgcgacaaacagaccggaggttcttgatccggctcttctccgtccgggacgttttgacagacgtgtgatcgttgacagaccggatcttaaaggaagggtggatatcctgaaggtacatgccaagaacgtacttctggatgacaccgttgattttgaagctattgcacttgcaacttccggtgcggtaggctctgatcttgccaatatgatcaatgaggctgcgatccttgcagtcaagaagggacgtaaagctgtatcacagaaggacctggaagaatccgtagaagtagttctggtgggaaaagagaagaaggaccgtatcttaagcaaacaggaacgccggatcgtatcctaccatgaagtcggacacgcactggtaaatgcactccagaaggatgcggagcctgtacagaagatcaccatcgtaccccgtaccatgggagcactgggttacgttatgcaggtacctgaggaagaaaaatatctcaacaccaagaaagagctggaagctatgctggtaggctatcttggcggacgtgctgcagaggagatcgtttttgacacagtcactacaggtgctgccaatgatattgagcaggctaccaaggtggccagagccatgatcacacagtatggtatgtctgagaagttcggactgatgggacttgccacacaggagaatcagtatctcagcggaagagcagttttaaactgtggtgacgataccgcaacagagatcgatcatgaggtgatgaagcttctccaccattcctatgaggaagccaagaggatccttggaagtcacagaacagagatggataagatcgcggaatatctgatccgcaaggaaaccattacaggtaaagagttcatgaagatcctccgtgcagttcagcagggcctggatatcccggaggatctggatgatctggtactttccgaggatgaaaaagaagtgtccaataaacaggacattgaaacgattgcagaaaataacgagactgcaaaaagtacggaatcggttcagttcagaccggagatatccggacaggaactgacagaggatatgcaggcaccggagaaaacagaagaatctgctcagacaacagatgctgatcatacagaaacagaagaaaagccgggatcacaggcataaaacagatcataagaaaaccgggagaaatcccggttttcttattactgtaatagcaaaacaggagaataaagtatgttcataatcgaggaagaattaaagaagcttccggcaaaaccgggagtttatatcatgcatggcgagaaagacgagatcatctatgtgggaaaagccataagccttaagaatcgtgtgcgccagtatttccagagcagtcgtaataaaggtgccaagattgaacggatggttacacatattaccagatttgagtacattattacggattcggagctggaagcccttgtgctggagtgcaatcttatcaaggaacatcgtccgaaatataataccatgctcaaagatgacaagagctatccgtttattaaggtgacagttcatgagccatacccgagagtgctttttgccaggagaatgaaaaaggacaaggcaaaatattttggtccctatacaagcggcggagcagtaaaggacgtgatcgaactggtgcggaagctgtatcaggtacgctcctgcaaccgcagtcttccgagagataccggaaaggaccggccctgtctgtactatcatatgaagcagtgcaaggcaccctgccagggatatgtcagccaggaagaataccggaagaatatcaataaggtgatcaaatttctgaatggagattttcaggacgccattagtgagctgatggaaaaaatgcagaaagcttcggaggaaatgcgctacgaagatgctatggaataccgggacctgatcagcagtatccggaagatcggggaacggcagaagattaccggctacgggcaggaggacagggacatcattgcagtagccatggatgacagtgaagacctcagggatcaggatgcggttgtccaggtattttttatccgggatggcaggctgatcggcagagatcatttttatctccgtgtggcaaagggcgatacaaaggcgcaggtcctttccagctttctgaaacagttttatgcgggaacgccttttatcccatctgagatcatgctgcaaagtgagattgaagatgcagatatcatcgaggagtggctgtcaggaagaagaaagcagaaggtacacatccgggtcccgaagaagggaacaaaggaaaaattggtagagcttgccctggaaaatgcccgtatggtacttgccaaggacagagaacggatcaggcgggaggaaggacgaactatcggagctgttcacgaggtggaagaatggctgggcttgaaaaatgtggtgcgcatggaagcctatgatatttcaaatatcagtggctttgagtctgtgggatccatggtagtttatgaaaaaggccgtcccaaacgcagtgattaccgtaagttcaagatcaaatgggtacagggacccaacgattatgccagcatggaagaggttttgacccgaaggttcactcatgagagtaacggagaatttgacagctttgcaaggcttccggatctgatcctgatggatggtggaagagggcaggtaaatatcgctctgaaggtgctgaatgagcttgggataagcatcccggtctgcggtatggtcaaggacgatcatcatcggacgagaggcctgtatttcaacaatgtggagattcctattgacacatccggcgaaggctttcgcctgatcaccaggatccaggacgaagcccaccggtttgccattgaataccatcgttccctcaggagcagggaacaggtccattctatcctggatgatatcccggggatcggtgataccaggaggaaagcccttctgcgtaaatttaaatctgtggaaaatatccgggatgcatcggaggaagaactggcacagacagagagcatgaatgccagaagcgcccgtcaggtctatgaattttttcataaatcctgatgctgcattgcagtttcagcagtgattgtgtataattgaagataaggtgtctcacgccccggtaaaacggcagtgagaatgcaaactttcagcgaaaaggagacaaaagtatgaagggtgtacagttgacaaagatggtacaggaactggagcttaataatctgactccggagatcgacctgtcaggcatcgtgatcaagactgcggagatcaacagacctgcgcttcagcttaccggatatctggagcattttgccaatgaacgagttcagatcatcggatatgtagagtatacgtatctgatgcagcttaatgaggaggagagacgttttaaatatgaacgtttcatttccagcaagatcccatgtgttattttcagtaccatgacccgtccgtctcaggacatgatcgatctggctgttaaatataatgttccaacattcgtgacagaaagaacaacatccagcttcatggcagagatcatccgctggctgggcgtgcagcttgcaccatgtatttctattcatggtgtgctggttgatgtttacggcgagggaatcctgatcacaggtgagagcggtatcggtaagagcgaggcagccctggagctgatcaagagaggtcatcgtcttgtcagtgatgatgttgttgagatccgtaaggtcagtgacgtaacactggtgggatctgcgccggatatcacacgtcactttattgaacttcgtggtatcggtatcatcgatgtaaaaacattgttcggtgttgagagcgttaaggatacccagtccatcgatcttgtgatcaagcttgaggagtgggacagagacaaggaatacgatcgtcttggactgcatgaggagtatacagagtaccttggaaataaggtagtatgccattctcttccgatccgtccgggccgtaacctggcgatcatcgttgaggcagcggctgtcaaccacagacagaagaagatgggatataatgcggcagaggctctgtacaagcgtgtacaggcaaatcttgcgaaaaagagagaaaatccagatgacgaagaataagagagggtaagaaatgagaacatattgttttggaatcgatgtaggtggaacaactgtaaaatgcggacttttccgcacggatggtactcttgttgagaaatgggagattccaacccgtaaagaaaacaagggagatcagatccttcctgatgtggcagcagcagtaaatgccaagatggaagaaaagggtatctccaaagaggaggtggaaggcgtcgggatcggtgttccgggaccggtaaactccaaaggcgaagtatcacgtgcagtaaatctcttctggggatataagaacgttgtgggagagatggaagaacttacaggtcttcatgcggaagccggaaatgacgccaatgtagcggcattgggagaggcatggaagggtgctgcagcaggctcctccgatgtgatcatggtcacacttggaacaggtgtaggcggtggtatcattgttgatggaaagatcgtgaccggacatcacggagctggcggtgagatcggacatgccaatgtggatcatcatgaaacagaatcctgcaactgcggaaacaggggctgtctggaacagtatgcttctgcgaccggaattgtccgcatggcaaaaaaagagcttgcagcttccagtgagaacagtgttctcagagatgccggagagatttcagcaaaagcagttctggacgcatttaaggagaatgatccggtagctgtagcaaccatggaaaaggtcggagagcagctgggtggtgctcttgccattatttgctgtgtgacagatccggagaccattgttatcggcggaggagtttccaaggccggacagccgcttattgactgtattcggaaatattacagagagtatgcttttgaatcctgcaaggatactcctatcgtgatcgcgacacttggcaatgatgcaggaatctacggtgcagccaagatggtactttaaccgaactagggaagttccctgcttcaattgcgaaaagtaataagcggtgggtgggacttgcctgaactgataaactgcgagacagtaagaagttattaaaagtaaaaaaagtggtttccatatttcaggaaaccactttttttatatgttgtttatgaaagatacctataatggagatcattcataatattctaccggatcttcgccggtgtcatagctgccgtcatcgccaccggtattattgttgttatcatagctgccgtcatcaccaccggtgttgtcatctgttccggaattgtcagtatcatcaccggtattatcggaaccgtcatcggaattgtcagtattgtcagtgtcggtgctgtcagtactgtccggagctgcgcttggaatcgcttcagctgctgcatcggtatcggcgtccgtatcttcgttattataatagtcctcttcatcgtaatcgctgctgccgtagaaatgctgatcacagtattcggtgggaagactggagatatcaaaatactctgtgatagtcgggcatccggatctgggaagaagaccggtttctgcgcagacactggctttttccacactggaaggcatatcgaaatctctgtcctccaggccctcgtggatacgggtcataacctttttccagaggtttttgtggaagttacgggcatcttccggaattttttcgttgttgtcatagccggaccatactgcacaggtgtagtacggtgtgtagcctacgaaccacaggtcattgtagtcctctgtagtacctgtttttccggctacagtcatattgtccagctggcaggcggtaccggtacctttttttacaacgtcttccatggcgcttgtaagaagataagcggtactgtctttgatcacagatctggaaacggaggagttctcgatcagaacatttccgtcatgatcaaggatctgtgtataatagatcggtttgatatagttcccgccattagcaatggctgcatatgcagcacaaagttccacgttcttgacacctttggtgataccgccaagagcagtagccaggttggcgtcactccagatatttccgttggcatctttatctgcctcagttccgtgagctagtgtggtgaaaccgaaatcatccagatatttaaggccgagagccggggtaacctgctccaggcatttaacagctacaacgttgatggaattctggatcgctttgcggatggtggtctcgccgccgtagcttcttgaggcgttgttgacaggagatccgtccgggtattcgtaaggctcatccataaaggttgtagcaagtgtatcgcctttttcgttcaacgcaggtgcataggtggaaacgatcttaaaggtagaaccaggctgtctggtcgtatcagtggcacggttcagggtcaggctggctgttttttcgccacggcctccgatcagggcttttacgtaaccggtatgctggtcaatgacagtcatggaagactgtggctgtggcgcaaagtttacacgctcagatactacggtgcttccgtctgccaggatgttagccttgtattgatccacatactgctgaccttcctcaggagaatcaaagagaagatcaaattccggatcctgatcacggaaatacagctgcagcatttctttgctgtagtttgtctgttttccatccgggctttgtacagtcagtgcataatccagttcatactgaacattggccggatagttatcagggtttgcatattcctcatcaaggatctgctgcatgttggaatccagggttgtcatgatcttcagaccaccgctgtaaagaagattggtagcctgtgtcttggtatatcctttaatgttcatcaggtcgctgatgacctgattggtaacctcatcttcgaaatacgtgtaaacggtactttcttcttcggtgttctcaagctgtgcggcctggatacgggaataaacgtcatcattcagtgctgcattatattcatcctgtgagatgtaattctgatccagcatgtgatccaagacttccttccgtctcttggagtttgcctttggattggtgatcggattgaatttggtagggttctgcgtgataccggcaagggtggcacattcagaaagattcagatcccatacgtctttgttaaagtattttttggaagcggcctgtacaccgtaggaacctgcacccaggttaatggtattcaggtaattctcaagaatcacatttttgtcatattttttttcaatctgtacagcaaggtactgctcctggaacttacgtgtgaaacgttccagctgtgtggattcgttggtccagtcagtgaaaacattattcttcagaagctgctgtgtgatggtactggcaccctcggaaaagttaccggtggtgatcgccttcattccggcacgtgcgataccgcggacatcaataccgttatgttcataaaaacgctcatcctcaatggctaccactgcatgctgcagactgaccgggatctggtccagggagaccgggagacggttggatgtaggggctgaaagctgtcggatctgtgttccctggtcatcatacaggaaggttgcatatccgagaggtgaaatatccacatcgttgacgtcaggtgctccggcgatcacgccccggaaggagccgataccaaggcagacaaccatgacgcagactgcgatcagagctgtaaataaaacccggataaacgaaacatgtgctcttttttccagcatggaagtacgggagatcagagcattccgcttcttggaagtggatctttttccgtagttcataatattcctcctttataatccgtttcattataacaaatatgagatgccaaataaagccttaaaaaaaatttcacaattcatgatatcttatacattgtgcaatgaagataattattatacaataaagaaaactctgcctgaaacagagggttggatatagataacggaggcgtaaaccatgctggaacattataaaaccatatacgaaggcggcgaaggcgaacttgtggaaaaaaaatcccgtttcatcgcaaccgtccgtcctgtggaaacagaagaagaggcccttgcctttatcgaagaaatgaaaaaaaaatactgggatgcacgtcataactgctatgtatattccgtagggatgaaccgggaagccacccgctgcagtgatgacggagaaccatccggaacagccggaaggcctatgctggatgtgcttctgggagccgggatctataatgcggccattgtggtgaccagatattttggaggtgtccttcttgggacaggagggcttgtgcgggcatattccggtgcagtccaggcaggactggcggcaagtaccgtcattgagaagcatcatgggatctctcttcaggtgacgacggattatacagggatcggaaagatccagtatatcgcaggagaaagaagtttgccgatcctggattccgaatataccgacaaggttgtcctgaagcttcttgtgccggatgatcaggtcgaagaggtgaagaaggcgatcacagaaggaacaaacggaagagccggacttgagaaggatgcagaactgtattttgcgaaagtaaacggagaggtgaagaccttcgaaaagtaaaagaaaagagaatgtcagtataaaaataccccgggaagagggcagatgatctgcgttacagtctgctcttcgcggggcttttttatttcagaaaattatgcctgtcagcatttctccggttccggataatccacaccaaaggtatcaacagtcatggagctgatcttctgctcgtcaagaggacggtcactgtagtccgtgtctgtctctgcgatagcatttacaacatccatgccctcaatgatctgaccgaatgcagcatagcttccgtcaagatgcggagcagccttgtgcatgataaagaactggcttccggcagagttcggattcatggctcttgccatggagagaacaccgggtgtatgcttcaggtcgtttttgaaacggttctgggagaactcacccttgatgctgtatcccgggccacccataccggttccgtccgggcatccgccctggatcataaagccgttgatgacacggtggaagatcaggccgtcataaaagcctttttttataaggctgatgaagttatttactgtgttcggggcaacttccggatataattccgctttcattacatcgccattatccattgtgatggtaacgataggatttgccatagttttcgcactccttttcaaaaagtattgtatttcgctgttcgctctattataatatgcaaagaataattgtgcaagaaaaaggtggaaaatatggtcatagaaacgcatgatcctgaggaaacattcgaggtcggaaggacgatcggaatgaatgcgaagccgggacagatctacacactgacaggcgatctgggagttggaaaaaccgtgttcacacagggagtggcagcaggtcttggaattacagaacctgtaaacagccctacgtttaccattatccaggaatatgaagacggacgtctgccattttatcattttgatgtatatcgtatcggggatctggaagaaatggaagagatcggatacgatgattattttttcgggcagggaatctgtctgatcgaatgggcggaactcattgaggagatcctgccggaaaaaaggatcgaagttaccattgaaaaagatcttgagaagggctttgaatacagaaagatcaccattgaggagagaggagaaaagacagaatgagagttttggcactggacagttccggaatcgtggcatccgtagccgttgtggaggacgatacactggtagcggaatatacagttaattataagaaaacacattcccagactcttcttcccatgctggatgagatcgtgaagatgacagagctggatctgaagacgattgacgctattgcggtagccaagggaccgggctcttttaccggactccgtattggctctgccacagccaagggacttggacttgcccttgacaaaccactggtcgggattccgactgtggaggcactggcctataatctctatgatgtaaacggactgatctgtccgatcatggatgccagaagaaagcaggtttatacgggaatctatcgttacgaggatcacaggctcatgacggtaaaggatcagatggcagtgggaattgaggagcttctttccatgctgaatgagatgggagaaaccgtaacattcctcggagacggagtcccggtatttaaagatatcatcgcagataagcttactgtaccgttttcttttgcaccggcccatctttccagacagagagcaggtgctgtaggtgcacttggtgtcctttattataaagaaggcagaaccgagacagcggctgagcacaaaccggattatcttcgtgtttcacaggctgagcgggagcgtgcccagaaactgaaaaaaggatcagaaggggaaaacgcatgatcttaagagaaatgcttgtggatgatctggatcaggttatggagatcgaagaggaacttttttcagtcccctggacaaaagagggatttctgacatttcttatgaaagagaatgggatgtttcttgttgtggaagaaaagggccggatcctgggatattgtggtcttcttacggtgctggatgagggggatgtgaccaatgtggctgtccgcagagatcgtcagagagagggaatcggaaatttccttatggaaagtatgatccgtctggcagaagagcgtgggatcaccatgatccatctggaggtccgggcaggaaatgagactgcgatccggctttatgaacgtcagggctttgtgcgggatggcctgcgaaagggatactatacagatcccacagaggatgctgttcttatgacacgcaccgcagtttctgaataggcttacccgggagaggtacttgtctgtacgggataagtatgctaaactttgccacagaacaggaaaagaggaaaaatatgttagatgtttgtttacttggctgcggaggaatgatgccgctgccacgcagatggcttaccgcactgatgacccgttataacggcagcagtctgatgatcgattgcggggaaggcactcaggtggccattaaagaaaagggctggagcttcaagcctattgatgtgatctgttttacccattatcatggggatcatatcagcggacttccgggactccttttgactatgggaaatgcagaccgcacagaaccgctgactctggtaggcccaagaggactggaacgtgtggtaagcgcacttcgtgtgatcgcaccggagctgccctttgaaattaaatttatcgagatcacgaaaccggaggaggttctggaactgaacgggtaccggatcactgcatttcgggtgaaccataatgttacctgctatggatatacccttgagatcctgcgccagggaaaattttctcctgacagtgccagagagcatgagatcccgctgaaattctggaatccgctgcagaagggacagactgtggaggatgaaggaaggatctacacaccggatatggtgcttggtccgccaagaaaagggatcaagcttacctataccacagataccagaccgacagagtctattttacgtaatgcaaaaggttccgatctttttatctgtgagggaatgtacggtgaagatgacaagatcgaaaaggcaaaaggctacaaacacatgacgtttcgtgaagcggccactcttgcccgtgatgcggaagtggaggaaatgtggctgacccattacagcccttctctggtacgtccggatgattacatggatacagtacgtgagatctttccgaaggcatggccgggaaaagacgggaagagtgtggaactgaattttgaagaggactgaaaaaatgaaagatacattaattcttggtattgagagctcctgtgatgaaacggcagcttccgttgtaaaaaatggaaggactgtcttatcaaacgcgatttcctcacagatcgagatccataaactgtacggaggtgttgtaccggagatcgcctccagaaatcatatagaaaggatcaaccaggtcatccaggaagcgctggacgaggcaaatgtcactctggatgatattgaggctatcggtgtaacctatggaccggggcttgtcggtgcacttcttgtaggtgtggcagaagccaaggctattgcctatgcaagaaacctgccactggtaggcgtgcatcatatagagggacatgtttctgccaattatattgagcatccggatctggaaccgccgtttctctgtgccattgtatccggtggacacacccatcttgttattgtgaaggactacggtcagtttgagatcctgggccgaaccagagacgatgcggcaggtgaggcatttgataaggttgcacgtgccattgggctgggatatccgggaggaccgaagatcgataagctggcaaaggaaggaaatccggacgctatcgagtttccacgtgcaaaaatcggcgaaaatccatatgatttcagcttcagcggcgtgaagtccgcagttcttaattatttaaacggggcaaaaatgaaaggtgaggaagtaaaccgtgcagatatcgcggcatccttccagaaggcggttgttgacgtactggtagagcataccatgcaggcagcagctgattttggcatgaaaaaggttgccattgcaggaggtgttgcttccaacggagcacttcgcactgctatggaaaaagcatgtacagaacgtggatacaaattttaccgtccgtcaccgatcttctgtacggataacgcagcgatgatcggtgtggcagcttactatgaatatatcaggggaacacgccacagctgggatctgaatgcggttccgaacctgaagcttggcgaaagataaaagaatccggggtaattgatcatgggagagtgcagaaatacagctattgttctggcagcaggccagggaaagagaatgcacagtaaaatacagaagcagtttatggagcttgacgggatgccggtgctctgttattctctgcgctgttttcaggaaagtccgttgatcagggatgtgatcctggtaacaggggaagagtatgtttcctggtgcagagaagaaatcgtggaaaaatatggttttacaaaggtttctgctgtagtatccggcggaaaagaacggtacgattctgtttatgaaggacttcgtgcgtgtaaagacacagagtatgtgctgatccatgacggtgccagaccatttattgatcatgggatcattgaaagaggacttatggcagcagcacagacaggtgccagtgttacaggcatgccttccaaggatacagttaagatcgcagatgaggatgggaatgtcagtgaaactccggatcgcagcagtgtatggatcgtccagactccgcagatctttcagtacccgctgatctatggcgcatataccagcattcggcagaaggaaatgaccggaattacagatgatgccatggttgcagaacatgagaccggggtgaagatccgcttttcagaaggttcttatcgcaatatcaagatcacaacaccggaagatctggtggttgcggaggcatttttgaaggaaaacagagagtagaatagagagtagaacagggtgaaaatcccagtaaatatggacatatagcagaaattgaagctatatgtccaattttttgaaaaaaatatcaaatttgttattgacaggggagatatttgatgatagaatacaacatgcgctgacaaaacagcacaaaaaatgttgaaaaacattatatggagagatatcgaagtggtcataacgaggcggtcttgaaaaccgtttgtccgcaagggcgcgtgggttcgaatcccactctctccgtttgtcaaatacagaataaaaacttttaaaaaaagttaaaaaagtacttgacaacataaaagatacgagatataatatcacctgtcgctgagaacggcagagataaatatcggaactacttagtaagtagggcaatttggagaagtacccaagctggccgaaggggctcccctggaaagggagtaggtcgttaacgcggcgcgagggttcaaatccctccttctccgctttaatttttttgaagactaaatgcttcaaaaaaattaaaaaagttcttgacaagcagttgagaatgagataaaataaacgagctgtctgagagacagacacaacaaaccttgataactaaacagtgaaacacatacg

SEQ ID NO: 243 - DNA, 2036 bp, Unknown
  gut microbiota DNA sequence
attaatataggcatggctctcaaaggaaagacagtaggaaccttccttgtgaccaatctccaccggagttcttcccatcttgtcacgggctgcataaattccgtcttttgtcataagaagcagtgtcatggagccgtcgatcagtccctgtacgtactggataccttccacaaaattatccttttcacagatcagggctgcgatcagttctgtcacattgacagttccgttggtcatctcctgaaaatgtaccttggtcgtatcgtacatccgctgcagaagttcatcataattgttgatctttcccacaaaagtaagggcaaagcttccaattctggaactgaacagaaggggctgcggttcataatcggaaatacatccgattcccatatttcccttcatggaacctacatctccgtcaaattttgtacggaaaggtgtgttctcgatgttgtggatggcacggtcaaatccatgttctccgtaaacagccataccgccgcggcgtgttcccagatgagaatgataatccactccgtaaaaaagttccagtacacagtcgtcttttgatgctactccaaaaaatccgctcataatgtgctcctctctgcttccatagtattaacgattcctggtatcgttcgtacatccataatcgctatcagtatagcataagagaattgtaaataacaatcaattcggtggatattcctgctttttcagaataaattataatgatattagccggatttataaaagcagaaagcattttatgcgtgaggcaaatgttccgtcagttccaaagtgcgataaacagattcaagtaaccggcaaaagtcagccatgccagatacgggaccatcagatatgcagcattccgggaaaactccccgaatgtgcagatacagcaatatacaagtccccacagaaaaataagccagagaaatgcaaagccataccatcctgccccaaagaagaaaaacggccataggaaattcacagcaagctggatcccatataaagtaagagccttatctctggctctgcttttgggcctggatgcgatcaggaacgaagcaatccccatcatgataaaaagaatcgtccatacaaccgggaacagccatcctggcggcgataagggaggcttatttaatgttgcaaatactttcattccgtttctggtaaaaaaaccggaaacagctccggtcgccagaggcactgcaatgcaggtgatcagttttctggtatcttttttcaaaaatatccccctttctggtctgagaagatctgcggacagcattcattttctctgtttattatatttcaggatgccggtttctatacaatcatatacaaaaaagaaacagctctgtttttatgcagaactgtttctttttgtagatcgtttaaaacttttgatcatttaacacaggtacacgtttttttatattcattactcctgagtgattcccttgaacttgtaaccggcttctttgatcacttcttccacttttgcctcgtcaactttctcaggtactgtgaatacagttgttccattctcgtgggaagataccacatcctctgctccgaaagccgcctgaattgctttgtttacgtgtgcctcacagtgtccgcacatcattccttctacattgactgttacttttaccattgttttgttctccttttcttcttttttattttcatcatgactgatgtttaatgttaccggatttttgatcgccttgtctctggctgtgttgtggatcttaaacagattcaggcgcagcgcatttgttacaacacagaaactggaaagactcatggctgcagctccaaacatcggattcagtgtccatccgaaaatcgggatccagacgcctgctgccagcggaataccaattacattatagaaaaatgcccaaaaaagattctcgtggatattccgaagtgtggcacggcttaaacgtactgctgccggaacatcgcttaactggctcttcatcagaacaacatctgccgcatcaatggca

SEQ ID NO: 244 - DNA, 4433 bp, Unknown
  gut microbiota DNA sequence
ttttttgcctgtgtacttctcaataaatttcgcatagtcgccgtccggcacaaagcagatatcctgactgtcatgctttctggcattgataaagccatgtttttcggcaatgacacgaacctggtccttccggagacctccaagcggaagctttacatgtgccagctgttcctgggtcagcatatagagaacgtatgactgatcctttgtatcgtccactgcttttttcagaaggtagcggtcccgtttctcatcgtactccactcttgcataatgtccggttacaatataatcgtagccgatctcctgcatgcggtgaaacattttatcaaatttcagatatcggttacagtcgatacatggattaggggtgcagccgttttcgtaggcatctacaaacctgtccataacctctgtatggaaatctgcggtaaaattaaacacgtagtaaggcatatccatctgataggctacgcttctggcatcctcaacatcgtccagggaacagcaggtcttttccctgtggacaccgatatcttcgttgttgtaaagtttcatggtagcgccgatgcactcgtcaccggattcctttgtcaaaagagctgccacggagctgtctacaccgccgctcattgctatgatcgcttttttcatttatatcttaacctttcctgatgattgatgatttctcagctttgcagtatgtattctcttacggttactgcaatttcgcatttattataatatggcagttattctttgtccacgatttttcacccggaacctttgctttgcttctttcctgtaggctctctttggtatataatagaaaatatttttcagaaaaggatgtgactatatgaagctttccctgttttccacgctgcgaggatatcggaaggaataccttcccaaagatattttctccggcatcatcatagcagctgtttccatccctatctccatgggatatgcccagatttccgggatcccggcggtatacggactgtacggttctgttctgccgatccttttgtttgctctattttccacttcaagacagtttatcttcggagttgatgcggcacctgctgccattgtaggtggtgcactgtctactcttggcattgctgcagagtcagaagctgccatggattatgttcctgccatcgcactttttgcaggtctgtggctgtttatcttctttctgctccacgctgataagatcgtggactttatctccacacctgttatgggcggttttatcagcggtatcgcagttaccatcatcctgatgcagatcccgaaacttatgggaagtcctgcaggatccggagagctcctggaactggcagagcatatcttcgctgccgccaaaaatatcagctggctttccctcttcatggggcttggtgctctggtgctgatccgcacatttaaaaagctggcgccgaaattccccatggctatcgttattatggctctgggtgttctttccaccattgtttttcatgtagacgaaaaaggcgtagtcctcctgcagtctgtagaacgtgggcttccctccctggtgatcccggatttcggaaatgttgatctgacccaggcggcaggccgcggtcttatggttgctgttgtcattatggcagaaactcttcttgcagagaatacctttgcgttccgcaatgattataagctgaacgaccgtcaggaaatcctggcctgtgccgccggaaatattgctgccgccgcagtaggctgctgcccggtaaacggcagtatctcccgcacctccctcaatgaacagtacggtggaaaatctcaggcggtttccatcactgccgggatcaccatggctctgatccttcttttcggcaccggttttatcggatatcttccggttcctgtactgacagccattgtgatctctgctctgatggatgtggtggaaacccatctggctgtacgtcttttcaaagtaagccgtacagaattctacatcttcatggctgccggtttcagtgtgctctgtcttggaaccatttatggggttatcattggtatcctgctctctttcgtagctgtgatcctgaaggccaccaacccgccgcgctccttccgtggtatgatccctggaagagatgcttattttgatctgtccaaaaaccgtttcgcctaccctattaagggcgttgtgatctaccgtttcagtgaaaacctgttttttgcaaatataaagatttttcaggaagatattgagaacagcatccgaaaagacaccagggtagtgatcgtagatgccagtgctatcaacagcattgatgtcacagcagcagaccgtctggatgccatctccgcaagcctgaaaaaacgtgggatccgtttttacctcacagaacattccacccagatcaatgaccagctgcgtcagttcggcatcggtcatatgatcaaggacggtatggtccgccgtaccattcttgctgctctgcatgacgcagggatcgaagccccttatgaactggatgttccaaaggaagacgagacaaagcttctgcgccgcagtatcgcttttcttccggcagaggaagaaaataccctggaagagttcgcctgggcttttggtgatgatgcagtaaaagagattgaagaatctgtccatcacattattgaacagctgcatcagatcccggatatccaacgtctctccgaagaaggtctggaagagcttctggataactggcatgggctgggtgttctggatgaggatgaactgcttcgaagaattgaattacatatggatgagctgcctgaggaattaacttccgaccggaaactgatccttcatcttctagaaaagcgccgtggcaagctgaaagaaaaaatccttgccgagcatccggaagtcctggaacgactggaacagcgccggaaaaagctggaggaacggctggaaaagcagaatccggaagctgttcagaaatggaagcactggaaggaagagcatctcaaagactgatttctgcatacatcccctttccaggtccatgatcaaattgcagggtttcctgcatatttctcacagatattgataaaatcctgcatcacggcagaaggcctgcgatcctttttccaggcaagaaggatcctggtcttcagcttctcttcttcaatgatgcggatcggaagatctgtacagagatcttccatggatcttggaaaaacggcggttgcaagaccttcctgcacccagagcatggcgtctctgggatcatcgcagacacagaaaatatccggctggagatttttttctccaaaggctttcatcagaaattcttcgtaccgccggtaaataatgagagggcatccagtcagctctttaaggctgatgccctctttttttgtctcattttccgggatctccggaggaaggaccgcgatcatgggttcctcatccagttccagataatttaaaccttccagcttgataggtgtacgcactaccgaaacatcaatgatcccatccatcagataattcagaagggtaaaggtgatcgcatcccttacctcaaagtttacatcacaattttccctggaaaatctggaaatataaggcataatggtggtcactgtggttggcgtgatcccgatacgtaaaacctgttttttccctgctttggatacttccagttctgtggaacgaacgtagctcaaaatgttctctgtcctgtcataaagaagctttccggcttctgtcagtgtcacgcctgccctggtccgctcaaaaagcttcaccttcagctctgcttccagctgcttgatctgatagctcagcggcggctgggacatgttcagtctccttgcggcttcattgatgcttcctgttgctgcgatctcatgaaaatattccagctgtctgatttccatatataaatccttctttctttatctggtatataacacaggcaaaacccatctactgcttattgcttttcgctatcccacaaagtactttcttaattcggttaagaaatactatatctgcaatactttgtaaatactatgaatatctttcccatgcaattatccgaaaaaccatacttctatcatcccacagatttccgtcccaggcaatagcaaaattatattatcatacattaaaaacaatattatacgtattatctccataggagtataataacagaggtttattatagaaaaataaggaaacggaggaagaaaaagaaatgcgaacacttgcaaaatatcttcaaaactacaaaaaagaaagcgttctggctccttttttcaagtttctggaagttgtatttgatctgctggtacctgtcgtcatcgcccagatcatcgatgtgggaattgcaaataatgaccacggctatatcgttcagaagttttttattctgatactgatg

SEQ ID NO: 245 - DNA, 14481 bp, Unknown
  gut microbiota DNA sequence
atggcaactggtggaaaccgacaatctgcagccaccgaaaaataattaatacagacacataaataaaaatagatcgttcaagctactacgatctttttttattgaaaaatcacaaaaagttatataaaacaaaccaaaaacacaaagaatacttttcacttaaagaaagttgtgctatgataatcaggcggaataatttcccattcaaacggatgaatgcaagtccccgcccacagtttattgcttcttgcaaccacataggagacttctttgattcggttaaaatattacagacagatataacatatctgaacatataaaatacaaaagaaaaagcagccatacagttgcgaaaaggaggagaaaaagatgtctaagaaaatcgaacgaaacgatccctgctggtgtggaagcggaaaaaaatataaaaaatgtcatgaagcatttgatgaaaaaatggaactcatgaaaaaaaaggggtatgcagttctcgaccatgatctgatcaagacacctgcacagatcgagaagatcaaagagagctgcaagatcaatgttgcagttcttgattatgttgcagagcatatcggaccaggcgtgacgacacagcagattgatgactgggtacatgaagaaacagtacgtcatggcggaattccggcaccacttaattatgaaggttttccaaaaagcgtatgtacatctatcaacgaggtagtatgccacggaatcccggatgaagaaattgtcttaaaagaaggtgatattgtcaatgtagatgtatccaccatttatcagggatatttttctgattcctcccgtatgttctgtattggacaggtaagtccggagaaggagaagcttgtccgtgtgacaaaagaatgcatagagcttggccttgaacaggtaaaaccatggaccccgatcggaaatatgggaagtgctgtacacaaacatgcagtggaaaacggctatacagttgtgaaggaaattggcggacatggtgtaggtcttgagtttcatgaagatccatgggtaagctacacatctaaggaagattcaggtgtactcatggtacccggaatgatctttactattgaaccaatggtcaatatgggatctgatgaaatctatacagatgagatcgatgactggacagtgaggacagaggatggtctgccatcggcacagtgggagatcatggtccttgtcacagaaacaggacatgaggtcctttgctggtaaaagccatcgaaaatccggaaaaaaagtccttgcaatgagaagttatctagtgtataatcacatatgttgtgaaaaaagatggtcctctgttaccatatgtgtattaagaacatccagtataattaaggagagaaagaaatgaacgaaattattaagaacattgagtccgctcagctgaaagctgaagtaccgcagttccgcgtaggagacacagtaagagtacacgcactgatcaaagagggaacacgtgagcgtgttcagatcttcgagggtacagtacttaagagacagggtggaagcacaagagagactttcacagtaagaaagagctccaacggtgttggtgttgagaaaacatggccgcttcattccccacatgtagttaaggttgaggttatccgtcatggtaaagtacgccgtgcgaaactgaactacttgagagatcgtgtaggtaaagcagctaaggttaaagagcttgtaaaataatttcataagtaaagaggcagggacaataacatttgctattgtccctctttttacatcagtgcgtatgcgtgtaaagacacatacaggggatagaatatgggattaaataagaagattaatatcgaaaatctgaaggaaaacagagctgtttccgaagcaagggagaagcttcgtgatgacaggacaagaggaatcgtgaaatgggtgtttgaaattattgtgaccctggtttttgctgtgctggttgcgatctctgcatttcagactgtgacattgcaggaaagtgccatggaacccacgtattctgtaagtgaaaagttttttgtaaacagggctttatataaggtcagttcaccaaaacgtggagatgtgatcgtttttaaaacaagcgccagtgactcggcagccctacatatccgacgtgtgatcggccttcccggggagactgttcaggttaaagacgggaagatctatatcaacggcaaggtttatgaagaaaacggagcttatcaggatatgacagatggaggacttgcaaatagtgctataactctggaaagcggggaatattttgtccttggtgataatcgcaataacagtgaggatagccgcttcagcgatatcggaaatatcagtaagaagtacattgtcgggaaagtttggtttacagtttctccgaaaaataaaataggttttataaaatagatcaaagtaaacagattaaagtatagataaatgaggtgaattatgaacgtacagtggtatccaggccatatgacgaaggcgaagcgtcagatgcaggaagatatcaagctgatcgatctgatcattgagcttgtagatgcaagagttcctctttccagccgaaatccggatattgatgagctgggaaaaaacaaggcgcgtatgatccttctcaacaaagcagatcttgccgatgagagacagaaccgtgcctggatggaatatttcaaagaaaaaggaatctatgcggtaagtattgattcccgcaataagggatctatgaaggccgtttctgcggcgatcacagaggcatgtaaggaaaagacagagagagaccggagacgaggaatcaaaaaccgtccggtacgtgcgatggttgcaggaatccctaatgttggaaaatcaacatttatcaatacctttgcaggaaaagcctgtgccaagaccggtaataaaccaggagttacaaaaggaaaacagtggatacgtctgaataaaagtgtggagcttctggatacccctggaattctctggccgaaatttgaagatcaggaagttggaatgcgtcttgcctatatcggttcgatcaaggacgatattctgaacatcgaagaacttgccctgggtctgatcggatatctgcaggagttttatccggcagcgatcagagagagatacaatgtagaagaagagctgaaaccgctggatatccttactgcagttgcgaaagcaagaggatgtctgaaaaagggcgaagagcttgattatgagaaagcatcccgtcttttgctggaagaatttcgttccggaaaattgggaaaagtgactctggagtttccaaaaggaccggaggaagcgtaatggaaacaatgaaagatatcaaggcgcgttttgcgtcagcgaaggagggcgaatataacgccctttttcgtcattatgaaaatgatgagagaagcggtgtacagaaactgatccagcagtatcacaaaaagcttcaggctctggaggatgagcgtgtacgtacagagagcatgaagaaatatgaacatgaatatgagcatcttggatatctttgcgggatcgatgaggtgggaagaggtcctcttgccggaccggtagttgcctgtgcggtgatccttccgaaagactgcgatattttatggctgaatgattctaagaagcttacagctaagaagagagaagaattgtacgatgtgatcctggagggagcagtttctgttggaattggaatggcaagtccggagaggattgatgagatcaatatcctgcaggcaacctatgaggcaatgcgccaggcagtgagcaggctttctgtacagccacagctgcttttgaacgatgcggttaccataccggaaatccggattccgcaggtacccatcatcaaaggtgatgcaaaaagtgtatccattgcggcagcaagtattgttgccaaagtgaccagagaccggatgatggaagaatatgataaggttcttccggaatacggatttgcctccaataaaggatatggttctgcagcgcatattgaagcactgaagaaatatggaccaagtccgatacatagaaaaacgtttatcacacattttgtataaaaatacttaagataccgacatcaaaaacagaaaggttttgtttatctgaaggaaaatagaagacagaagggcagctattatgaaggaattgctgcagcgttcctgcaagaaaaggggctgcagatcaaggaaagaaattttcgttgccgaagtggtgagatcgatcttgttgcgcaggatggaagatatctggtgtttattgaagtgaaatacagaaagaacggaaagagtggaagtcctttttcagcggtagggagagaaaaacagaggatcatcagcaaagtggcaatgttttatctgattgcacatggataccgggagctgcctccctgccgttttgacgtagtaggaattgatggagagaacatccactggataaaaaatgcttttgatttttgcagttgaaaggactggtcacataagatgaaaataaaatggtataaagataaacagctaatgaatgtaaatcagaagaacaaggttacctggcttacatatcctgcttttgagaaacttcccgggatcgtacatggcttcagtacccgcctgggaggagtaagccaggggatttatgaatctatgaacttaagcttcacaagaggggatgaagagtctgcggtgcgggaaaattaccgcagactttctgctgctatgggattttccatggaagatatcgtaacctctgatcagacacacaccacccatgtacgtgtggttacggaagaagacagaggaaatgggatcacaaaaccaagaccttatacagatgtggatggaatgatcaccaatgtgccgggactggtgctggcaacgttttatgcggactgtgtaccacttttctttatagatccggtacatagagctgtgggattatctcattccggctggagaggtactgtaggaaagatcggaaaagtgacggtggagaagatgactgaggaatttcagacagatccttcagagctttatgcagccattggtccttctatctgtcaggattgctatgaagtcagtgaagatgtgatcgatcagtttagagaggcgtttgaagaaaaatactgggatgtgcttttttacagaaaaccagatgggaaataccagctgaatctgtgggaggcgaaccgaaggatctttctggatgcaggcataaaagaagagcggatctcaatgccgggcatctgcacctgctgtaatccgctctttctttactcacacagggcttctcacgggaaacgtggaaacctgggagcatttattactgttcgttgacttttttcatgagatccatgatcttttcgttgctggaacgaaccttctcgacagatacatcatgattgatgatatcgatgatacttgcaagatatttgctcatgtttgcttcgatatagtatggacggtcaagaagctcaggaatacgatagttaaggttggttgtgatgactctgtccagccaacctttttcgtaatattcatcaaatttggctacgccatctgtaaacagaccgtaggttgtgcagacgaatacacgtccggctttacgctctttaagctgacgggcaacatccagcatgctttctccggaagagatcatatcgtcgatgatgacaacatctttgccctctacggaatctccgaggaattcgtgagcaacgatcgggttttttccgttgacaacggtggagtaatcacggcgtttgtagaacatacccatatcgactccaaggatattggaaaagtatacagcacgggacatggcaccttcatccgggctgatgatcatgagatgatcattgtcaagcttgaaatcagggacatttttgaccagtgctttcaggaactggtatgtggggaaaaagttatcaaagcccttcagcggaatagagttctgtacacgtgggtcatgagcatcaaaagtaatgatgttggaaacacccatggcacttaactcgcgaagtgcaagtgcacagtcaagagattctctcttggtgcgtctgtgctgacgtccctcgtaaaggaatggcatgataacgttgatacggtgtgctttaccggtggctgcggagatgattctcttcagatcctggtaatggtcatccggagacatgtggttctcatgaccgcatacgctgtaagtaaggctgtaattggtcacatctaccatgatataaaggtctgttccgcggacagattccttgatgtaacccttaccctcaccggttccgaaacgtgggcattcgcagtctacaaggaaagatttttctgcatatccctgtgggatgatggtggatttcttggcggctacaagttctttacggaatttaaccagctttttgtcaacctcctcggccagttcgcggcatccggcaagtgcggcgattcggatcggggcaacaggcatagacttttccagcaattctatgtttggcataatattcctcctaagtgtatgtcattaaaaattctcagtctatttataacatcagacccacgtgtcagtcaaggtgttttctcaaagtgttgatttttaagagcaaagttgttattatatacgggatagaaaagggagataatgatgaaattaagaaagcatatgatttccagggtgctgcccgacagtattgccgaggagctggggctggagccgggagacagacttgtgtctgtaaacggacagcctgtggaagatgtcttcgattaccggtatctcatgaatgaagagctcgtggtgcttctggtagagaagcctgatggcgaagagtgggagctggaggtagagaaggaatatgaggaagaccttggaatagaatttgagaacggaggactgatggatgactatcgctcctgttcaaataagtgtatgttctgttttattgaccagatgccgccaggtatgcgtgagacgctgtattttaaggatgatgattccaggctttcctttcttcagggaaattatgttacgcttaccaatatgagcgagaaggatattgagcgtgtgatccgctatcatctggaaccgatcaacatttcgttccaggcaatgaatccggaactccggtgtaaaatgctgcataaccgttttgcaggaaaggctctggataaggtggatatgctgtacaatgcaggaatcaccatgaatggacagatcgtactgtgtaagggtgtcaatgacggagacgagctggaatacagccttgaaaagctttctgcttatgcgccggtccttcagagcgtttctgttgtaccggtaggacttaccaaatacagagaaggtctctatcctctggagccttttaataaggaagatgctgaaaaagtcctggggcagatcgaacgctggcagaagatcatgatggagaaatacgggatccattttatccatgcttcagacgaatggtatattctggcagacagggagcttccctgtgaggatgaatatgatggatatctgcagcttgagaatggcgtgggaatgctcagacttctggaaacggaagtaaaagaaacgctggaggggctttctggtgacgaccgtaaggtgacaggcaggatcgccacaggaaaactggcagcgccttttatcgcacgctatataaaagagatccagaagaaatatcccaatgtgcagatttcggtcacaaccatcgagaatcgttttttcggtgaaaagatcacggtgtccggtttgatcacagggcaggatctgaaagagcagctttccggtcttgaccttggagagaagcttctgatcccatgcagcatgctgaaaggtgatgaggagatttttctggatgacatgacgctggaagagctttcggaagcactgaacacagaaattgtaatcgtagacacaggaggacgtgatctggtggaagccgtgatctaccctccggaacataaacaaacaagaaggagacagatttatgagcaaaccagtagtagcgatagtgggaaggcctaatgtaggcaaatccactctgtttaacgctctggcaggtgacaatatttccatagtaaaggatacaccaggagtaacccgtgacaggatttatgcagatgtcacatggcttgacaggacatttactctgatagatacaggcggaatcgagccggacagcagcgatatcattctctccagaatgagagagcaggcacagatcgccattgatacggcagacgtgatcatttttatcacagatgttcgccagggtcttgtggattccgatgccaaggtggcagatatgctccgccgcagcggcaagccggtacgtcttgtagttaacaaggtagacagccaccagaaatatatgatggacgtatatgagttttacaatcttggaatcggagaaccgatcccgatttccgcagccaacagacaaggccttggagatatgctggatgaggtgatcaaagagttcccggataagagtgaagaggaagatcaggatgatattccgaagatcgccattgtaggaaagccgaacgtgggaaaatcttctctgatcaacaagcttcttggagaggagcgtgtgatcgtatccaatattgcaggaaccacacgtgatgctatagacacaaaggttacctggaacaaaaaagattatatttttatcgatactgcaggacttcgacgcaagggtaaggtaaaagaagagatcgagcgctatagtgttatccgtactgtgacagctgtagagcgtgcagatgtggttgtagttgtgatcgatgcctccgagggcgttaccgagcaggatgctaagatcgcgggaatcgctcatgacagaggaaagggtatcatcgtagcggtaaataaatgggatgccattgagaaaaatgacaagaccatctacaagcatacggaaaagatccgtcagatcctttcctttatgccatatgcacagatcatctttatctctgcaaaaacaggtcagagacttccaaagcttttcgaaaatatcgatacagttatcgaaaatcagacacttcgtatccagacaggtgttcttaatgagatcctttctgaggcagtcgctcttcagcagccgccgtctgacagaggaagaagactgaagatcttctatatgacacaggttgcggtaaaaccgccgacatttgttatctttgtcaatgacaaggaactgatgcatttttcctatgtaagatatctggagaacaagatcagggatgcttttggattttctggaacttccctgaaatttatcatccgcgagcgcggggaaaaggaataaaagtatggaacgtattatttgtcttgttatcggttatgtatgcgggctttttcagacaggctatattattggaaaagtccacaagacagatatcagagatcatggcagcgggaatgcgggtactacgaatgccttccggacctttggaaagaaagcgggagcgatcaccctgctgggagactgcctgaagtgtgtactggctattgtgatcgtgagaatggtttatggaaattccatgaatggtctccttccgcttcttaccctttatgcagcattgggatgtatcctcggccacaattttccgatttctatggaatttcgcggtggaaagggaattgctgcttctgtaggcatgatcattgcttttgactggcggatatttattgtatgtgcagttgtcttttttgcactgttctttacaactcattatgtatcgctttgctctctcagtgcatatgcggtggcttttatcctggtcctagtttttggacatatgggaaaatatgggatggatcaggtgcatactgttgagctttatatcgtgatggcagttcttacagcaatggcgttttacagacacagggcaaacattgtaagactgtttcatggaacagagaataaggtgtttttaagcagtaagaataaaaaataagaggtaagatttatggcaaaaatcagcgtactgggttcggggagctggggattagccctggcactcctgttgcataataatggccatgaagtccttctttggtcggcaagaccggagaatgcccggaaactccgggaaaaaagagaaaatcctgacaggcttccgggggtgcggcttccggatgaaatcgatgtcctgacagatctggagcgtgcgcttaaggatgtggatgtaacagttctggcagtagcttccccgtatatccggagtactgcacacaagatggcatcgtttgtatgcagggaccagaagatcgtcaatgttgcaaaaggtattgaggaaaagacactgaaaacactcagcgaggtgatcgaagaagaaatcccgcagggtaatgtagctgtactttccggtccaagccatgcggaagaagtaggacgcggacttcctacaacctgtgtgatcagcgcacatacacaggaaactgcggaataccttcagagcatttttatgagccctgtgttccgcgtgtatacaacaccggatatccttggggtggaacttggcggagcactgaaaaatgtgatcgcactggcagcaggtactgccgacggccttggatatggagataataccaaggcggcactgatcaccaggggaatcacggaaataggaagacttggtaaaaaaatgggggcgcagatggaaaccttttacggcctgtccgggatcggcgacctgatcgtgacttgtgcaagtaagcatagccgtaatcgaaaggccggatatctgatcggccagggatatacgatggaagaagctatgaaagaagtgcagatggttgtggaaggcgtttattctgcaagagctgcaagagagcttgcggagaaatatgaggtggagatgcctatcataacggaagtgaaccgcgtactgtttgaaggaaaatcagcagcggaagcagtaatggacctgatgctgcgtgataaaaaagtggaaacgcccatgctcccgtggggaaatgcgtgagcggatcagttaaatatttccgggtttcagatatgtgaaatgctaagctgggaataacaggatcgccgtatcaactgaaaagaaaaaataaaaagatatctgccagaagatcacttatgctctgacagatatcttttttgcattattatgggaaattaaaactgaatatcacggagatcttctggaacatgagaagtatgcagatcttcgttcagtgtatcgatgatcgccatatcttcatcctcgatgttgaagtcaaagatgtttccattgctgcggattcgttccgggttgatggatttcggaatgacagaaattcccttctgtattgcccagcgaagcccgatctgtgcaggagtcctggcatatttggtccccagaacacacattacatcattatcaaaatatgcacctcttgccagaggagcataagcctgtacctgaataccgaaagccttgcagtattcgatcagttcagcagggtaacacaaaggatggcactcgatctggtttacagcaggaataaccccggatatcttacgaagctcttccagatgccggatatcaaaattactgacgccgatacttaaagcacgtccagattccagaatggattccagctctttccaggtgctcaaatagcagccgggaaccggccagtgtatcagatagagatctacataactgactttcagacggtcgagactacgggaaaaagctccctggacatcgccgagacgctgcgcattgttccagattttgctggtgatgaaaagatcctttctgggaactccgcatttggcaatggcacgtccaacgctttcttcatttttataaacagaagcggtatcgatcatgcggtagccggcggaaatagcagaagtgactgctgcttcggcctgtacgtcatcgggcaacttgtatacgccaagccccagaagaggcatttctctgtcgttgttcagaaaaacagtttctttcaaaataattcctccttgtatgttctgctttccatgcttttgctattatagcacaaaaatatgaaagaatcacatcaattatattacaaaagtgataaagcttagagttggacagacgcgcagactgggtaataagttgtggtttgaaaagactaacttcgttaaaaatgaaacaatcgagttaatttactgtcaaagtttttggaaaaataggaaaaacagcatataattttggctatattttataattattttcttgataataacagtgaaaagatgtataataaatttaattgataaattcttgtcatgagagtgtccgcccggcggatacaggaaaggggtatttatgcatttaatcaaagatgagaatggcaatcttgttcagcatggacatgcagacagccatgaacatacacatgagcacacccatgaggacggtgtgactcacagccatacacacagccatgcggaaggagataaccattgtcatacacacggtgatggacactgcggttcctgcgagagcggtgactgcaagaatgagactgtagcacttcttacctacatgctgcagcataacgagcatcatgccgcagaacttgatcagatggctgacaatcttaagaagcttaacatggatgcagctgcgaagacgatcaaagaggcagttgcagattttcagaaaggcaatatgagacttggacttgcccttacacttgttaaggaagagttgaaataaaaaccgacagaatagttttgacagcatagtggttaaatgatgccacttatttggaggaatgattatgtgtcttgcaacagtatataaggaagaagataattctgtgatctttaaaaatgtaagccggatcgatgtagacggaaataaattgatccttcgagatatcatgggagatgagcgcgtggtagaaggcagtatccttatggtggatcttgcaaacagcatcgtgaaactgcagtgtgactgatacaaatacgtggaggacgatcaatgaaattatctgaagcaatgagagaaaaaatgctgctttcctttgaactttttccgccaaagacagaaaaaggtatggcaaacctgccgggaaccattgaacatctcatgaagtatagaccggagtatatttcctgtacatacggtgccggcggcggaaatgtcggtgccaacagggaagtatgccagatgatcaggaatgcaggaactgttcctgtaacacacttcacagtgatcaagaacacaaaagaaggaatcagacagcagttggaacagtatctggcagatggcgttgaccatatgctggcacttcgcggagatattccacttggtgagacaacaacctgcggagacttcaattatgcgacagaccttgttaaatttgtccgtgatgaatttggcgataagttcgagatcgcagtagccggttcaccggaaggccatatcgcatgcagaagcttggatgctgatattgctgttttgagacagaaacaggacaatggtgctgattatatcatgacccagctctgctgggatatggaacagtttaaatactggttggacgctatccgcgaggctggagtgacaatgcctgtagatgttggcgtaatgccaatcctggatcaggcagctaccattaatatggctctttcacgtaatggctgtgtaatggacagtgagctttgcaggctgatctccagaaactggctgttcccgaatccgtttaacgctaaagatgctgatggtaaaccatttgacatgttctatgaggacaaggttaaacgattcaaagaagaaggaatcgaatacaccatcagacagatcgatgagtatcgcgctcttggtgttgacggtatccatctttatgcattaaacaaatggaaagatgtatccgagatcattgacagatccggacttcgtacacttatctaattatcaacgaaataaataagaattccggcacgatgcggaggtgtcagaacagtatcaggcacctcccttatgcgccggcataacagatataaaatcaggaggtgcccgttttatggcacatgttattgcagtcgccggaaaaggcggcgttggaaaaactacattatgcggaatgctgatccagtatctctgcgaaaagaaaaaaggacctgtactggctgtagatgcagatgccaattcaaatctgaatgaggttcttggcgtagaagtagatacgactcttggcgatgtccgcgaggagatcgcacatgctgagatgacagagaaaagcccgatccccaaaggaatgtccaaggcagattatgcggaggtacgttttgaggatgctcttgcagaggaagatgattatgatcttcttgtaatgggaagaacccagggaaaaggctgctattgctttgtaaatggtctgcttcaggcacagcttgccaaataccagaaaaattatccgtatattgttgtggataacgaagctggaatg

SEQ ID NO: 246 - DNA, 6943 bp, Unknown
  gut microbiota DNA sequence
atatctttatgatactcatcaaaacgttccagttctttgtttggaacttcgtatttgatggcgatgatacgttcgaagatattatcctctttcagtacggaaaccggcatgccacggtttacaagggcacggcatttctcgtagagataaaggatggtttccatcatcaggaactgtttttccattgggacactggtgtcctcctggtgaaaagcgttctgctgcaggaagcccagacggatgactctggcaatctccagtgtcagtttctggtcatccggaagaacgtcgcttccgatcagtttgacgatttccataagagaactttcctgattgaggattgccatgatctggtttctgtcgtagacgaatttcggggaaacatgctctctgtaccagggagtcaggtcctccagatattcgctataactggtcagccactggatagcagggaaatggcgggcataggcaagggccttgtccagtccccagaagcagcggacaaatcgtttcgtattctgtgtaacaggctcggagaaatcaccaccctgaggggaaactgcaccgataatggatacggaaccctctgttccgttcaggttctgcatcattcccgcgcgctcatagaaggcggaaagcttacttgccagatatgcagggaagccttcctctgcaggcatttcctccagacgtccagaaagctcacggagagcctcagcccatcgggatgtggagtctgccatgatcgctacgtcgtaacccatatcacggtaatattccgcaagtgtaacacctgtgtagatggaagcttcacgggctgcaaccggcatgttggaggtgttggcgatcagtgtggtacggtccatcatcaggtttccggattttgggtcgatcagtttgctgaagtcctcaagaacctgtgtcatctcgtttccacgctcgccacagccgatgtagatgatgatatctgcgtcagaccacttggcgatctggtgctgtgtcatggtttttcctgttccgaatccgcctggaactgcagcagtgcctcccttggcaatagggaaaagagtatccaggattcgctgtccggtaaggagcggaacgctggccgggaaacgcttgtaggtcggacgtggaacacggatcggccatttctgggcaagtgccagttctttttcggttccgtcatcaagacggacggtaacgatgggctccagaacggtataagcaccgtcaggaaccgcatggataacggttccgtgtgtgatcgtgggcggaaccatggatttgtgaaggatggaggcggtttcctgtgtttcagcgataaccgtgcctgcaccgatgacgtcaccttcctttacggtaatgtgggtttcccattttttttctgtgtcaagagagtcaacgctgacaccacgggaaatatattttccagaggcctgggcaatctctgccagaggtctctggataccatcaaaaatattgtggatgattcccggaccaaggagaacggaaatggcgtctcctgttccgataacagtttctccgggtttcagtcctgtagtttcctcaaaaacctgtatggtcgtcatatgtttcttgagaccgataacttctccaaccagtttttcggggcctacatagaccatctcggagatcttgaagccggtgtcgcccttgaggtagataacaggaccgttaacaccgtagataatacctgttttactcatgtgctggacctccgtcaaatttgaattctctgtaagctgcctgatagccttcctcaaaggaattgtcgatgaggatatttttttcagggattatcgccttgatcccgccgataaaggattcatcggaaagcttcagcgggaaaccggtctttacagtgagagacttcagacggggttcatcttcttttgaaagatagatctggatctcatcgtgttccgcgaagcagacagcttcctcgatctttgtacaaagatattcttcatagcggggagattccatgaatttcaggatctgtacccgaacatctgcaaaaagtttttcttttaagcggctctgcctggcagtccagtttcgccggatgtgaagctgctctgcggaaagtgccttgttgatctcgcgctttgcgtttgcgatctcggctttgcgggaactggcagcatttcccagagacatttttttatgttcctccagtgcggcatccagggcttccttgtgttcccggacatctttttccgcctgacggcgggcttcttccacggaggtgtcatagaagtgtgtaagcttctcttcgattgtcataatatcacctgcctataattttaatccgatggcctcatttacataagaagtaatgaaatcaggcctgcggccggtaccatgtctgtcaggaatttcaatgatgagaggtgttttgtgatgaagcttgacatcatcaatgatctcaggaaactcccggccgaatttttcggtcaggagtatgattccgatctctttgtctgcgatggtgcgctccagagcttccttcagttcgtcgtgctcatgaacgatcacaccctctacaccagccagtctcattcctgtcagagtatcaatattgtcactgatcagatacattttcatatcaaagtttaccaaggatcatgaaggagatgatcagtccataaagagcaacaccttcggcaagacctacgaagataagagatttaccaaggatgctctgatcctcactgatcgctccaagtgctgcgcttgccgcactggcaacggcaataccaccaccgatacaggaaagtccggtaacaagtgctgctgcgatgtaacccatacctgttgcaaggcccgcgtcagcgcctgtagcagcctgtacggaagctccgcctgcaaatgttactgcaatggcaacaagcatgatcccgaagaagaaaaaggcgttgacaccaagagctgttttgtagcggccacggtttttttcgccgagaagatagtaaccaaatggaagaatgatgctgagtataagtgcaactgcgattgtgatctgtgtaatgactgtcatgatgatgacctccttaatattcgtttaattgaatgcccggatcagaatgcgttccgactctggcattttatttgtttttagagcagaacggctcgaatttccgtccgctgcccttgtaaaaacggctgaacatttcgtaatattccagacggagtacctggatacctacgatcaggccctccatagcgcatacaaacaggtttccgagaatgatgacgatccagttcggactgccgttctctgcgcctgcaagcataagtacaacctccatcatagctgcgtggctgactgcaaaagcaccgatacgcacgaaggagagtgtattggaaaagtagctcaggataacctcgaacagttcaaagataccctgtacgataaacatgcctttttcttttggcataacctcggcttttttttctaccaggtttgtaagaggctccttgaagaaaataagaagcagcggtaaaccaaacataatggcgaggactgcaccacccggaacagcatgcccggatacaaaaagtccgatgcagagaactgcggagccataaaatacaagtcctgccacagcgttggtgtcaaaccaggttttttcaacgtcatgcatcttaaaggaattgatgatgttgaaaaccatacacaggaggatgattcccatgccgaagccgatggcaacgataaatacggtattcagttttccgataaaaggtatggtcgtcatactgttcacaggccgcagccacagagcaggtatgacatcctcaaatccaaagatgcttccgaacatcagaccgaaaaatgtggaaaagactccggcgcagctgatgattccggcaagatcgatatgctttagtttgtacaggagcaatcctccgataaaaagcaggagtccctgtcctgcatcaccgaacatggctccgaaaataaaggagtaggtgatggcgacaaaccaggtggggtccatctcaccataggcgggaagtccgtacatttttacatacatttcaaagggcttgaaaagctttgggtttttcagcttggtcggtggctgatggttctggtcgtgctccggcgtattggtatcttctccgtctaccaggcagaagattttttcgtcggatgagatttcggcttgaaaggctctggtgtcggcttctgtcatccagccgcagagaatatagaaattttcatgctttccggtgcaggcagccgctttacggacatcgaaatttctggaaaactgaagaagggtgtttctggcggtaacgatggcttctgcctgatccgcaagaaatctctggtatttctgtttctgtgcttccagatgcttcagggcatcctcgtattgtttgcttacgcttgaaaatgcctgctgggcagttccggtataattatccggcacaaagatcttctcaaagtgcatagaagagtaggcggcatcgattttgtgcgcttcatgcttcggtacgaagtaaacgccccagacgtattggtcatcttcatcacatttaaggaagatcgtgttcagattgtcgtaaatatatttcttgaatttctcataatactgtttctcgatacgtccgaaatgaaaatggatatacttcagatgaagtatggatgaaatatcataatcaatatttcggaagggacgtatgatccgcagtgactcttccagagaggaacatttttcttccagttcggactgttccttctggagctgatccgcctgggagcggatctcctttactgtggaaagtgctgtttcaatacccgggcttctgttggaagtggacggaggagttttcagctcctcataaatggtattgatggaatttaaggcatctctgtaagggttgacatccaggaaaggcgtcagactttctactgtggtcagctctgagagagcgttttccagatggatctcgtacttgcacaggtaggtgtttacaacccggtcgatatctgccttgggaccggtgatgctcagaaaattcattttttcaatcacgttgctacctcctggttattaaccgttgcgtatataacgcagggattgttctgggtccacgccatagcgcacgcattcaagggcaatggtcagacggttgacttcatgttctttgtgatataaataggaatagatgactgctacggaatagggatccttgcgtgcttcctgttccagtatgctgcgaagaatatagttataaaattcttccagactggcgacggtcagctgttcgtattttttaccataataagtcccattgaagatacgacggaactcttctggtgtaggggcttccacaagggtggtgatctcctctttgcggagcttgtagttcatggggaccagcagtgcgtaaatagcagccggttccatctgaaagcagcgtttggagcgctggatgaactgcaggttcagcatatcgaatttttcaccgtaagccctggtgatctgtttcagatcgttacctttgaaaagcttcttccgcacattccagatctgtgaaaaatacgaaaggtcaagtgccatgccgaagtcaaaaagcgtggcatttccacgttcattgacctgagacagcggaataaaaaaatcatttcccttcagtgccgcaatgaattcatccatattggtgcaggcggcaagcctgtcaatgtccagcttggaatgatgtctgaaaaaatcgcggtagggagaaatatccacgggatcggtgtcccggtggtcaaagagattcgtcatgatttctttcaggacgcggatctcataacgcctcgagtaaagcgacaggaacgttcgctgttcctgatttgcaaagtggtaaagccttgaaaaattcaggaagatggatttcttcaggagtttttctatctgtccgcggtgaagatcattttcatcgagaccggaccagacattctgatattcaggagtccgtttcaggtaggctgttacctgggggacattgggaagctgaacgatttcttccagctgctcatctgtcacaagcctgctctgcatggcgcggatcttggtggagagtccgctgtatgagaggacagagcccattgaatcacttcctttcccttcaggtttcggtgatgcctgttattttctgaaacagctcactgcaaagactttcgtgatgggcttcgtaataggcgtccagcctggaaagctggttttcggtttctgcacgaagctcattgatacgggcgtctttctcacgggccagatcttcacggatcttctggatctcgtcgctggtttctttttcaagtgaagcgtcgaattccttcgtctgtttttctgcttcttccgagagagcctgtttctgtcgcgcagcgtcctgcatgatggcattggctgtagcttcgatttccgaaagcttatttaggatttgttccatagcgccctccttgtttgtttattgtttataattgatttttatatgatacaccttttttatggtaaaaacaactaaaaaattgttaaattttttgcaattattgaataaatatgttcaaaaagagacgaaaaaaagaaatttgtttattagacgataattgagttttgggaaaaaatgaaaaccgcaaaggggccgtaaagccacggcccctctgcacacccctcgggctttttttaggagttcttggttgtggcggtgtgaggttgttgacttgtgtatgtatgctgcggtgttggatgtgtgaggttgagccgatgtatgtggatgcggacggcgaggcgcgttgctgtcgcctggttgagagggtttgagtggatgcggatggtgttggaagtggacggcgaggcgcgttgctgtcgcctggttgagagggtttgagtggatgcggatggtgttggaagtggacggc

SEQ ID NO: 247 - DNA, 6804 bp, Unknown
  gut microbiota DNA sequence
ggcgtttttgttgttgcttggttgaggattttttttattttttgcttgcggcggggtgggggttacatgtatagttgagtattggaatgttgtttgataagaatcattgagacattattatggaaagattattggaggttatttatgagattacgaaatattccgggtgctaaggatgctattttggattgtgagtgggtaattgatgagccggagaggtttaaaggaaagtggaatgaggtttttggagtgaagagaccgctttttctggaagttggtatggggaaggggcgttttctgatggatatggcaagacttcatccggagagaaattttgtgggaattgagatgtatgacagtgtgcttcttcgggcgctgcagaagagagaggaactggaagcggcaggagaggagttttccaatcttgtttttatcagggtggatgcaagattgctgccggagatttttgagaaggatgaggttgatgggatctatctgaatttttcggatccgtggccgaaggcgcgtcatgcaaagagaagacttacgtccaaggaatttctggcaagatatgagaagattttgaaaaaagaaggaactgtagagtttaagacagataaccgtggtctgtttgagttttccctggaagaggttagggattccgattggaatctggaggtgtgtacctttgatcttcatcatgatgaggagctggtgaagggaaatgtcatgacggaatatgaggagaagttttcttctatgggaaatccgatctgtaaaatggtgatcagacagaaatagagggaataagatgcaggaagaaatttttgaaaagtatcctataccaaaggcatattttaagctggcacttccggttgtgttcagtatggttatctcgcttgtttataatatggtagatacgtattttatcgcaggaaccggcaatacggatctggtggcgggggttgcccttggatcaccgatctttaccctgatgatcgcgttgggagatattttcggacttggcggcagttcttttatttccaggctttttggagaaaaaagatacgaggacgcaaagcggatcagcgtattcagcttttatggcgcgatcgtcagcggtgttgcagttgcggctgtactgatgatcttcagaagtctggtattgggacttctgggtgcaagcgaggccacctgggagtatgcgtcacagtattatacctgtattgcactgggtgcgccgtttatcattgttgcgctgacaccgtccaatcagttacgaacagaaggatttgcgacggcttcgatggttggttctgtacttggcgcagttgtaaacattattctggatccgatcatgatctttgtactgggctggggtgcggccggcgcagctacagcgaccgtgatcggaaatgtttgtaccgatattttctttgtatggtttcttattaaaaagagcaaaaatctttctgtggatcccaggggatttcacatttccaggtcggagatcggagcggtttttgccattggtattccggcttctgttactaatctgatgcagagcatcggaattgcgctgacaaaccgcgcgttgctgggatttggtgacgataaggttgcagctatgggaatcgttatgaaaattaatatgatcgctgcgttggtcctggttggttttgcctttggtggacagccgctgaccggatacaattacggcgcgagaaaccgcacaaggttgaaagcaactttgaagtttgcatatcttcttgagggaggaatggcgcttgtactgatggcggtacttggattttttgccccgcagatggtaaagatctttatgagcgatctttccgttgtggaaaatggcgcgctgatgcttcggctgcagctggcgggaatgttgtgtatgggaatcgtgctgatcagcacctgtacgtttcagtctgcaggacaggctatgggagcttttctgttatcagtgagcagacagggagtggtctttgcggttgtactgatgatcgctcttaaggtggcagggtatcatggcgttctggcttctcaggcaatctcggatttccttacggcagtgctggcggtggtgctggtatggcgctggtggaaaaaagtggatttctaagagtccgctttaaatactttgcgcaaatatcaggaaacagatcaggatattttcatataataaaatatccgtgatgttggaaaggtatttgcgcaaagcaggaggccataagttttgaaaaaaagaaaattcagatccttgcagcagaatctccatacggtaagccgcagcattaacagccaggctgcccatatcagaaattcgttgtcggaaatggaaaaaatgctggataaaattgcatcaaatgaagatataaaaaataaaaaagaaaaaaataaaaaaaattaaaaaaaggtgttgactttcttcaaatcataacgtataatacaacatgtattgaggaacgaacgaaacaaaaaacgaaagacaaacaattaaataagcgtctttagctcagttggtagagcacctgactcttaatcagggtgtccagggttcgaacccctgaagacgcactaaaggcactgtttttgcagatatggagctgcggggacggtgtttttttgttgcgtttatgcgggttttaaggtgggatatccgggtgtttgattcagatattatagatcagatgttttttaggaaaagtacctcagataaaaaggagggccgggtcttggaagggacccggcagagtatgaaaagaaaaataagtaatgatctataagatgaaaaagctttgtgctttatttgattaataatataccgtcaaaatgtgatggaactgtgagaagcgttttaaaaatttgtgaggaaagtctaaatatcttataaagtctgataaactgcgaagaagttattcggtgtagagccgcgtagcgaagcggattgcgaatatccgcttgactcgaatcaagtaagtcccctgcggggggtacgaaaagcaatagcagtcggtggggcttgtaagaatagaaaattctgaaatttatacaaaaatagtgaaaataaataagacttttttaagccgatacggtataataaaccatagcataaaaatccggaggggaaatgaacgaggatggatgtggtacacatgttatatgaacaggtgcggaaatttttctgaggggtataaatgaatatatctatattttatattcagcggaaaatgtaatatccggaaagatggttcaattctgaggtattcagataaaaagggaggagatggctatggagagagtatttgaggcaatcaatggagtgttcagctttatcggtccactgtctgattttctgtgggagttccccacgaattttgactggtacagcagtattccgattctggggaatatatcatttgcgatcatactacttcttgggtccgggatttttttcagtttcaggatcggttttatgcaagtgacttactttaaaaaaggaatcaggaccatgacggagaaacgtgttgtggaaacaggaatttcgccgcttgcatcgtttttcctgagttcagctatgcgtgtaggaccgggaaatatcctgggcgtaacgggtgctattgcagtggggggcccgggggccctgttctggatgtggatatctgcgtttttcgggatggcagttgcatacatggaaggtgtccttgctcagattttcaaggagaagaaggacgatgagtttgtaggaggtcttcctttttatgggagaaagcttcttggaaataaggtatggatcggtgtttttctttcggtattgtatattctgtatgcgctttgctgtctgccggcacagggctttaacgttgtttcatcagtaggacgcatggcagagatcgtaaccggaaaaaccatcccaagcggatcagccttctattatatagtaggtacgctgatcgtaattctcacagcagctatcgcatttggcggaatcaaaaaagtatccagatggacagatatgatggtgccggtgatggcagtgctctatatggtagtagtgttacttcttatcatattgaattttacccgtattccgtatttcttcggaagcgtgtttgcaggagcctttaagccggatgcattttttggaggtgtttttggaacagttcttgcacagggcgtaaaacgaggcctgatgtccaatgaggctggtcagggaacgatcaccatgtcagcggcagcagctgacgcaaagcatccatgtgagcagggtgtgatcgcttctctgggagtttttcttgataccattgtgatctgtacacttaccggatttgtggtagttatggcacattgctggacgggagcagatgcggaaagctggcaggctcttgataaacttcccaaatatacggagtccattgctgtgctgactccgggaactgcaatgaacgggatcgttacatttcttgtaaccttatgtttctgcctgtttgcatttacctgtctgcttggaatgatcagtttttcggaaatcgcagccaatcgtatccgcaaggataagatctgtattaattttgtacgctgtatcggcctttttgttgccgcatttggcatcctctgtaatatcgcaggactggagcttggaaatctctgggcattttctgatcttggaaatattctgatcgtatttttcaacgtaccgatcgtttatgtcggtgcgaaatatgttttccgggcgaccagacattataagaagaatgacggtactccgtttacatcggagataattggaagaaatgactgcgcttactgggatgagcaggcaaaaaaaacagtgaaaaatttttccggaaaataaaaagtccggcgggagataaaattagcattgtaaaagtgcatgtactcatttataatgagtaacagattctaaagatgttataaataacaggaggaaagccttgaaaagagaattagttattgtcattgattttggcggtcagtacaatcagctggttgcaagacgtgtcagagaatgtaatgtatattgcgaaatttattcttacaagacagatcttgagaagattaaagcgatgaatcctaagggaatcatccttaccggcggaccaaacagctgctatgaggcagattcaccgacttaccagaaggaattatttgagcttggtattccggtacttggactttgctatggagcacagctcatgatgcatgtccttggcggaaaagttgagaaggcagatgtcagcgaatacggtaagacagagcttctcatcgataagaaagattccaggatcttcaaaaatgtatccgacaaaacaatctgctggatgagccatacagactatatttcccagactgcaccgggatttgagattgctgcacatactgcagactgtccggtagcaactgcacagaatgaagagaagaaactgtatgcgatccagttccacccggaagtactgcacacagtagaaggaaagacaatgctgtccaacttcgtacttggtgtctgcgaatgtgccggagactggaagatggatgcctttgttgaacacacgatcaaagagatccgcgagaaagttggtgatggaaaagttctccttgccctgtcaggtggtgtagattcctccgtagcagcaggacttctttccagagcgatcggcaagcagcttacctgcgtatttgtagatcatggtcttcttcgtaaggatgaaggtgatgaggttgaaggtgtattcggaccgaatggtcagtttgacctgaactttatccgcgtgaatgcacagcagagatattacgacaagcttgccggtgttacagagcctgaagcgaagcgtaagatcatcggtgaggaatttatccgtatcttcgaggaggaagccaagaagatcggtgctgtagatttccttgcacagggaaccatttatccggacgttgtagagagcggtctcggcggagaatccgcagtgatcaaatcccaccacaacgtaggaggccttccggatttcgttgacttcaaagaaatcattgagccacttcgtgacctgttcaaagatgaggtccgtaaagccggccttgagcttggaattccggaaagactggtattccgtcagccattcccgggcccgggacttggaatccgtatcatcggtgaagttaccgaggaaaaagtacgcatcgtacaggatgcagactacatctaccgtgaagaagtcgacaatgcagccgccgactacaaaaaagaacacggagaagatccgtcctggatgccgaaccagtactttgcagcccttacaaatatgcgaagcgtaggtgtaatgggagacttcagaacatacgattatgcagtggcgctccgcgccgttaagaccattgacttcatgactgcggagtctgctgagattccttatgcagtacttaataaggtgatgaaccgtattattaatgaagttaagggcgtaaaccgcgtattctatgatcttacaagtaagccgcctggaacgattgagtttgaataaatcgagttgcttaaaaaagccagtgtttatgcgggtttcagcgatttcgattagtcttttgataacaaattgataacagtcatagcaagtgccattattcttgttatccagtggtttatgggtaacggaacaattaacaggtggcttgcagactaaagttcggagcttggctctgaacaaattccatattataaactaagcccttagctgtggttaataaccatagttaagggcttttttgtcgttgccaaag

SEQ ID NO: 248 - DNA, 4901 bp, Unknown
  gut microbiota DNA sequence
tatactggtgtactggtattacattgccgaaattttttacagaagaggaaacggacatgaactatacatacatcgtacagtgtgcggatggcacgctctacaccggctggacaaactgccttgccaggcggatgaaagcccataatgaaggcaaagcaggcgccaaatatacccgggccaaaaggccggtgaagctggtgtattacgaaggctttgccacaaaggaggaggccatgagccgggagtaccggatcaagcagctgaccagggagaagaagctggagctgatgaagttttgaaactgtcggaaatcttttcaattccggatgcagacccgtcactggaactgaaggcagtcatgctgaatatcaataagagtagttcaataagagcgaaaagttctgcacgataccaataccagagcttttcgctctttttgtgtatacacggcaggcgggcaactgcaacggagacagaaaaagacgctttatgataataaaaatcaaatatttggaattgtgcgaatattgtgaacatggtagaataaacacaaaaatcaaagaactcagtcagctgagaagaggaaaggaaagaggatgaaaaagacaaaagatttttgtctccggcttatgtgctgttttctgtttctggggttattttgccgaacagaggtttttgcagcagttcaggagggtaagccaggagaaacattttccggggaatatgcagttatcattaacacagataccacaaatcccggaaatacgggaaccttgcagtttgacgggacatcggcgcaggcggcagattctgaagcagaagattatgcagtcgtgcagagtggaagcgatgcatcggcgcaggcggcaacagagggaactgtgggagaggcagcagatgtggggcaggtacagagtctggaggatgatcagttgcaggcatacatgcaggatgaccagccgatgctgactgctgtacaggctgcggcgaccacctatcaggtaggtgaaaaaaagtacatttatagaactaacggctatgatacatatggaaaaacatatgtctgcatcggggttggtgaacactgctatgtgtggatggatgagaacatgaaggcagattacgatactgcagggaaaacatctctgatcgctgcggatatggcagctgtctacgatggtcagccttaccgtatccttaaccagctctgtgcaggtgattttccggcacaggatggctccggcaagctgtcgatcctgctggagtctttaagcagtgccagcggtatgtatatgcatgatgaggggatcacagcgatccatatcaacacaccgtcagcatcctcttatgtttcgggggaaatgtcaaagagaaatggccttcttgttcatgagggacagcatgcaattctctggctgaaaaccggatttatgagtaccggcagatattcgtggctgaatgagggtcttgcagtggctgtcatggactatctctggggaggaacggacagcagcggctggctgaatggtattggaagtaatacgaccatccgttcaggggcttcgctgatctacgagaattaccgggatgacaatgcacaggactatggaatgccgtatctttttgtacgatatgttatcgaccggatggcaggaagctatcagcctatgaaggtgcttccgaagttttatacgatcaatgcttcttcgctcagctgtgagcaatatctggagaaagtaaccggagtttcgtttaaggagcttatggcggatttttatacggcagttgcagccggtgagagctccggtaaatacagcttttacggggataccattgctgcggcaaaggctgcgacattcccggtttatgcaggagacagtaatgaaaagcatacattgccggcagcatcggcaatcctggtgaagctgtcgaacggtaagtttaccgttccgacggatggctccgcagggattgtttatcgtatcatcggaagcagaagctcttcccttgcaccggcagagggagatggtacgtctgcaaatccatataagatatcttcgattgatgatcttaatctgatccaggcgaaccagggagcatactatcgtctgacaaaaaatatcagtacagacggaaggacaaatttttcggcatcgtatttcagcggaacgctggacggagccggtttcacaataaccggtcttcaaaagcctctgatccagcagaatgcaggaacgataaaggatctgaatattgttgcggattttgattatgacagtcatgatatccatggtgttgtggcacagtataataccggtaagatccaggattgcagggtaaccggaacggtaacaggacatatgggctctaccagttctatgagccatccggcttttggcgggattgtcggagagaatgaggtggccggtactatcagcggctgttcgtctggagtaaatatttccatatccatgacagctacagacagctatgttggtggtatcgcaggagtaaacattggtactattgaaaaatgtgttgcaggaggaaatctttctgtcacacaggctaacggaaattcttatcaggtttaccttggaggcattgccggccggatcgaacagtttggaaacatgggcggatatgtgaaacagtgtgcttttacaggtacgcttcgcgtgactggcggaacagcagttacaggtcagatctgtgcacaggtaaatgcaaatgtactcaattctgctatcggtctgaatggacatgtttcggactgttatggtaaaaacggccagggagcgcttattgggacaaacacggaacagacgcttacaacaggcggtgttcttacagcagagcagatgaaggatccgaactcatataaaggctggagctttgacggagactggcagatttccaaggatggactgccggaacgtgcagatgcatcggcgatcagattgctttctgtttccggtgtaccgacaaaatgttacgtgggagaagttccagcgtactggggaacgcttatcgttaataattctacatcagtaacgatcacgaaggatatgatcaccggatttgaaaattcggaaatggggaccagggaactgacgatcaattataagggaaaacagaccagctggtcgatgacagtcgaaaaaccatctgccagtgatattacaagtattgtgctttccgggcgtccgaagacgacatacagtgaaaaccagaagtttgatccttcaggcgccagcttttttgccacaataggtggacgttatgtatatatttacagtggcttttcctatgataaaacaggtccgctgaagtctgcagatacctccgtgatattcaattattttggaaaagaaattccggtaagtattacggtaacagccagaaaagcaaagaagctttccgtgcttgcagcaccggcaaaaactcagtttacagttgggaacacgctggatctgtccggtgtgaaactgcagatcacatataatgatgggacgcagactccgatatttaaagcggatgagctggagaaatatggtgttcatgttgcttttggaaagaatggatcttttacaacggttgcagcagataaggttctggaaagtgatgacagcggaagtacgatcgtattttatgcgacggataaactgccgtcagagtatgactcggtagttgcggcgtcatcgacgatcacggtgcggagtccgctgactgtaccggcactggatttgtatgtcagtgcaggaaaaagtgcggtgcagtatccgtgcacagataatgtgactggtggaagtggaacgtatgcgactacagtaattgaggaaaagctgccggcaggattgatacgcacgaatctgcccggagaaaaatataatgcttttggctatacgggtgttgttacggcgtcagccggagattacagttcacagtataagatcagcgatacagagacacaggagagtattcaggtgactgtgacgatccatgtggttccttctgatcaggctgcattttacagttttgtgcttaagaaggtggaaaatcctggactgaagcaggatgttatcggtgcgatcggggaggatacgatcgttcttcgggtgccgaaggggacgaatgttacaaaattgaagccttcgattgattatggctcaggtatgggaactggactttcttcagacttttggaatggttcgacgcatgattttaccagcccggttgtatatacgcttacagcgccggatggggttacaaagaagtcttatacggtaagtgtggaattttatgatgatacttcggaggaagtacagtctggtgacgagattctttcaccggctgataatacgaagatcagctgtaaggacagtgaggaggttatctttaaaggatgggccggagacagttcaaaagagatttcactttttaaatatgtggtaaatggaatcagttatactacatccgcgaatgccactacacagacgatcccgaatgccagggcatatgaagtgaagatttccggaagcagcttgaaggaaggaaataatactctggaaatctgggtgatgtatgttgataattcaggcaccggaagcggcggcactttaaagaaactcggcacaagaactgttgttaaggaaggccacaaagcagtgaaagacgcagcggtagcagccacctgtgagacaaccggaaaaaccgaaggaagtcactgcagcgtctgcaatacggtgatcaaagcccagaccacaacagcagcattaggccacaactgggacagcggaaaagtaacaaaagtagcaacctgcaccgcagccggaacgaagacctacacctgtacccgctgcaagaaaacacgcacagaaacgatcgcagcaacaggccac

SEQ ID NO: 249 - DNA, 2982 bp, Unknown
  gut microbiota DNA sequence
tatatcggatatttactgttttcttttttgtgatatccttccgtccggtgataaatccgatccgatagccttctgtataggtagacgccatcttatcgatttcttcctgagaaagggaattcagaaactctgcaactcctgtttcattctctgaaacaaactcgccatagcgatacagatatctcagatccgaaagatccgaattcatgatgatatctgctgcaaagtcaagctccggatctacaccttcccgtatcctctgctccatcatatcctggcagtaatcatttacataggaacggagaatcccctccactgttgccgcctccggaagttcttcctcacaaaatgcagaatatacttccagaaacagttccatggatacagtcatatcccacagccttttctcatgagcataagctacaattcctgcgatctctgcgtacaggaaactgaaggcttttccatattctcccagctgctgtactgcatacgccggatttccatagctgctttcataattttccgggaggatatcctgataaaagcaatgatttctctctttcaacgcctccatcgtaagctctgctgcgctctcatccatcacatctgctgccatggaaagaaactttgccctgtttctgaaaaaatctccaaacggtttttttacggtttcttctgttatgatctcacggatccgttccttcgcaagtccataacgttctttcatgcattcttccaagacttcatctcccatctttttcatcatcgatcacatgccccagggcaatgtgtttgtcaacgagttctttcatatattcccagatcacttcagaaccctctcctgttttccggtttctcttataaatctgacttttcttcacctgatgctcttcccagctttttccgttggaagcatcatttagaaacaatggctgacaattatctagcacatgggcaaatttcgcctccggggtttcgtaagcctcaaactcctcccacaatgcttttaaccactgtccctgatcttccggcaatagtccatagatccgttctgctgcctgcttctccctgtattccttggttgtcgctcctttttcatcatatgcataggtatcacctgcatcgatctctaccagatcatgcgccagtaccataggaatcaccttcgaaagatccacttcctcattggaatattcctttaaaagcactgccatcaacgccagatgccaggaatgctccgcatcattctctttccgctttccgtctgcaagatacgtctgacggaaaatattcttgactttatctatttccataataaagtccagctgtttttttaagcgttcttttttatccatctgttatacccccgataaaaaaagtcccagccagataaccaggatcactccgttcaaaatagacccgaccatgcttgtcctgtgtttccggttttcttccgaaaagctggaaagccccagtgtaaacccatacgcagaaagcagcatggcaaaaagcccggttccgccgatcaggcccccgagctttccatcaaaaaagagtgcaagcacaactgccgcgataaacagcacgagggaagccaccgcaagtcctacagaccattttcctttggaagcttctcttttttttgcaaatgcatatctatatcttcttgccattaatttttctcctaatcctgtcgcagactgcataaatcccatatccaagcgctgcgcccagagtattcaatatcatatcatccacatcaaagcaaccaacttttgtgatcaactggatcacttctatcgtcagactgataacaaatccggataatatgataaaaaagctatttcgcatttttccggttattaccggaagaataaatccgtatggcacaaatcccagcacatttccaaaaacatttgtgaaaagcgcaaaggtacccactatttttcgataagtccagaaacgcctgatctccacaaacggaacaagattgtaacggtattctctttctgcatccgccactcttccgtatccttctgaaaagaacagaagatacacaagaacaagaacatacagtacaaaaaaagctgtcccgattttttttactctgcgttttgtccctttttccaatattctcccctgcttaaatagtccgaaaagccacacggaacaacgtgcggcttttcagatcatattagattaatatctctgattttcttctgagcagtctcgcaccgttcacgatcatcagaattcctgtgacaagtcccgtcaccagaacgacaataccgagtgcaaggcttcccgccccgctgctcgccatagttttataaattttttcattcataaggctgcgtcctcccagtaaaagcggaccttcggaatccgccgctcttttatgaccttttataacaatattattctgcgccgtactggtcataatatgcatcaatggcagctttcagcttatcatcgatcacaacacggcctttgtattctttgttgtagagatgctcaacaacctccgccatagttacaatagctgtagtctgaaggccgtaggtttcctcgatctctttgagcgcactctttgttccctggccacgttccatacggtcaacagaaaccacaagacctatcggatttacatctccctgcgctttgatgattggaagtgtttctttaatggatgttcctgcagtcgtaacatcctcaatgatcactaccttatccccatcctggatcgggctgccaagaagaattcctttatctccgtggtctttcacttccttacggttggaacagtaacggatatcctttccgtacatttcactgatctccatagttgctgctacagaaagcggaattcctttgtatgccggtccaaacagcacatcaaaatccagtccgaatttgctttctatcgcttttgcataatactgtcccagcttgcgaagctgcgcaccggtacggtaaaat

SEQ ID NO: 250 - DNA, 14555 bp, Unknown
  gut microbiota DNA sequence
atcataaattcaataaattcctgcttatactgttccatttatctaatcctccatgtttttcatatatacgacaaacccaggatccacactctgctgcaatcccagtgtaaaatccctttatttatcctgttaattctaacatatgaacaacagaattgcaaatacggcaatcctccgttatttcactactccgatcagctcattgatgtcttccactttctgtttttcaagaaatgcctgaataccatctgcaatctccacagtagcataagggttaaaaaagtttgcagttcccacagacactgcagtagcacctgccataataaattccagggcatcctcagcagttgcgattcctcccataccgatgataggaagggatactgcatttgccacctgatataccatacggacagctaccggttttactgcaggaccggacattccaccggttttatttgccagtgcaaatgtacgtctgttgatatcgatcttcattcctgtcagggtattgataagagaaagaacatctgcgccgccagcttctgctgctttcgccatctcggtaatatcggttacatttgggctcagcttcatgatcaccggctgttttgcatatttctttacttcttttgtgatctcttcaagagctttcggattctgaccgaaggcaattccgccttccttgacattcggacaggaaacattgatctccagcatatccacaggctcatttccaaggcgttctacaacctcacagtaatcctttgcagattttccacagacattgacgatgatctttgtatcatattttttaaggaacggaatatctctttcacagaaaacatcaatccccggattctgaagaccaatggcattgagcattccggatgctgtctcggtcactctcggtgtaggatttcccggccacggtacatttgccacaccttttgtcacaactgcgccaagtctgttcagatccacaaattcactgtattccgctccggaaccaaatgttccggacgctgtcatcaccggattcttaagttctacgccggcaagatttacattcattctgctcatagctctacctccgtgctcaggaatacaggtccatctttacatactctcttgttatggacatgagaatgcgtatccacatctttggatttgcacacacaggcaagacacgcgcctacgccacaggccatacgctcttccatggagatccagcacggaatccccttttcaagggcatatgccttgatggcacggagcatcggggcaggtccgcaggcaaagatcgcatctgcctcaagatcgttctcacggatggcatccataacatttccctttgttcctgcagagccgtcttctgttgccacatagacatctccataagcttcaaattccttatttaaaaacagctcatctctgtatccgagaaccatgatcttttctgcgtccagctgtttagcagtttccagcattggcgggattccgattcctccacccatgagaaacacttttttgccttttactgcatccagcggaaagccatttcccagaggtcccatagtctcaatggggacccctgcatgaagtctggaaaattcctccgtaccggttccttttcctgtaacgcgatataccagtctcagttttccttctgctttatcgatctcacagagactgatgggccttggcagaagcttaccgccattgcggctgtaaagtgatacaaactgtcccggcactgcattttttccaatctcacctgcatccagccacaaactgtaaatatctgtaccaatacattcctggctgagtatcttacagggcttttttgtttttttactttctgatgtactcataaaatgcctcctgtattatctgttctccagcgcaccgctgatatccgcgatcatatcttttactgccgctctggaagcatctgcgtaattttcagcgccaaactctttatatttctcctgcttatatgcagcgatgattcctctggaagagtttacgatagcaccaagtccgtcctcattaaagaaatggacaagatctgcgccttttccaccctgagcaccatatccgggaacaaggataaatgtcttcggcatgatctttcttaatacctttcccatttccggataggtcgcacctacaacagcaccaacataactatatccatcacccataagctcatcgccccactgtgcaaccttctcacctaccagctcatagagcgggcgaccgtcgatgacacgatcctggaactcaccacttgatggattggaagttttgaccagaacaaagataccctttttctcttccttgcatacatccataaagggtttcacaccatcagaaccaaggtatggattgacagttgcaaaatcctcatcaaaacctgcatatttttttgagcctacctgaacctgtcccaggtgaccaactgcatatgctgcagatgtggaaccgatatcacctcttttgatatcaccgatcacaaccagatctttggatttacaatactcaaccgttttcttgtatgcgatcagtcccgggataccaaactgctcatacatagcgatctgtggtttcactgccgggatcagatcaaaggtcgcatccacgattcctttgttatactgccagattgcttctgcagcgccctccagagtctccccaaactctgcaaaagcctttttctggatatgctccggaatataattcagcataggatccagtcctacaacgattggtgcatttgttttgcggatattgctgatcagtttgttaatcatgattctttctcctcctggttattaaatacaatttttccgtcacagatggtataaagcacttttccctttactttccagccatcaaacggtgtgttatgtcctttggaaacaaatttatttttatcgatagcatactcctgctccgtatccacgatgatcacatctgccggatggcctttctggagagttcctctgtcaagcccgaggatttttgccgggttcaggcacatcttctcaaccatctgtttcagtgtgatcacatctttttccaccagctctgtataggtgagcggaaggcttgtttccagacctacgatcccaaatggtgcattcttcatagaacctgttttttcctgtgcactgtgcggtgcatggtccgtgctgatcacctcgatggtaccgtccttcaggccctgtttcagtgcttccacatccttcggtgtacggagcggcggattcatcttgtaattcgggtcatctgttttaatatcatcggatgaaaggataaaatggtgcgggcatacttcagctgtgatattgtcgtatcctttctcttttacgatcttcatcatctgggcatccccataagtggaacagtggcagagatgaagatggactcctgtctccagcgccagaatgatatctctggctgtaatggtatcttccactgcattgcagattccgggaagccccagtcttttggcgttctcatcctcattcatgcatccatctccacgcagatcgatatcttcacaatggtcaaaaaacggtacaccgcattctgctgcgatcctcattgcttctttacaaagcgctgtattcatcacagatttgccatcctcggacactgccgggatccccgctttcaccattccggcaatatctgcaagttcagtacctttttctcccatggtggctgcacctgcctgaagtacatgaataccggaaacctgcgcagccttgttatgtacatagtttacccggtccggattatctatagtgggagttgtgtttggcatagcaactacagttgtcacaccaccacgtgctgccgccgccgcaccactcttgatatcttccttatgtgtctggcccggatcacgaaaatggacatgaaggtcgatgattcccggcatgaccagctttcctttcgcatcgatcacacggtcgccatctttctttttcagcttctgacctatttccgcaatgattccgtcttccagataaatatcgcctgttttatccgtatctgtagccgcatccacgatccggcctcctcgaatcagaatccccatttctgttctcctctcatcctgtattttcaaagcagattcttcaatccgcttgcattctactatatcatacacgatatttctctatttataaagattttttttacaaagcaatttcgcccctttttacaccccggaattgttggaattttctccttgacatttcaaaacacgggttatataatcagagcatggcaaaatatttaatgtaaaatcactagtttttagagattatatttacatgaatatagtctgtaaaatctggtgattttttattatcatcagaaggctattttaattttttttatttttatggaggtaacacaaaatgaacaagggaactgtaaaatggttcaacgcagaaaaaggttatggttttatcacaggtgaggacggacaggatgtattcgtacacttctccgctatcaacggtgaaggcttcaaatctcttgaagaaggacaggctgtatcctacgacttaacagagggcgctcgcggaatgcaggctgctaacgttacaaagttataattctataaccataaaaaacgtataagtcaaaacggggctgctttatggcagacccgttttttattgcattatatttatcctgtatataaaaatccccgggatgcttcaacacatcccgggaacccatcatttcatatgtgttttctattccgcactgtctgaagataatccggaaatataatctgtcaatgcagaagtatccatcacagtatccactttcacgctggcttccttcgcctgaatcttggcgtatgcggaatatccgatccatcccacaagcagaaccgcgatgaggatccatgccgccatctcaagtacaaattctgcgcgttccctcttcagggcactgtttcgcgagtatttgctgtttttatatttgtcaactttcttctggctcattgtctttctcctttgccgcttcagtacttcgttcattatagcacacttgttttcaaaagaaaagcggcaactccctgaagaaatgtgataattttctgaactggagattttctctgatcagactgctacgataacgccaccatcgttggcatacatactgctgacaccggcagtatccataactacgatctttgctgggtgcagtttctcacggatagcctcctccagcatcttcgctctttccggacagttacaatgagtaatggcaactgtcttttccgggatgttgatccccttctctccaatgtgatccaccatttttacgattgctttattcatgcctctggcctgatccagctgacagatcgttccttccggagtagatcccataaccggcttgatcttcagtgcactggccaccagagctttcactctgctcaaacgtccgttcttgcgcagagtttccagattctccaacacaaaaaatgtgctcatctcttcaatatatttctctacttcacttactacttcttcaaaagaaagtcccttttcttcacactccacgatcttcatggcaatcagactctgaccaccggatgcagatttggaattaaatacatgaacctttttctccggctgctcttccaggaacaggttttttccaagaatcgcactgttataggaaccactcaattctgccgatagcgtcaccgcataaatgtgttccgcatcacactcatatgccttcatataacgttccggagaagggcatgcagacttggggcattccgggcaggccgcaaccttctttaaaaaatctttctgatcgaaattctcatcatctataatattctcaccgcccaccgtcagcgtcagtggtatggattcaatcctgccgtcatttttccattcatctaaaagctccccacagctatctatcgcaatcttatagctcaattatatcgtcctcttttccattatatgtagtattcaataccacatctatcgtatcacataaacagatatttgaaaagagttttttaaaaagtctgtccttttttctttatctgagatataatgtctacacgcgatcacataaaagaaaggaagtgcggcatgcttgcattaaagatcacagatatccgggatttcacaaacaaactttttataggagaagtatttgacaaattctgtctgtccgaagcgactgtgactacttttaatacttttaccattgatggcaggcttcagaaagatttttttgatacagacagcatgaacagactcacagagcacggccggacacattctctctggaaggacatcagacctttctgctggtctgtgatccgcggtaagcgtacgcccttaagcttcaggatcgtgctgcatttaagtcggagtggaattgaagctgcaatgagaaatacagatttcggaatttcctccgaacagatagacggactattcttaaatcttcaatttaaaaataacagccttctttgtactaccggaacctctcttaaaacattctctatggataaacgcccggagcagctctgggatgatatgatcctgagctttctgtccaggaatcagattctttttgaaaggctatagtcaattctcttcttctatttccctcaggtaatacgcaagcatatcaataaattcactgttggtaggcttgtattccagaggatatcctgcaatctcatccagcagttttttatttccttcccaacacacatttaccattgttctgatatcatgctcaatattggtaggtgttgatctgtacttccgcgccagacatggataaatgtcctttgtgatccgcaatggtttatactgataccccatggaaatctttaccgcttccgcaacgaaaaaatatcctttgtatttcgaatttgcaccaagtcttctgatcaatccatacacctttttcatacatttgttcctccatttcatttttttctctttttaaaagcactcccttatgtataatacgacagttatctatatttttcgctttcttctgaaaatttattttatacatattagatactaatttaaatttttagtcatattttacaggttatttttatttaatatctattattttatttaaaattcctataattgtgttaaagatacacatattgttataaaaaaagcaaaggcttcgccccattacgggcaaagcctttcgatcattttatatgtcgttttattttgtaaggaccataaggatatcgttgcttctctttacaaattttgtcatttcttcaggagaaagctgtttatggctcatcattgcaagatcataaagctgttcacagatcaccggaacatgctctgatccctgattttctgctataaatcttacaagaggatgatttgcgttcagtacaagtacttcctgaccaccgaacatattcggatccattccgtacatattgtacattttcatcatatcctgcatacggcggctctcctcaggaagagtgatcatcgctgcagttccctcatttttcagcttctctacttttacttcaagtttatccttgccaagattcttacggaacacctcagtaagtgtcttgactgttgtttcatccgcttctccgtcttcacgaagctcttctgtcagatctgcatcaattctcttgaactggatcgtctgatcctgctgttcaagatgggaaataaactgtgaatcgatcacatgcttcagcagtacagcatctttacccgcttcacggaacatattaatgtactggctctgctgtacctcatcggtcacataatagatcaccgttttttccggttcctcattctgggatccttcagaagctttctcctctgtcttctcctcttcagctgcttttgtttcttcttttttattttcctcaatgcagtctttcagggtaagatatttgccatccagattcttaaagaggatataatcgttcatcttctcaccaaatttcgcatccttgatgcatccaaatttgataaacgggctgatatcatcccagtacttctcataagactctctgtctgtcttgcacattccggtgagcttatctgctactttcttggtgatgtattcagaaatctttttcacaaaaccatcattctgcagtgcagaacgggaaacattcaatggaagatccgggcagtcgatcacacctttcagaagaagaaggaattccgggatcacctctttgatgttatctgcaataaatacctgattattataaagcttgatggttccctcaatggaatcatactctgtcctgatcttcgggaaatacaggatacccttcagattgaacggatagtccatgttcagatggatccaaaacagcggctccttgtaatccataaataccttacggtaaaattctttatactcttcatccgtgcactcatttgggtgtttcatccagagcggctgtgtatcgcttaaagataccggccgtttattgatctttactttatctttggcaggagaaacttccacaacttctttctcgcctttatcattctccttttcctctgtcttggcatcctcatggatatgctcaactaccacatcatcttcacggagatctgcctcatcgatggtttcatactcctgttcagcatttgctttggaaagatagatatttaccggcatgaaagaacagtatttctcaataacctctctcatacgatattcattggcaaactccaggctttcctcattgaggaaaagagtgatctctgttcccggttctgttttgtttccgtctgccatctcatactccgtaccaccgtcacaggtccaatgtaccggtgtggaaccctccttgtaagagagagtatcgatatgaacttcatctgcaaccataaatgcagaataaaatccaagtccgaaatgaccgatcatctgatcatccgttgttttatccttatatttctcaagaaactctgtggcaccggaaaaagcgatctgtgtgatatattcctctacttcatctgctgtcataccaataccgttatcgataaacttcagggttttctgatccggatcaacgataacatttacagccggtttgtaaccttccggaaatgtataatctcccataacttccagctttctcagtttggtgatcgcatcgcatccgttggagatcatctctcttacaaaaatatcatggtcggaatataaccatttcttgatgatcggaaaaatattttcactgttgattgataaactgccatgttttgctgacatatatgtcactctccttttgtttttatttttatttctgatgttccggcagaaccggaaacctgttgtttttttcaataaatatatactaatacgactttttacaaaagtcaagaaaaatttagcactcgtcattacagagtgctagtaacagcatgtaaaacggatctctatgtgcaaaaaatccctccgtacattttttgtacggagggtgctgtaaaacaatcttctacattctgttcttattttttctttttacgatatacaagaattcctccaatgcataccacagccacgatcaaaatgatcacaaatgtcatgatcggtgtactgtctcccgtctgcactgcagatttctgatttgtctgtgtcactgccgggctcggagtcgcagtaagaactgctgcctgtgataccgtaaaagtaaccgtactttctgactgtgtaccggtatccttccagctggagccgtcatatttctgctgtccaaaggtaactttcagagtatattttcccggcttgctgacacggaatgttgcggtataaggctctccatcccaagtacgggtctctgtgatcttccagctcttcggctgatatctggtatctcctttacgcgggtttgtattatccatccctgctccggctgctgtaaaggtaatctttgtattggtatcatacttgccattggaatcaattcctgtgatcttattgtccgatgcagcggcttccgtgccctgatatccgtttactgtaatacttactgcgatcactgtactgatcttgttgggattcttaaccccatccggaagaatgacagtaccttttacattaaatatctgacgttctgcagaagacggatcataagaagatcccttaacatcccatttaacagatgccttctgctctccctttgttgtagtgatctttactgttcccggaagcttcagggctttctgggttttctggattccattaggaagatctttgatatcggatggttttttgatgcctgtaaggttattcgccttcttactgttatctgtttttttctttgtaacgctgaaatggacatttacataagcttccacatttgcatcattggcgatcacaatgtcttccagatattccccctgtgaaagtccgctgaccggctgtacgctaaaggttgcattatctcctgcttccagctctgtggcggaaagtgtaccaattgtatatgcatttgatgaaggctgtttcagaacgatctttgtatttccggtgttggtaactgtaactttcttcgcatcaggaagttccttatagccttcttctttggttccaaactccagactgtctgttaccgaaagaccgggattgggttccggttccggctccgaaactgtaaattccagccggatttcagccagtgtgtttccggtattctgatctgtcacagaaatcgtatcgctgtgatctccggcctgaagaccggtcttgggctgtacggtaaaggttgccgccttatctccgggattgagcacttccgcagaaggctctcccacctcataatcctccggagcagaaagctggatccggatagcctctgtacctgtattctctacggttacaggctgtgcatccggcgcagtctcatagccctgttccagtgttccaaacttcagaggaccttccggtttcactgttgcagtaactgtttttggtgtttctgtctttaccataaccgaagccgtcactgtagcagatgcttcagtgctttcatcagaagcaaatacaagctcttccacgtatggatcatcttttgcagagagtccaagcttaggctgtacggtaaaggtctgctctcctccctgcgccaactggatatttccgctgctctccacttcactgaccggcgcaatatcaaaaaactccgactcaggctgtactaacgtcacagcttctgtaccttcgtttttgatcgtgactgtacttgttgtttctaccttttcataaccagcagtcagatcatcaaaaggcagttctgtcggatccgcagttagcttgtatattttttccgctgcagggtccgatgtttccccgggatctgtctgctcattattttcatgatcttcggcttttttattttccggttcttttactgtaaagtccgcttcaaataagacatcagcaccttcttctgtctgatacgtgatcagatctttgtattctccagccttcagaccttctcgtggttttacccacacagtaacactttcaccactctttaatggtgcatcattaatatccgcagccatgaaattctccggggcgatctctttaaaattaagatctccggttccgttatttgtgatagtaaccatctgtgcttccggaatttccgtatatccctcttccacggaaccaaaatccagaattccacttccatcttccgtgtatgcagatgccgaatatgtcggttcctcatttttttcggaagcgtctgctgctgtatctgcggaatccggtgtctctgtctgactatctccagatgtatctgcctcatcggcattctgaggccctgactgttctccgtttacttctataacagagttttcagcaggctcctgggtatctgcaggttcctgtacatctgtattttcctgtacatgtgtattctcctgcacatccgcagactccgtttcttctgccggctctatggtttcctcaggctgagcactatcaggctcctctgacgttccagctcctgtatccggcgtgttctctgaagactccgaagcttcactttcctccgcatccggatcttctcctgctgctttggcttcttcctttttcttttctgccagtgctttggcttcctcctctgtttcggaaacctcctgggtcgtcaccgtaagctcaccactgactcccgtctcttcttttccggtgatcttcagaacaatcggaagacccagatctttttcatcgattttataagccttgtcagttcctacctctgtaagaaggtctccgtcctttaatgaccaggaaaaactcacattatcatctgtgatcccctccggcttgacctttgagtaatctgcacttaaagtagacccgatcgcaagtgttcctttgaccttcagctttccatcaagagttccagatggagctgcagtggcaaataccatcgatggaagcagcgttaccatcataagcacagccatgacgactgccagcactctgctttttttcatatcccatcctcctttacatcattttattttccccacatttaccctttctacgcagggctttctttttgctgatgcaagtttatcatatttaattttcagaggtgtaatccctgctttccgtcagccttctacgatcatatattttccgtccgggagtttaaatacttcgctttcttcttccagctccttcagggaaatcccctccacatctgcgcccattccatccagatattttttaacatccttcagggaatccagcacaactgccatgcaatcctcgagaaattcctctgcctcctcaaaatcctctgctaccggctcatcaaaaagctgaccctgtttttccagaaatgtctggacatattctttcttgtacatattaaagtacctcctttatatctccgcccgccgcgatcagtctgcgaagtactggttccaccttctctgtctcatagaaagccgccgcctttacccctggcttcgcatgcttcatggcaaagctgtattttacagatttcatcatttcaatatcattgtattcatccccgaacgccatgcattcatccggtccgattcccaaaagttcctggtatttacggatcccttttgctttgttcgtggtaaatggaacaaaatccacccacgcaaatccggatgtcacaacagtacatctgtctttgaaccgttctctccagtaccggatggattcctccgtcattccttctctctcataaactgcaaccttcatacaaggctctgtgatctcatcaaaactctttatgatcttacattgattttttacttcttcgatcatcagatggcgataatgttctgtcttgggcatgatataataaaaatcctttgtagaacaggaaaattccgctccgggcttttcccatattgcctgaatgatctctctgaccagttctttgtcaaagctgtcgcagtacagaagcttctcattctggacagcgagcccgccattttcactgataaatgccatctcgtcctttaccggcgcaaaaagattcctcatattggcatactgtctgccactggctgccacaaagaggattcccatttttttcagttcctttaccagcggaaagatctcttccggcagcgtctgtcttccaccgataagcagcgttccatccagatcgctggcaaccatcttaatcatgctgcttctcctcataaatagtaaacagatcaccaggtacagctgctacaatatctgcaccgttattttcaagctcttctctgtcacggaatccccatagtgcaccaacggtatacattccagcagcacttcctgtctgcatatctgtctttgtatctccgatatacatacattcttccggctttacgccgaaatcttctgcaatcttcagcggaccatccggtgccggctttctgcggattccttcctgctgtcccatcacctcatcaaacagatcgccatagatcgcctttaccactttctgcgccgcaacatgaggcttattggagcatacagccatcttaaggcctgcatgtttcagcttctgaagggtttccggcatatctttatatggcacaactttatacagcggatcttcatcaaatttcctgcgataaagttccctgacttcttcgtagtgtaccagctccggatctcctgcatcgatcagacatcttctgatcagcatatctgcaccttcaccgctgtaataacgaaaattatctgccggctgtggtttcagggaaaatttttccatgatctcattcgccacatatgccatagattccagtgtatccgcaattgttccatccagatcaaatatacaagcttttatcattttgtctttcatcctctcaggttcattcccagtttttttgtctcatagatcagtcttgccacaggcagtcccaccacgttgttataatcaccacggattcccttcacataggctccccaggcgccctggattccatagcttccggctttgt

SEQ ID NO: 251 - DNA, 4879 bp, Unknown
  gut microbiota DNA sequence
gaatatattaaatgggaatatatcaaatgggaatatattaaatgggaatatatcaaatgggaatatattaaatgcaaatatatcaaatacaaacataatgtgtaaatataatatacgtaatggtattggatataaatttttatacgataagacattaataaaaatatatgatataacagggaaaatacgtagaaacttcaacaattggcggacaggcgcgaagcgccgcctccgcggtacgtgcccggaaagagggggtgcagggggagaaaagcgggcttcgtaactccgagtgctttctccccctgcggttttcctcagcttatcaaagctaataaataagaactataagaaaaaataaaaactaattacttgcgagatgcgatgaagtcaagaacttcatcccttgtaggcatcacgcgaagcgcgcccttctttgttgtgataagagaagctgccgcatttgcaaaagtaagcagttctgcaaggttctcgtctgtgagatcatcaagcccgtgctcaagtacatagttcaatgtgcttgcgcagaaggtgtcaccggcgccggtggtttcgatggtgtgttcctgaaggaaaggagcagcctcgaccttccgtccgcgataataagcgcggcttccgtcttttcccattgtgatcagcacaagcgggatatgatatttttcttcgataagggcagcacccttgtcataatctgttgtgtcaaaaagaaattccacttcattatcagaaatcttcagtacatcacagcgttccatgccgtattcgatctctttgcgggcatcgttcagatccttccagagtggagggcgtaagttcgggtcaaaggtgatgatgcatccggcttcttttgccacgtcaagagcatagcgggttgcttcacggacaccctcatgtgtggaagaaagcgtgccgaaatggaagatcctggaattgcggatcagatcggcatctacctcatcctttgtcagcatcatatctgcacctggattacggtagaaagaaaaatcacggtctccgtccgggtaagtatgtacaaaagcaagggtagtgtgaatttcatcgtccatgacaagatttctggtatcaatgccgcattcttctacggcagccttcagctgcttgccgaacatgtcgtttccgacctttccgataaatgcagtttttttgccaagacggttcagcatggcaagaacgttacagggagctccgcccgggtttgcctcgaaagtagggtttccttgggaactgtcaccgttttctgtgaagtcgatcagaagctcgccgagagctgttacatcatactgtctgttttccattgatgattcctcctgataagttatttgtttcatattctgcttcatattataatcgttacacatgattttgggaagaaccaaatcgaattattttctgttctgttaccggttacttgtggtgctttttgcgaagattagaactgttatctttatttttctgtaaaatggtggtaaacttagtctataaaacaacaaatatgatggaggagacgattatggctgataaagcgtatgaatatatggattggccccggatcgaggcgatcgtttatggggaggaggcatcacctcgtgatgtgatgcagccaagggtaacagaggatggcgttctgatccagggattttttccgggagcggatgctgcagaggttgttgtaggggaaaagagttatccgatgattctggaagatgaggctggttattatgctgtaatgcttccgctgaaaaggattccggaatatcgtttccgtgtgataagaggaagcaggaaagagactttttacgatgcgtatgaatgtccatgccagatcacggaagaggaggaacgagctttttgtgccggtgtctattacaaggcatatgagaagctgggagcgcatccggggacctgtggcgaggtagaaggaacatattttgctgtctgggcacccaatgcaatccgtgtcagtgtggtcggtgattttgacaggtgggatggaaggcgtcttccgatgcatcggatgccaatgtccggaatttttgagatttttgttccaggtgtacaggcaggggcctcttaccagtatgagatcaagatcaaaggcggcgatgtacagcggaagtctgatccttacggaaatggaactcagggagcgccgtctgtgatttctgttgtaacagagctgggggattttttatggcaggatgaagcgtggatgaaggaacgtgaaaggtttgccagccgtgaagttccggtttctatttatgaaacggatgtaacagagtggaaaaacagtggtgaactggtggagtttctgaaggaaaccggttatacgcatgtagaatttcatccggtgatggagtatcttgaccgaagttcaggaggatattctacgtctgcgtattatgctgtgactacccgttttgggactgcggcagatttccggacactggtggaggatcttcatcaggcagggattggcgtgatcctggactggacaccggctcagtttccgcggtttgatgcagggcttgagaaatttgacggaactcctctttatgaagtacaggatccggctatggccgttcatccgatgtggggcaccatgctttataattacggaagtcctatggtcaaagattttcttatttccaatgcgtttttctggctggatgaatttcatgtggacggatttcggatggatgatgtagatgcgatgctgtatctggattttggaagagaggcgggacagtggacggctaatctttatagttccaatgagaatcttcaggcactggagtttctgaagcatctgaattctattgtgaagaagcagtatccggggattcttttgatcgcacaggaggatggtttatggccgcagcttacagacagtgtggagaatgatcatctggggtttgactataaatggagtggtggctggacaaaggatcttctttcttacctggaagcagagcctttggacagacgaaattattatgatcagctgacgctttccatgatgtatgcatatagtgagcattatgtactgactctggggaagagagatgtgggtacgttaaaagagtttctggagaagcttccgggatcttcaaggcagaaggatgctcagctgcgtgctgcgtatggctatctgatgcttcatccgggtgtgaagatgactgcgccggatggggatgtggggccggaaatgagggcgtatctgcatgatctgaatgaactttacaggaatcatccggcgttgtatgcaatggatggtaattcggatgggtttgagtggatccagtttaccagctatgatgagaatgtggttgcgtttcttcgtaagacggaaaagccggaagaaacgattcttgcagtgtgtaatttttcaccggtatcttatgacagttaccgggttggtgtgccttttgcggggaaatataaggaaattttcaacagtgacagtgaaaagtttggcggacagggtgtggtgaacgcacgggcgaaagctgctgttcatatggagtgtgataacagggagttttctttgaagctgaagcttccggcttatggtgtggcggtatttgggtgtacaccggagaagggggatgtgaagaaaaactctgtgaagaaaggaaatgtgaaaaagactgtggggaaaagcaggggaaagcgtatggataaggcgaaaatgacggtggttgaaaaatctgtggctgtaaaggatgcggtaaaggttgtgaaacgggtggcttctcgcaggaagggggcttccggggatgagtgatggtttgtgaattaaatgggaatatggttgggggtgattggagggtaaggatttgagtggattgtaggaaaaagtgcttgcattttttgtaaaatacggtataatatcagttgtgtttagcacaagctggaatagctcagtcggtagagcacttcactcgtaatgaaggggtcgtgagttcgagtctcatttccagcttatatatgactgatgggagtccggtgtctttggaatatgaagatgccgggctttttttgggtgtgtatggatgtggtcgagggacgtcagaggaaggtggtatcgctcggtggatgcagtcggggatgcttttgaggttttgtgagaaggatggagagggacgccagaggaaggtggcatcgctccgggggtggatgcaagcggggatgtttttgaggttttgagaggtggatgtggttgagggacaccagaggaaggtggcatcgctccgggcagggactacgtcggggggtactactaggactccgtgagacggctaaaagcattgcggcagggccagaactcgcctccggctcagacagcagaccctgccgcaataacgccgtctcccgcagcccaagtagtaatcacccctcctccgcagcagcccggcccgatgccaccttcctctggctgacgcttccaaccgacaggaaaaacatgcggggggatggaagcggactgggcgtcctgtcctgaaatgtcagactggtacagaatattcctataagtattgaagaatacagaaacaggatcggcacagcgtatcaccataaatatcgaagaatacagggaccagatcggcccagtgtatcaccataaatatcgaagaatacagggaccagatcggcacagcgtaccatcataaatatcgaagaatacagggagcagatcgcagatcggcacagtgtaccaccataagtaccgaagaatacagaaaccagatcggcacagcgtaccattttgagtaccgcagcatacagacaaaagtcaacaacgcagcacacacaacaacgaagaattacttccgtg

SEQ ID NO: 252 - DNA, 16603 bp, Unknown
  gut microbiota DNA sequence
catatgttccatcaatgtattcagaaactattttgactttttcttcataagtaaatttatgtttgaatgccataaagaaagctcccttctaaataaacaagattttattatttctcttgtctacttagaagggagcatatcattttttagtgcgacagcctctttgtactgaggtgattatagttcagagaacaaaatatgtcaaccctctattttttattactttttgtaaaaaacatataattgctgataattacaaataagggttatcaaaatacagatttcatgatatgataaacctattagatagcgtgagacatataatggggatatgtatctcgcagaaagaaaagggagggttttattatgggtgaaagtatgatcacatcgtttgacggaacgaaactgtatctgaaaaaagaaacggcagcagacaataaagctgtgatcgtgattgtccacggactttgtgagcaccagggtaggtacgattattttgcggaaaaacttcatgaggcgggaatcggaacctatcgttttgatcacagaggacatggacggtctgagggtgaagagactttttattcagatttcaatgagcttctggacgacaccaacgtagttgtggatatggcaattgaagaaaatccggatattccggtatttcttcttggacacagcatgggcggctttacggtttctctgtacggagccaaatatccggacaaaaagctccgggggatcattaccagtggtgcgctgaccgcagataacggcaatctgatacgtggtgtgccgggagaaatggaggtacatacgcgcctttccaatcagctgggttcaggcgtatgctctgtacaggaagtggtagactggtacggaaaagatccatacaataaacagtcctttacagcggggttatgctatgcgatctgcgacggacttgactggttcaaagagaaaaaagcagagttccattatccagtccttatgacacacggcgagaaagacggtctggtaagtgtacaggatacctatgatttctttaaagaagcaggatcaaaagacaagcagatgaagatctacggcggactttttcatgagatcctgaatgagtattgtaaagatgaagtgatcggggatatgatccggtggatggaagtgaggatctgaatataaacaaattgttttacaagtagcagcaaagccaggtggaaacatataacacctggctttcttttgcaaagagattctgttacaatagcaggatgaaaacaagaagatagaacaggagaaaaataaccatgtcaaatatcatagaaattacagatttcaacgctccggagctggatgtatatgccaggatctcggagatacagcttttgaaccgggcagaaccggagaaggggatctttattgcggagagcccgaaggttattgagagagctttggattccgggtgccagccgatttcttttctggtggaacataaacatgttgagggtgaggcaaaagaactgatccgtcattgtggagacatcccggtttatacggcagaatttgatgtgttgacgcagctgaccggattcaagctgacaagaggaatgctctgtgcaatgcgccggccggcgcttcctgatatagtcgatgtatgcaaaaatgcccgcaggatcgcagttctggaaaatgtggtaaatcctactaatataggcgcaatctttcgttctgcagcggctcttgggatggatgcggtgctgctgacaccggggtgcagcaatccattgtaccgccgtgcgatccgtgtcagtatgggaaccgtattccagataccatggactttttttgatgaaaaaacagagtggaaaacggaaggaatccggtctctgaaagcgatgggatttaagacggcagccatggctcttagggaggattcctttgatattgatgatcctcatctgatggcagaagaaaaactggcagtagttcttggaacagagggggatggccttgcttcggagaccattgcggattgtgattatacggtatgtattccaatggcacacggtgtggattcactgaatgtggcggcagccagtgcagttgcattttggcagctgggaaaacgctaaatatttaagagagttcccgttttttatgatcttgtattccggttttcttcttccatatccatcagatgaaaagaaagcaacagatacaggatctcgtttctgtctgtaagatctgaatccagaaaagctttgatcttatccagacgataaagaagagtacttctgtggataaataaagcgttggcagtatgagaaatgttctggttgtgctccagaaaacaacgcagtgtttcatagagatgagattgctttgcctcatccttatatttcattgacagaagcttttcgtgacagaccatgtaagcaggaagctttctggttgcctgttccagaatatagggcagagcgatggagtcaaaatagtggatactttctgcgggatttttgcgttttccaacctgcagggtaacagaagcctgcgtgtattgccggtggaaattgaaatgtccaagcatcttccggctgtatccggcgcttaacatgctgcttttgataaaaccctcgatcttatcggaaatctcatggatagtcagagtgcagagatccagattgataaaaagcaccgcatttcctttatattcggtagcacagctggccgggattgtattttcaagataattacagatggcattgagggtcagatttttctggtcgatcagcccagtctggatcaaaatacattgatatatatgggaagaaagccaccctacatttgtcagctgctgactgacttttacataatcagctccgggatcagtcagaatggacataaaaatctgatgcagaggaaaagctttatcccggctgtgcatgattcctgtggaaagtgcatggaataccatctgggaaaggtactccagaacaaaaccaaacgtatcatccaggggaacctcaccttcggaaaacatcagcctgtatactgctttatcattattggagatatttacgcaaagagaaggagcagtaaggccatttcccggataataaaaatatccggctttataaaaagcctcttcgtaatgaggatcctgcttcaggctgtccacaatagcccaggaattttcagtggaacccaaaacagaattggaaagatcacttagattccagtctctggaggcaatgatagtaaaatccataccgatcagcatcattggattgggaataatggaagctgtaagatccagaagctcctggatagatgcgttccggagacgggaatccatcagggactgattccactgatcatagaggataaaaatatcctgaatcctgttaaagacaatattgactggaatatcttcagggatgatacacatgtttggctgagttaattcgtagttctgatagatttttccaatcatcaggaacagaatatttttgggatgatgaaaagtgagctgaaaatccggatctgtgataaggtaaacacgcccatcctgaagagaggtgttcttttcaaagcaggaagggcaggaaagggtgggggatgtatccagcctggatgtatgcatggaaaatgatttctgcaggtgatagcatatgagttttgcactgagtttcaaggaaaatcctccttcctatattttgtaggaaaaaacaggaataatagccatattatgtggaattgtgattcttttgatttacagtataatagaatcataaggaaaaaacaagtgcagaaacaagccttttatattggggtgtggcaaaacaagtgcggaaaaaagggcagggctgtatgtctgttaatgatcttccgaagctgatcaaagaatatggaaaagatatcacatttatgggtggtatcgataacggtaaagtagatcgctttgactggaatcaggaaatgatcgaagcataagacttgttaataagaagtaaatagaataacaaaggtcggaaaagcctgcaaaacccagcagaaaagtgcttttccggcctttttttgtgaaattcaggaaaaaataaatttgtaaagcaaaaacccttgacaggtgtgtcggaatcgtgtatgatagccaaggtgattacagatggagaaatttgtagagcagacatttttatttgatttttatggagagcttctgacagagaggcagcggcaggtgtataccagtgtggtatttgaggattattccttaagtgaggttgctgaggaacttggcatcagcagacagggtgtacatgatatgatcagacggtgcaatcggacgttggaagaatatgaagagaagcttcatctggtcgagaaattcctgaacatccgcagtcaggtcataaagatccatgaactggctgacaagtaccacgccgaagatattgcggcgatttccaatgtgatattagaggagttatgatcaatggcatttgagagtttaacagataaactgcagaatgtatttaagaagctgaagggcaagggccgtctcacagaggctgatgtcaaggtagcactgaaggaagttaagatggcgcttctggaagcggatgttaactttaaggtcgttaagcagtttacgaaatccgttcaggaaaaggctatcggacaggatgttatgaatggtctgaatccgggacagatggtgatcaagatcgtaaatgatgagctggtcaacctgatgggaagtgagacaacagagcttccgatcaaaccgggaatggatcttaccgttcttatgatggttggtcttcagggtgcaggtaagacaacgacggttgccaagctggcaggcaaactgaaatccaagggaaagagaccactgcttgtggcctgtgatgtttaccgtccggcagcgatcacacagctgcaggtaaacggtgagaaacagggcgtcgaggtcttttccatgggagataagcagaatcccgtggatattgcaaaagcagctatcgagcatgcgaaatccaatcagcagaatgttgtgctcatcgatacagcaggacgtcttcacattgatgaggatatgatgcaggagcttgaggatatcaaagcgaatgtgaatgtagatgctacagtgcttgtagttgatgccatgacaggacaggatgcagtaaatgtggcacagaatttttctgataaagtcggcattgacggtgtgatcctgactaagatggacggtgatacacgaggcggcgctgcgctttccattaaagccgtgaccggcaaaccgatcttctatgttggtatgggagagaagctttcagatctggaacagttttatccggaacgtatggcttccagaatccttggaatgggcgatgtaatgagtctgatcgagaaggtggaagcatctgtggatcaggaacaggctcaggagatgcaaaagaagctgaagaaaatggacttcgacttcaatgattatcttaccagcatggagcagatgaacaagatgggtggtatttctagtatcctgaacatgcttcctggaatgggcggtaagatgaaggatatcgagggtatgatcgatgagaaggctatggaccgtaccaagtccatcattctttccatgacacctcaggagagaagtaaccccaacattctgaacatctcacgcaagaaccgtatcgccagaggcgccggagtggatattacagaagtaaatcgtcttgtgaagcagtttgagcagagcaagaagatgatgaaacagatgccgggattaacaggcggcaagatgaacatgggaaaaagaggcggctttaagcttcccttttaataaataacaataaattttcagaaagataattggaggaaaacaaaaatggcagttaagatcagattaagaagaatgggacagaagaaagcacctttctatagaatcgtagtagcagattcccgctgcaaacgtgacggaagatgcatcgcagagatcggaacatatgatccgaaccttgacccaagcgtatacaaaatcgatgaagaggcagcaaaaaaatggcttgcagctggtgctcagcctacagaggtagttgctaagcttcttaaacttgccggaatcgagaaataatacctgacagatttggatctgtgtcctcaatgaggcaggagcaaggaggtatgtaatgaaacaacttgtagaagtaattgcaaaatctcttgttgaaaatccggatgaagtagtcgttactgagactgaaaaagacgacgcgattgttgttgaactgaaggtcggaccggccgatatgggtaaggttatcggaagacagggcagaattgccaaggcaatccgtactgttgtgaaagcggcttcttcaaaaagcagcaaaaaagtgattgtagatattctgcaatgaaaaagagacaggagctgtggattccatggctcctgtttttactctgaaagggagcaaaaatggaagatttattaaaggtaggagttattacaacgacccatggcgtccgtggtgaagtaaaagtttttcctacaacggatgacgcagagcgttttcttgatattgaatatgtgcttctggatacaggaaaagagcttcgcagactgaatattcagaatgtaaagttttttaaaaatcttgcgatcctgaagtttgaaggcattgacaacatcaatgatattgaaatgtataagggccgtgagctttggatcccacgtgaagaggcacaggagcttggcgaggacgaatattatgtggcggatctcatcggaatggaggtacttctggagaatggggagaaattcggagtgctccgtgatgtgatggagaccggcgccaatgatgtttatattgtagatcgtgtggatggcgaggaaatcctgcttcctgcgatccatgactgtgttcttgatgtggatgtggaaaaaaataccatgactgtacatttgatgaaagggcttgtttaaatgaattatcatgtacttacattatttccggaaatgatcgagaacggaatgaacacaagtattacaggccgtgccattacaaagggactgttatccctggaagcgatcaatatacgggattttgcattcaataagcaccagaaggtagatgattatccttatggcggcggagcaggaatgctgatgcaggcggagccggtatatctgtcttatgaatccattgcagaacgtattggaaggaaaccccgcgtgatctttctgactcctcagggaaaaaccttcaatcaggatatggcaaaagagtttgccttggaagaagacctggttttcctctgtggtcattatgagggaattgatgagcgtgttctggaagaaatcgtaacagactatgtttccattggtgattatgtacttaccggtggagaacttccggctatggtcatgatggattctatttccagaatggtaccaggtgttctgaataatcaggaatccggtgagacggaatccttttccgggaatcttctggagtatccccagtacagccgcccggaggaatggcatggcaaaaaggttccggaggtgctgctttccggacaccatgcaaatgtggataaatggagaagagagcagtctatcatccgtacagccaaatggaggccggatcttttaccaaaagctgatctgaccaacaaagagtggaacgaggtccgcaggcttcgcaaacagtggaaagaggaagtggaaaaataattatgaaaacatcagatttttattatgatctgccgcaggaactgatcgctcaggatccgctggaggacagaagttcttccagactgatgcatctgtccctggaagatggaagtatcgaacatcgtcattttaccgatatactggattacctgcataagggagactgtcttgtgatcaatgataccaaggttatcccggcacgtctttatggtcacaaggaagaaactggagcgctgatcgagatcctgcttctaaaacgccgcgaaaatgatatctgggagtgtcttgtaaagccgggaaaaaaagcacgtcccggtgcaaagatcacttttggtgacggtatcctgaagggtgagatcattgatattgtagatgagggaaaccgtctgatccagttccattatgaggggattttcgaagagatcctggatcagctgggagaaatgccgctgccgccgtatattacccacaagctgaaggataagaaccgttatcagactgtatatgcaaagaatgagggatctgctgccgcacctaccgcaggacttcacttcacgccggagcttcttgagaaagtaaaggagaagggtgtgaatattgcacatgtaactttacatgtaggtctcggaaccttccgcccggtaaaggtagatgatgtagaaaagcaccacatgcactcggagttttatattgtggaagaagatcaggcaaaactgatcaatgatacaaagaaaaacggtggaagagtgatttctgtgggaactaccagttgccgtaccctggagtccgcagccggaaaggatggaatcgtgaaggccggaagcggatggacagagatctttatctatcctggatataaattcaaagctatcgatggactgatcaccaatttccatctgccggagtccacgcttctgatgttagtttcagcccttgccggaaaagaacatattatggctgcttatgaagaagctgtgaaggaaagatatcgtttcttcagtttcggggatgccatgatgatcgaataagatttaaaattactttttatataaataatatcccaacggatcgtagcatggaaacatgcagcacaggatctgttgggatattattttttgttatgctatttattattcactgtcagagccttccgatgtagcggatgaagaatccgcggcaggaatcgcagcactgcattcctctatcttggatttgatcctggatgcctcatctccggatgcaggagttggctgataattgttgtagccatctgcggaagaaatagaacagggaatgatattggtcacgttatcagcctgtacgccttctgaggtgacagtgaaggtctgctggaagatcatggtgtccatatcacttggagaactgtttcctccaaaacagaaattgccaagactgtagacgatgttttttcctttataggtttcgattccctggagtacatgcggatgatggccacataccagatctgcaccttcatcgatagcaagacggccaagggtcatctgattggtatcaggaactgtttcagtctcattgccccagtggaagatcacaactataagctctgctccatctgctttgacctttgcgatattatctttcagctgctgttcgcgtccaagatgatccttcagctcgtaaattccgacaagaccaactttgatccccttgatgtccataactgcagtatcatcataaccgaagtgtgtaatgcccgcattgtccagagcagtcagagtatccgtgtagctctgctctccgtaatcgtggctgtgattgtttgcagtgtttacggcttcaacggaaccgctggtgagtatctgagcatattcggcgggtgctttaaatgcaaaggttttatcttctctggcatcggaatcagtgagagttccttcaaaattggcaattgtcaggtcatctgcctcaaagatgctttttacattcttaaagaaataatctttgccgttgttatcgtagcatgcgttcagacttgtgtcataatcaaaggtctcatcggtacccaacgtgcagtccccgactacgctgagcgtcagtgaaacgggatctttcacagcagcagcttcttcttttgccttttttgcggcctcctcttcctgtgccttctgcaaagcggcggcttctgcagctttccgggaagaaatgcatgcacgtgcggaaaaaatgatcacaagaacaagtatgatcaggatcccgccagctgcaagaaacattttctgacggcgtacctggtaatatctggattttttgctgatgtcattcctgcgagtcccagtggaatgtgaacgggaattacgggatgcagaaccagaatgcttccgccgtgcttcctgtgctctggcggcttctctgcgtgcctgctccggatcatggccatgaggcggccgccttcgattgtcgtttgccattctttttctccttcgtatgtaaagatatctttattatagaaagaatggtaagtattgtaaagaaagaatcgcggacttttcagaaaaagaagtttttgatataataattaggccaaaaggcagaaatataaactacagggagatggtgctgatatgatattatatatcggaaatcatacaagttcgtccaaaggctatgctgccatggggcgtcagatgctgaaaaacggtggaaacacgttcgctttttttacccgcaatcccagaggaggcaaggcaaaagagatcgatcccgcagatgtggaaagatttctggagctttccagggaaaatcattttggaaagctggtggcacatgcaccgtataccatgaatgcctgtgccgcaaaagaaaatctgagagattttgcaagagagatcatggcagatgatctgaaacgtatggaatatacaccgggaaattattataattttcacccgggcagtcatgtagggcagggaactgagacgggaattaccaaaattgcggaaatcctcaatgatgtccttacagaagaacagagtacgaccgtccttctggaaactatgtccggcaagggttcagaagtaggagcaacgtttcaggagcttcgtgatatcattgacagggtggaaaaaaataataaactgggtgtttgcctggatacctgtcatgtatgggatggcggttatgatattgtccatgatctggatggtgttcttgatgagtttgaccgggtgatcggcctttccagattgaaggctgttcatcttaacgacagtataaatggactgggcagtcataaggatcgtcatgcaaagatcggcgaaggtcagatcggcctggatgcacttgtgaatgtggtgtgccatccggctcttgagggaattccctttattctggagacaccaaatgatgatgaaggatggaaaagagaaatttcacttttacgagaacgatattccatgaaaggagattgatccatgaaaaagttcagatattttatcctggtggttacgggggtggcggcagtgatgctgggaggctgcaaagataaggaaaaatacgacgaatccgcttttcaggatgacttggaacctctgagtgaggatgaagtggaggccatggaccagaatggtgacgatgagatggcagtagctgatgaaagcgacctggagcagctgcaggattctgaaaatggtgcaggagcaggagatacagatgggtccgattcatcggatgcagcagactcgcagagcgaaaagaaactggatgaaaatggcacttatacggataaagatgaagtggcccagtatatttatgagtatggccatgtaccctccaatctgactgctgcagactatgataatgcagacagtatgcttccggtagaggatggcgtaacctatcagcagtgcagccttgatgatgcagggaaacagaagctgatcttcactcaggatgcaaagcgcatttattacacagacgatgacggacagtcttttgacgagatctattaaaatcaaaagaacaaaataagacccccggatacagataaacgatcagtatccgggggattttgcatgtcaggtctgagactgatcagtggaccagatttttcatttcagctccatccataaaagtttttgcgttttccagggttgtctccgcaatattggtcagtgcttctaccgtaaagaatccctgatgtgaggtcatggtcacatttgggaaggacagaagacgctggatcgtggaagtaggaagaatgctgcttgacatgtcttcatatacatatgcggattcttcttcgtaaacatccagaccaacggcgaagaatttgtgatcacggatacctgcgatcagatcatctgttttgatcagtccacctctggaggtatttacaaggatcacaccatctttcatttttgcaatcgtttcggagttgatcagatgctctgtttccggagtcatcggacagtgcagactgatcagatcactggtggaaagaagttcatccagtgaaacatactccagaaagtcaagatttttattagggaaaagatcataagcaattaccttcatgccaaagccgcggcagatttttgccattgcctgaccgatttttccggtgccgatgatgccggcagttttctgataaaagttaacgcccatgagaccgttcagtgcaaagttattttcacggcatttgatatatgccttgtgggtgtgccggttggcggtaagggccagtgccatggcgtgttcggcaactgcttccggagaataaccgggaacacgtgccacctggatcccacattttgctgtagtttccagatcaacattattgtatccggcacagcgcatcaggatcagttttacaccctggcggtgaagttcttcaatgaccggtgcgccgagatctgcatttacaaatgcacagatggcatcgtagccgtgggcaagagctgcggtttcttcatggatatttgcttcaatgaatttaatttcaatacctggataagatggaagcagcttctcaaaaaattccctatcgtagctcttggtgtcataaaacaaaattttcataattgttgctcctctctggaaataattattttccgaaaaaataataccataatagtaggaatttggaaagtggggaaagcgataaaatttatcaaaaaaatggttttgttttggaattatgatatccataataaataaaaattatacgaaatacaaaaaaaagagagcattttatgcactgtcatctgatggaacagatgttgtgatacatgaaaatgctctctgtctggatatgagataattattcagccagactataaagatcagaatagaattccggataggagatgttgacacattctccgtttttgatggaaagtgttccctcacaaagcagtcctgctactgcaaaagacatggctacacggtgatccagatgagaatcgatctctgcgccatgaagggcttttccaccatgaatgatcatgccatcttcggtttcctggatatctgcgcccattttccgaagattttccgtcataacctggatgcggtcggactctttgacacgaagctcctgtgcatcccggataaccgtggttccttctgcaaaagctgccataacggcgatcatcggaagttcatcgatcagagtaggaatgatcgcgccttctattgtggtcccgtgaagcgcagaggagcggatcagaagatcggcagtaggttcgccctctgtggtttcattgagaagagtgatatctgctcccatggccctgcatacacggaggatgccgtcacgggtcgggttgatccccacatttttcagaaggatctcactgttgggaacaagaagacctgctgcgataaaataagctgcagaagagatatctcccggaaccaggatctcacgtccgtaaagagatgggtccggtttgatggatgctgttgttccctctgcggttacattggcgccaaagtaattcagcatgatctccgtgtgatttctggaaaggaccggctctgttacacgggtaatgccgtcagagtacattccggcaagaagtacgcaggattttacctgggcagatgctaccggagaattgtagtggatggcatggagcttttttccggagatcttaagcggtgcacatccgtttccgttgagacttacgatatcggcacccatttgggaaagcggagtcatgatccgtttcatagggcgtttctggatggaagcatcgccggtaagctctgatacaaagtcctgtcctgcaaggatcccggagatgaggcgggtggtagtaccgctgttaccgacgtcaagagtctctgatggagcacagagaccatggagaccttttccgtggaccaggatctctccttctgtattttcaatgttaatacccattttccggaaacaggaaatagtggagagacagtctgcaccctccagaaaatttgtgattttggtagtgccttctgcaagagagccgaacatgacagctctgtgagaaatggatttatctccgggaatggcaagagaaccggataatttttttgcttttttgatttccatattagtacctgcctgtattgttatttttgaaatacatggcagcagatcggatatctgctgccgtttatatatcagcgttcgcagatcttgtaattacgttttgtaagaagcactttagcctgctccagagctgcgtctgtataaaattcgatcttcagaacgccatcttcaaattctcggttgtggataataccgatatttttgatgctgaccttttctgttgcaaggatggttgcgatggttgcaatggcaccggcctcatctgccacatcgatataaaggacataggagcgggggatcaggctgttgtctacaatgtcaatggagtcacggtaatccttggagcttgcaaacatgtcaaagatgttgtcggcttctttgttgtcaatggaacagcggatctggatcagcatacggataaattcatccagaaccgtggaaatgtttttctgattttccagacagatctgttcccacataaccggtgaagaagaggcaatacgtgtgatatcacggaaaccgccggctgcgatcattttcatatactgggcgtcgttatccagaagatttacaagatttacaagagcggaggctacgatatgaggaaggtggctgactcctgccgtgatgaaatcatgttcttctgcagtgataacaagggggatcgcaccaagagaggcgatcagttctgtgaaatcagaaatcttttccaaagcaacttctcctcccggagtgatgatataataagcattttccagaagatgatcactggaattggaaaaaccgctgcgttcggagcctgccataggatgaccgccgatgaagcgtccttcaagtccgagctcggttactttttcgtggataacactttttacactgcctacatctgtgaggatacagttctttccaagagaatctttgatcttttccatgtattccacattaaattctacaggtgcacagagaaaaagataatcacagttatataactgctcatcgtcaatatcacagatcccgttgatcacgtttaaactgactgcctctgccagagcacttctgtctttgtcaaaggcaagcaggcgataatccgggtgaaattttcgtatggttctggcaatggagccgccgatcagtccaaggccgataaaacctatggttttcatagtacttcagagtcctttcaggttactttttacttttattctttaatagtgtaaatcacgactatattgtaaaagaaagtgtgaaaaatgtcaacaaatgttagcggaaacaggaaggccatttttatagttgtttaccgtaatgttttgcgaacagggaagagtaatagaaagttactgttcattggtaatattccgcgaggtgttttttgtgagcgaaggtcacggaaaacccgagacataccgcgcgaatttatgcgatcagcataaattctgtgcatcgcgaagcgtgttgctgagaacggagtaaacagtaacaatagaaaaaggcttgagaaatcggagatttcggacgtataatataataagaaaaaaacaatataagatacagaggagaatttatcatgaaatatcagtcagttatggatcttcacacacataccgtagccagcggacatgcatactgcacacttcgcgagatggccagggctgcttccgataaaggccttgaactcctgggaatcacagagcatgcaccgaaaatgcccggaacctgtcataagttttatttccagaatataaaggtagtacctcgtgaaatgtacgggatccagctgcttctgggttcggaggtaaatatcctggatgcggcgggaacggtagatcttgagcagaaaaccctggagaagctggacgtggtcattgcaagtcttcatgttccatgtatcagaccaggcagcagacaggagaatacggaggcctatcttaatgctatgaagaatccgtgtgtcaatatcatcggacatccggatgacggaagatacgaggttgactatgaggcgcttgtacagggcgccagagaatacggtaaagtcctggagctgaacaaccactccatggaccctgactgtaaccgtgagaatgcagtggagaatgataccatcatgctggaatactgcaaaaaatatcgggtacctgtggttatggacagtgatgcccattttgaccttctgatcggggaatttgatcttgccagagaccttctgactaaactggattttccggaagagctggtactgaaccgttctgtggatgccgtgaaaaagtatgtaaaccggaaattctgaaaga

SEQ ID NO: 253 - DNA, 59117 bp, Unknown
  gut microbiota DNA sequence
gaacatattaagtaagacaaacagggaggtattacatatggacgttttcagaacagaccgaatcagaaatgtagtcctattaggtcatggtggcgcaggcaaaacaacactggctgaggcaatggcttatctggcaggtatgacaagcagactcggacgtgttgaggatggcaatactgtcagcgattatgacaaggaagaaataaagagacatttttccatcacaacttctctgatcccggtaccatgggacaagatgaaggtaaatgtactggatactcccggatacttcgattttgtgggagaagttgaggaggcagtcagtgctgcagatgcagcgatcatcgttgtttccggtaaggccggtgttcaggtaggaacacagaaagcatggaatctctgcgagaaatataagcttccgcgaatgatctttgttacagatatggacgtggatgatgtcagctatcgtgaggtcgtggaagagctgacagagctgtacggcaagaggatcgctccccttcatttcccgatccgtgaggatggtaagtttgtaggttatgtcaatgttgtgaagcaggcaggaagaagatatattgacaaggccggcaaggaagaatgcccggttccggattatctgacagaatatcttgagaaatatcatgaaactctgatggagtctgttgcagagacaagcgaagagtttatggatcgttatttcgagggagataccttctccgtagcagaggtttctgcagctattgcaaccaatgtacaggatggaagtattgttccggtatgtatgggatcaccggtgaaccttcgcggtgtatctaaccttctggatgatatctgcggttatttcccaagcccaagcggacgttcctgcaatggtatcgcacagaagactaacgagatctttgaggccaattatgactttgccaaggcaaaatctgcctatgtatttaagaccatcgcagatccgttccttggtaaatattctctgatcaaggtatgctccggtgtgctgaaatccgatgatacacttcttaatgtagagaagggaacagaggagcgtgtaaacaagctttatgtcatggaaggttccaaaccgatcgaagttccggagctttttgcaggggatatcggtgccatcgccaagcttggcagtgtacagaccggtgacagccttgcaaccaaggcgaatccgatcctttatccaaaggctatactttccacgccatatacatacaagagatttaaggcagtgaagaagggtgacgaggataagatcgcacaatcccttgccaagatgatgacagaggacagaacattgaaggttgtcaatgacagtgcaaaccgtcagagtctgatctacggtatgggtgatcagcatctggatatcgttgtcagcaagctgaaggagcgctataaagtggatgtggagctttccaaaccgaaggttccgttccgtgaaacacttcgtaagaattcagatgtggaaggcaaacataagaaacagtccggcggacacggacagtatggccacgttaagatgcgctttgagccatctggtgatctggagacaccttatgtatttgagcaggtagttgtaggtggtgcagttccgaagaactacttcccggctgttgagaagggacttcaggaatgtgttctgaagggacctctggctgcatatccagtcgttggtgtgaaggcaaccctttacgatggatcttatcatccggtagattcttctgagatggcatttaagatggcaactatccttgccttcaagaagggctttatggaagcgtctcctgtacttcttgagccgatcatctccatgaaggttacagttccggataaatataccggtgatgttatgggagatctgaacaagagacgtggtcgtgttctcggaatgaatccggatcacgaaggaaataccatcattgaggcagatgttccgcttcttgagatttatggttattccacagtccttcgttccatgaccggtggaagcggagatttctcttatgaatttgcacgctatgagcaggctcctaatgatatccaggagaaagagatcgcggcacgcgcaagcaagattgacagtgctgacgaataaacagagagatcctttaaggcagaataaagagttgacaggctgcagcatttgctgtagcctgtttttagatgcattcgtgaataagcagtcagagaaacgaattgcgctcatacaggttattgaagtatgagcaaaaaagaaaagagagaggacaaaaaatgttagtatgtgattatatcgtggaacagattgacggagattatgcacatttgaagcgtgtggatcagccggaggaggaactgaaagtggttgccagagcattacttccggcagaaatctatgagggctgtgagcttcattatgagctgatgcagtattcaatgaaatgataaggctgcaggatatcgcggatatggcaggtgtcagtcgtacaaccgtatccaatgtgatcaatggaaatacaaaacgggtttcacagagcaccattgaccggatcacggcgatcctgaaggagcagaattatgttccccacatgggatctgtgatgctatccggacacggatcaaggatcattggagtggttcttggtttttccttcattcatggtatgcagtctctgcaggattcttttgtgggagagattaccggaacgctgcaggtcgaagcagaaaacagaggctattatattatgctcattggcggtgaacggatcgataatgtggtagatatggcatcccgttggaatgtagagggtcttatcattatagggtataatgaagaacagtatcatcagctttccagaaagctgaataaaaaaatggtattgatcgatgcctatccgaagggtggatatagctttcagaatgtaggagtggatgattattccggcggatatcagatcggggaatatctgcattcctgtggataccaccgggcactttttgttgcggaaacagagcaggacagtgattatgccagatggcttggattcaaacaggctatggaaaaaaatggcggcttctgcagccgctcccgctatgtggtggttccccaggaaccccggcgcagactgaaaaaatatgaagagctgctgcctcattttctggagacaaaggctctggcattttcttcggattacacagctgtggaggccatcaatttttttacagacaagggaatccggattccggatcagatttccattaccggctttgatgataatttttatgcgcagatcgtcaggccaaagctgaccaccattcatcaggatgttcatcagaaagcacttctggccttgcggaagctgcttcttatggcagagggaaaggaacctgccgaaaaaaatgtaaaaagccctgtctggcttgtaaagagagattctgtaaaagagtagcaggatctctttttttatgttgtgatgacttttcctggtgcctctccggaatgtggtaggaattctttcgccggacagtagtgctttattgttaaaactgcataaaaaaaacaaaaaagtttggcagtaatttaagtttcacgagaaacctgttgattttaaagggtggataggatatgctgatttcagaatcaacagaaaaaggaggccatttaccatgaaaaaaaactggtggaaagaaagcgtggtatatcagatttacccgagaagttttaaggacagcaacggagacggaattggtgatattcccgggatcatagaaaaactggactatctgaaagaactgggagtaaatgttctctggatctcacccatgttggaatctccgcaggatgacaatggctatgatatttccgattaccgcaggatctataaagaatatggaaccatggaggattatgaaaagcttcttgaagaagcgcataaacggggcattaagatcctcatggatctggtcgtaaaccatacttccgatgaacacaactggtttattgaaagcaggaaatccaaagataatccttacagggattactatatctggagagagccggtgaatggaaaagaaccgaataactggggaagtgcgttcggaggacctgcatgggagtatgatcctcagacagagatgtattatcttcacctgttttcaagaaaacagccggatctgaactgggaaaatgaaaaggttcgtcaggaagtttacgatatgatgaatttctggtgtgaaaaaggaatcgacggtttccgaatggacgtgatcagcatgatctccaaggatcagtcatatccggatggagaaatgaatggaggattatacggtgattttggtccttactgcgtccatggcccgaggatccatgagtttcttcaggaaatgaacagagaggttttatcccgatacgatgtgatgacagttggagaaacctccggtgtgactatcgaagaggcacagaaatatgcaggtgaggacaggaatgagctgaacatggtgtttcagtttgagcatgtagaggatcagggatcagaccatggtaaatggactaccgagaaatacgatttccaggaatttaaaaaggttatgatcaaatggcaggaagagcttgcgggaaaagcatggaacagtctgtttcttggaaatcatgaccagccaagaagtgtttccagatttggaaatgataatccggcatacagggaaacttcagccaagatgctggcaacctgtcttcatatgatgcagggaactccttatgtttatcagggagaagagcttggaatgaccaatgcttattttacagagcttaaggattatcgtgatatcgagagtattcagtatttccatgaatatacagaagcaggtatttatacaccggaatatatgatgaagtgcctgatgctgagaggacgtgacaatgccagaacaccaatgcagtgggaggattctcatcaggccggctttacggagggaacgccatggatcagggtaaactccaattataaggagatcaatgcgaagcagcagctttcagatccgaattctattttccattattatcagaagctgatccgtttaagaaaagaaaaaccggtgatcgtttacggtgtttttgaggcactttacagagatcatgatcagatttttgcatataccagaacccttgagggagagaagcttctcacagtctgcaatttcagtgagcatgtggcagaaatggaaattccggaagaatttcagaaaaatgcagaatgtctgatcacaaatcttggaagaaaggattttggaaagaaagtggtcctgaaaccttatgaggcatttgttctttacagaaatctgtaacaggagagggaaaaatgataaaaaaatatgtatatggagagccctttgagactgaggcactgacagaaaacattgagacagcagaaggaaagccaggatatggagaaatctgtgcagaagatggattttcttttacttatatcatggatgaagaggatatcgtctacggattgggagaatccaaccgcggtatcaacaagagaggattcatttacaccagtaactgtaccgatgatccggagcatacagaggataaacattccctgtacggtgcacataatcttatcattgtgtccggaaaagaaacctttggaatgttttttgactatccggcagcgatcacctttgacattggctataccagaatggataccatgaaggtaacctgcgaaaatgcagacctgaagctttatgtgatcgaaggggagagtccctatgatattgtaaagcagttccgtcatgtgatcggaagaagctatatcccgccgaaatttgcctttggatttggccagagcagatggggctatactacaaaagaggattttcggaaggttgcagctggatatcgtgaaaatcatattcctattgatatgatctatatggatattgattatatgcagtcttataaggactttacattaagtgaagagaattttcaggattttccggaattcgtaaaggaactgaaggatcaggatatccgtctgatcccgatcatcgatgctggcgtcaaggtagagccgggatacgatgtttatgaggagggtgtcaaaaaccgctacttctgccagagagaggacggcagtgattttgtagctgctgtatggccgggggatactcattttccggatgtattgaacaaagatgccagaaaatggttcggtgacaaataccgtttcctgatcgagaagggaatcgacggtttctggaacgatatgaatgagccggcgatcttctattccacagagggaatgaaagaggtcaaagagcttgcaggagaatttgcaaaagatacggaaggaaagatccatatctggaagatgcagagtgcacttcgcaatgttgcaaacaatccggaagattatcggagattttaccataatgtggatggcagaaagatccgccatgacaaagtccataacctgtttggctacaatatgaccagagcagcaggggaggcttttgaacggatcgatccggaaaaacgttttctgatgttctccagatcatcctatattggtatgcatcgttatggtggaatctggaccggcgataataaatcctggtgggctcatatccttttgaacctgaagatgatgccctctctgaatatgtgtggtttcctgtatgcaggagcagatctgggtggatttggcgctgatacaacaagagaactactgcttcgtttcctggcacttggagtattcacaccgctgatgcgtgatcatacagcgatcggtaccagagagcaggaatgctaccagtttgaaaatgtggaggatttccgtcatgtgatcggtgtaagatatcgtcttattccatatctttacagtgaatatatgaaggcggctctgaacgatgatatgtatttccggccgttgggctttgtttatccggaggataagattgccgtacatgtggaagaccagctgcttcttggaaatgagatcatgatcgctccggtttatgaacagaacgcaagaggccgttatgtatatcttccggaggagatgaagtttgtgaaattccttccggatggaaccattgcagaggagatccttgaaaagggtgttcattatgtagaggtggcactgaatgagattccgttgtttatccggaagggaaaatgtattccggttgcagaagcagcggaatgtgtggcagctctggatacaaaaaatatgcagcttctcggatatgaaggtgcggagtataccttatatgaggacgatggggtccataaggattacgacagagaagaaaattaccgtgttctgaaaaaataaagtcagcaaaatgaaatataaatttctgtgttacatcatttacgttaaacagtataaagaatacaggatgtgaacagttgataaacagaaaagccgtaagtatatgtgaaagtttcttaaacatatatcttacggcttttgctattactgctttacataaaatattttatgtaaagtaattcacattctgtttaaataacacttcagaaagatttgtttatgcttcttcctcaatctggataacatttttcagtacagagcagcatgccatgtcaccgataacattgacacaggtggcgcccatatcacagagggtattgatgctgatataaacaccaagaactccggcaggaagtccggccatagttgccagtgctgcgaaagatgcgatagcaccaccgggaacacctggagtaccaacggaaagcagtacgtttgcaagaaggataatgatcataagaggaatacttacatggatcccgcaggcgtttgcaaagaacatgatcataaaggacatcaggatagatacagcatccatattaacggtagcaccaagaggaatggcgatgctggtgatctggttggatacgcccatttcttcttccatacactgcttgcttaatggaatggttgcggagcttgagcaggttccgaaggcgttcagtgctgctggcaggatcgctttcaggaatttcagcggactctgtttgccgatcagctttacagagagaccgtacactacaatagcgaagccaaagaatgccacatacagaatgacaagctgtgttgcaagggaaatgatcgtttcagttccgttggcttccacaaccggtacgatggtacagaaaacaccgatgggtgtaaagtacatgatggttgtgatgatcttcaggcatacttcattgatggaatcaattagattcaggaatggagttcctttttcaccgactgcgatcagtgtgaaaccgatgatcagggcaaacaccagaacctggagcatgtttccgttagcaaatgcggcgatcgggttggaagggatcaggtttttcagggtgtcaaggatactgctcatttctgtagcttggatatctgctgttgccatctcaaatttgactccctctccgagatggatcagtcttgggatgatcagtccgcacaggctggcaagtgccgttgtgcagagaaaatagatcatggatgctgcagtgatctttccggtagtacgtgcgtttccgatggaacagattccaatgacaatggaacagaagaccattggaaagatcatcatgttcagggcgttcatgtagatacttccgatcagactggtcacagtgaggacaggttcaaaccgtccggccaggaaaagtcctgtgaggatacccaggatcagtcctgtaaagatcgcaccggtaatatgcttccggtaccaggaataaaaagatttcatttatgcgttccctcctaagataaatatgtatggtatgtataatataggaaaatacatgcaggaaattatatcatgtgaaaaaagaagcgtcaactaaaccaggccaggattgcaggttcatgtatattttgatggaaaagggctgtttttggatttttgtttgacaaatacatcataagtagttaaaattaatagcagtgtgtgaaagcattaaagtattaatactgagtaatttgtcaggaggaataaaaaaatggctgcaccttataaccatagagccatcgaagcgaaatggcgcacaaactgggagaaaaagccggtaaatgtcaatgatggcaagaaaccgaaatactactgtctggatatgttcccgtatccgtccggaaacggtcttcatgtaggacactggagaggctatgtgatctctgatgtatggagtcgctataaaatgcttcagggttattacctgatccatccgatgggatgggacgcttttggtctcccggctgagaactatgccatcaagatgggtgttcatccggcagtatctacagcagcaaacatcaaaaatatcaaacgtcagatcaacgatatcgcagcgatctatgactgggatatggaggttaacacaacagatccggaattctataaatggacacagtggatctttgtaaaaatgttcaaagaggggcttgcatatgagaaggagttcccgatcaactggtgcccttcctgtaagacaggtcttgcaaatgaagaggttgtaaacggatgctgcgagcgttgtggcactccggttaccaaaaagaacctccgtcagtggatgctccgcatcacaaaatatgcagacagacttttaagtgatctggataaactggactggccggagaaggttaaaaagatgcagacagactggatcggcaaatcctacggcgcagaggtcgatttcccggttgagggaagagaagagaagatcacggtctatacaacaagaccggatactcttcatggagcaacattcatggtacttgcaccggagcatgctcttgcaaaatctcttgcaacagacgagacaagagaggctgtagagaaatatatctttgatgcttccatgaaatccaatgtagaccgtcttcaggataaagagaagaccggtgtgttcacaggtacttatgcgatcaatccgctgaacggcgagaagcttccaatctggctttctgactatgtacttgctgattatggtacaggtgctatcatgtgtgtacctgctcatgatgaccgtgactttgagttcgcaaagaaattcgatattccgatcatccaggttatcgcaaaagatggtaaagaaattcagaatatgacagaagcttacacagaggcttccggaaccatgatcaactccggtgagtggaacggaatggaatcttccgtactgaagaaggaagcaccgcatatcatcgagaagctgggtatcggacgtaagactgtcaactacaaactgagagactgggtattttcccgtcagcgttactggggtgagccgatcccgatcgtacactgcccgaaatgcggtgcggtaccggtaccggaggatcagcttccgttaagacttccggaggtagaaagctaccagccgacaggaaccggagagtcaccgcttgcagctattgacgagtgggtaaataccacatgcccatgctgtggtgctcctgcaaaacgtgagacaaacaccatgcctcagtgggcaggatcttcctggtatttcctccgttatgtagataataagaataataaagaactggtttccaaagagaaagctgataaatatctgccggtagatatgtatatcggtggtgtagagcatgctgttcttcatcttctgtactccagattctacaccaagttcctgtatgatatcggagctattgatttcgatgagccgtttgtcaagttgttcaaccagggtatgatcacaggtaaaaacggaatcaagatgagtaaatccaaaggaaatgttatttcaccggatgatcttgtaaatgattacggatgtgattccttacgtatgtatgagctgttcgtaggaccaccggaactggatgcagaatgggatgacagaggaatcgatggtgtatccagattcctgaaacgtttctggaatctggctcttgacagcattgagaaagatatcccggctaccaaagagatggagaagacccgtcataagatggtatacgatatcaccagcagacttgaggccttcagcctgaataccgtagtgtccggatttatggaatacacaaacaagctgatcgctatcgcaaagcagaacaacggcgctgttgacaaagaaaccatcgagacagctaccattcttcttgcgccatttgttcctcatattgcagaggagatctgggagaagcttggtcatgaggattccgttttccatgcacagtggccggctcacgatgaggagcttatgaaggatgatgagatcgaggttccggttcagatcaacggcaagaccaaggctgttatcagtattccggcagagatctccaaagaagatgcgattgccgaaggaaagaaggcagttgcagataagatttccggaaatatcatcaaagagatttacgtaccgaagaagatcatcaatatcgtagtaaagtaataagataaatcaaaaacacccgaagcagggcggaagatatttctgcctttgccagggtgttttttatatggataaacatcgtgaagtaagtatgcacaaaaataactaatgttatttagaataaatgccaataatatttaggcattttaacacatttgcctagtttttggtcataccaattatattgtctattgttattcaaatggaaaaaacgtacagtaacaccatgagtcaggcaaagatagtaagaaagctttggtactcgaaatgcagtgtgacggaatgaagatgtccgtttagctagattgcatatttacattgagagaaataaggagagatagtatgagcgcaatgaacacacttaagaaattcggacttgaacaggcatttaactatgtttataaagatccggataagaattttatcaagatcatggactgggcagataaattttccggtggtggatttcctacacagagagcaatgatccgcgaagccatttctaatccggaacatccgtattatccgtttattcatagattggtaactgatattgatccgcatgttatgaaaactctggttgcaaacttctttatcaatgcaaatcttgcaggctggaagaaacaggatgaatgccgtgagaaatatggctgtaatatcccgtgggcaatccttcttgacccaacaagtgcatgtaacctgcactgtacaggatgctgggcagcagagtatggaaacaagctgaacctcacctacgatgagattgatgacatcatccgccagggtaaggagcttggcgtttatatgtatatttacacaggcggagagccacttgtaagaaaaaaggatctgatccgtctttgcgagaaacataatgactgtatcttcctttccttcacaaatgcaacactgatcgatgaggattttgcaaatgatatgcttcgggtaggaaactttgttcctgcgatttcactggaaggatttgagactgcaacagatggcagaagaggaaatggtgtataccagaaggttatcaaggccatcaatcttctcagagagaagaagcttgtatttggtatctctgcatgttatacgagtgcaaatttcgagtctatcacatcagaggcattttacgacagcctgatcgatcttggagcgtactttatctggtatttccattatatgccggttggaaatgatgcagcaccggagctgcttcctactcctgcacagagaagagaaacctatgagcgtatccgtaaataccgtgcaacaaagccgttgtttgcaatggatttccagaatgatgcagagtttgtgggaggatgtattgcaggcggccgtcgctatctgcatatcaatgcaaacggcgatatcgatccatgtgtgtttatccattattctgattccaatatccgcgagaaaacacttctggaagcactgcagtctccgatgatgatggcatatcatgacggacagccgtttaatgacaatatgtaccgtccatgcccgatgcttgaaaatccgcagaagctgagagaaatggtagaaaaatccggagcacattccacagatcttcagtcaccggagagtgcagagcatctctgtgcgaaatgtgaccggtatgctgaaaactggaagccggtagcagaggaaatgtggaaggaagaccaggagagaaaggcagcgaagaaaggctgctgatcctgaaacttaaaaaagcagaacttataaaagagcacggtaccggaaacaggtgccggtgctctttttttgaaaacggagggatcagaccatgaaaaaaatgattgataacatcagaaaatatctgccagcggtgctccttcttgtgcttctccttttctgtatccgttatagagaggatctgtctgtggaaaagattctgcgctatacgccgaaggaacctgttaaggctgcattgcttatgcttgtgttttatgccgtgaaaagtgtttcctttgtattccccattgcagttttgcagctggctgtaggacatctgttttctacaggaactgcacttctggtgaactttctgggaagagcagttacattggcgcttccttactggatgggacgtttttccggctcttccatggtggagaatcttacttccaaatatccgaagctgaaaacagtggtggactatcagaacggaaatccgctgtatatctctttttttatgagaacgctgaattttttgcccggggatgcagtgagcctgtttctgggcgcggtgaagatcccgtttgaagtatatatgctgggcgggatgctgggaacatttccgggagttatcctagccacgatatttggagcaaatatcaagaatcccggatcaccggcattctggctttccgcagtgcttcttgtgatgatcagtgtattctcgatcctgatacacaggcatatttcccggaagaaaaaataacagggctttctcttcctgcttttactgagaggaaaaatgtagtataatgcagacagtaaagaaaagaagggaaggaacatggggatcgatcataacaaaagattaaaggaacatttatattattacagtgcaagaatcagccgggatatctcaaatctgatcaagtggctggttcttgctgtcattacaggatgtatcgtaggagctgccagcacactgttttcttttacgttgaaggcagtgaccaattaccggaaggcgcatgaatggattttctttttgctgccattatccggacttgtcattgtatttttgtatgagaagcttggaaaagaggatggagggaccaatcaggttctttctaccgtgcgttccagagatgatgtgccgatcctttctgcgcctctgatctttatcacaacggcgctgactcatcttgccggtggttctgcgggacgtgagggagcagcgatccagcttggaggaagtattgccaaccagcttggaagatggatccatctggacgaggaggaccgtcatgtaattgtcatgtgcggcatgagcgcggcgttttccgcgctgtttggaacaccgatggcagcggcagtttttgcgctggaagtggtcagtgtgggcgtgatgtattatgcagcactgatgccgtgtatgatcgcgtcattgatcgcttccggatttgcagccggaatgggagtcacaccggaaagttttcatgtgacggatattccggcactgactgtggaaactggcctgaaaatgggagtgatcgctctgggctgtgcaattgtcagcattatgttctgtattgcgctgaatggtgcagcaggactttatggcagatggtttaagaataaatatgtcagggttgcagtgggcgcctgcctggtcattgttgtcacctttattctgagaacagatgaatatatgggcgctggtgcggagcttattgaaaaagcggtggaaaacggacaggcggatactttcgcctttttctggaaaatggtgcttacagcactgactatgcgcgcaggattccgcgggggagagatcgtaccttctttctgcattggagctacctttggctgtgtgatgggtaatcttatgggaatttctccgtcaatctgtgcagcctgcggaatggcagcagttttctgcggtgtgaccaactgtccgatcacttcgatcctgatcgcttttgaaatgtttggatttaagggagtatccttctatctgatcgcagtatctatcagctatgcagcatcgggatattatggcctttacaaggatcagaccattgtgtactccaaatataaagcaaaatatgtgaaccgacataccagattttgatatagaacgaaatgtgaaggggtgtgtatactggcataatatcttatggaataccgcatagacatggctggaaaatatctggacatctgcgaaaatctgatgtaatatattaaacgttagtatttacagaaaggcagattttaaggtatggaagagaagattcttgattttatcatggagtatgcacaggagaatgagggagttccgtttcaggtgatcgaggagaattttaatatcgttatggatgataagctgaaagatatcatcagtgatgcgatctgggacagggataatgtttccgatgtgatcatggaaagtgagcgttatgtgatcacctgttttgaagattaatacagggctatctgtgaccgttacggtaatggaattaagaaatctgatatgaggagaatgcatatagggcattctccttttttcgtcaatttgtcaaaagaatccaaaggaattgaagtccccaaaaaagaatggtatcctaaagaaaaaagtagatggggtggttgaaatgaacagcaaatatgagattagcacaaaagaaaaccgggaattcctgaaagcatcctgtgaggagcttttgaatttcggacatcggtttccttcaccgaatggaggttcctattatctgggggacgacggaacaccatggaaggacagaaaccgggaaacctggatcacctgtcgcatggctcatgtatacagtctgggtctgatgcttggccatgagggaagcggagagcttgcggatgcggcattgaaaggtctgaagggagagcttcacgatgaaaaaaacggtggctggtatgcaggtgtaacaccggaaggagatattgtgcccaataaacagtgttatgcccatgcatttgtgatcctggctgcatcttccgcactgacagccggaaggcccggggcgaaagagctccttgaagaggcattggctgtttatgaccggcatttttggaatgaagaggaggggctggcctgcgatacctggaatacagaatttactgtgctggatgattaccggggattaaatgccaatatgcatacggtagaggcttttctggcagcaggagatgtcaccggggataaaaaatatcacattcgtgcaggcaggatcattgatcatgtgatccagtgggcagaagataactcctggaggatcccggaacattttacgagggaatgggtggcagatcttgactgcaaccgtgaccgtccggatgatccgttcaagccatatggcgcaacaccgggacatggaatcgaatgggcaaggctgatcacacagtggacgcttgcaaactgtggagaagagaaagaaaaactggaaaaacatcttcaggcagcagaaaacctttacacaacagcaataaaagacggctggaacgcagatggtgcaccgggaattgtatacacgacagattggaatggcaaaccggtggtacatgaccgtatgcactggactcttgcggaagcgatcaatacctctgcagttctttatcaggtgaccggtaaggagaaatatgcgaaagattatgctgcgtttatgaagtacctggatgaagtggtcatggatcacgaaaacggctcctggtttcatcagctggatgagcagaatcatctgaaaggaactgtatggcccggaaaatccgatctgtaccatgcactgcagtctacactgatcccatatcataaagcagatacgtctattgcaccggcagtgaagaaaaaactggagatctgaacaaaatcgttttgcgatttttgttcgtgagcatgtaacgaagcggagtgcgaatgttcaataaaaaaaacttcctgtgtttacagaaaaatttctcaggacagatacttgcagagatacaggtatccggtcttgaagaaataagagaacacaggaaggtttttggtgaatagttattactccgtaacctctttcagatccgaaatatccggagaagccatgagagaataattggtgtaataaacaacgaaaccgggtttcgcaccggcaggttttttcacatgctttttctggatataatcgatctctaccttgggagcagagtgtcctttggagtaccaggctgccaggcggcctgcttcttcgaaggtacggtccggaagttcaccgtctttggtgcggacgatcacatgggaaccagccattttctttgcatggaaccaccagtcatttccggttgcgaacttgaaagtcagctcatcattctggaaattgttttttcccacatagatatcaaaaccgtcactggatatgtagtggagcggtttggatttcggctgggctttctggccttttttgtttgtgtagtgacgtttgatatagccgtactcagtgagctcttccttgatctgggaaaggtcactttcggatctggcgatatccagagcattggagatagattccagatgagagatctcactttccgtatctgtgatctgttctgtgacggcttcttctgtacgcttcagctttccgtatttatcaaaatatttcttggaattctgtgccggagtcagtgtcgggtcaagagggatagtgatctcctcgttggtgtaatagttcagtgccttaaaggatctgcagccttcctcaagcccgtatccgtaggtgttgatcagttcaccgtagaccttgaatttatctttttttgcagtatcattcagctgctttttctggatgttgtatttttttcggttacgttccagagcagtctgtactacacggcgaagatcggaggatttctggtggatacgtgtcagcagacttttggtagcataataggtctccagcataacagagacactgtcaaagatttcgctgcggtattcactgccaaactgctgataaggaaagacaccgtattccacaggctcctctccgcggtagacaatattcggggtgaactctctgttccggatctgttccataaggcggagaaaggtatgataaagatgggtgcaggctgcctcatccagggactgcgatgcatcgcttccgtcaatggatgcacggtagcagatctcctcagccattaccgggctcatacctgtgagtgaagtgtaaagcgccttggaaatattcacaggctttttacagatgtgctgtgtgaactcctcctcggaaacagtcagcggattttctttatccctggtattgggaatgaaatattctcttccgggaagaacctcacggacagagctcatatgagaagagacatgtttgatgctgtccaggatcatgcctttttcgtcacagaagatgatgttgctgtgcttacccatcagttccatgatcagacgctttctgcagggatcccccagctcattaagatgctccagctcaaattccaccacacgttccattccaggctgtttcacatcaaggatacgggcgcttccgatgtgctttctgagaagcatgcagaagttcggtgcggttaaaggactgatacggttcttatctgtaaaatagatcagaggaagggatgcgcttgcacttaagagaagacgtttctgtccatttgcgccctttcctgtgatcaaaagttcatcgttttccggctgggcgatcttgttgatacgtccgccttttaaattatcatcgatctctgccacgagagcagaaactgtaattccgtcaaatgccatgattttacctccatttcaacatcaatcattataacagtaaaaaaagagtttgactagggttttggaatgaactataataaatccgtatgcaatcattggctgcatttatcagcagctgataaacttaagaggcagtattggaggataacatgataaaaagtatgaccggctttggcagggcagaagcagtttccagagagcgtaaggtttctgttgaactgaaatccgtcaatcacagatatctggatctgaacatcaaaatgccgaaaagactcagctattttgagggagagatccgaaatgtgatgaagacttatatccgccgcggcaaagtcgatgtgttcatcacctatgaagactatacaatgggcggaatggctctgaaatacaatgcagagctggcaaaggaatatctgggctatctgaaccagatgagtgaggaactggggatcgagaatgatatccgtgtttccacactttccagatatccggatgtgtttacaatggaagagcaggctccggatgaggaagagctctggaattttctggaaggtccgcttcatgaggcctgccggaaatttgtggagacccgccagcgtgagggtgctaatctgaaacaggatcttcttgggaagctggacggactggaagcaaaggtcgatgtagtggaaaaacgttctccggaagtagtgaaggcttatcgggagaaactggaagccaagatgcacgagctacttgaagataaccagatcgatgattccaggatcgccgcagaggtgatacttttttcagataagatctgcaatgatgaggagacggtacgtcttcgaagccacatccacggaatgagaaagatcctggacgagaacgagggcgtgggacgtaagatggatttcatggcacaggagatgaaccgtgaggcgaacactatcctgtctaaatccaatgatcttattgtatccaacgcggccatcgatctgaagacagagattgagaagatccgtgagcagatccagaatatcgagtaaccgggcaggaaacaggctgtacacagacagaaagggagagcgtaaatggcgaaacttattaatgtaggctttggaaatgttgtcaattcacgcaagatcgtggctgtggtaagtccggatgccgctcctgtaaagcgcatgatacagagtgtcaaggggacccgaactctgatcgatgccacacagggaagaaaaacaaaagcagtgatcgttacttccgatgattatcttgtcctttccgctctgcagccggaaactattgccaggagattttcggaagcgtatggagaggaaatgagggaggaaggaaatgagtaagggaattttagttgttgtttcgggcttttccggttccggaaaaggtactgtcatgaaacggctgatggaaaaatatgacaattatgcattatctgtttctgttactaccagaaatccaagaccgggtgagaaggacggggaggcttatttcttccgcacaaaagaagaatttgaacagctgatccgggaagacggactgatcgagtatgcacagtatgtggagaattattatggcacaccccgcaaatatgtagaggagcagctttccgcagggaaagatgtgatccttgagatcgagatccagggtgccatgaagatccgtgagaagtttccggatacactgctggtatttgtatgtccgccgtctatggaggagcttaagaaccgtctggtaggtcgcggaacagagactctggatgtgatcaacgggcgtctcagaagagcggttgaagaatccagaggaatggataaatatgattatctcctgatcaatgatgatctggaggaatgtgttgatacacttcatgagaccatccggtgtgagcgcatgcgtacatctaggaatcatgattttgtatccaggatccagaaagaagcgaaagcttttttataaataccaattaacaagttaaatacggccctgccgttacagaagggagaaaagatatgatacatccatcttattcagaattaattgaggctatcaacacaaacaacgaggacgacgatgaggctctcgtgctgaacagccgttattctcttgtacttgcagcaagcaaacgtgcccgccagctgatcgcaggagcagagccgcttgtaccgggtgcagcaggaaagaaaccgctttccgttgccattgatgagctttacaagggcaaagtaaagatccttcccggacaggaggaagaggaagagctggaggctcttgaagctgagaaggaggctcttgaggcagcagagggcgagaccgcagaaggcactgagactgcagaagcagctcagacagaagcggagtaattttatgaaaatattattcatctctcttggctgtgacaagaacctggcggattctgaggaaatgctgggacttcttacagccggaggtcatgagatcacagacgatgaaacacaggcagatgcaatcgtgatcaatacctgctgttttatcaaggatgccaaggaagagagtgtggaaaccattcttgaaatggcagaatacaaaaaaacaggaagctgccatgcactgatcgttaccggctgtatggcacagcgataccagaaagagatcattgaggaggttccggaggtcgatgctgttcttggaactacatcctacggcgacatcgtaaaggctctggaggaagcagtagccggaaatcatttcgaagaattccgtgatattgattatctgccggatacaggaagcaaacgtgtccttacaacaggtggacatttcggctacctgaagattgcggaaggctgcgacaagcactgtacctactgcatcatcccgaagctcagaggtaaatttcgaagcgtcccaatggagcgcctcattgcccaggcagaggatatggctgaacagggagtgaaagagctgatcctggtagcacaggagaccaccgtttatggaaaggatctttacggcaaaaaatctcttcacattcttttaaagaagctctgtgagatcagaggtatccgttggatccgcatcctttactgttatccggaggagatttacgatgaactgatcgaaaccattcgtgatgagaagaagatctgtcattatctggatattccgatccagcacgcatcggaccgaattcttaaaagaatgggccgccgtacttccaaacaggaactgatcgatattgtcggaaagctccgtaaggagattccggatatcgtactgcgtacaactctgatcaccggatttccgggtgagacggaggaagaccatgaagaactgaaggagttcgtagatgagatggaatttgaccgtctcggtgtcttcacttactctccggaggagaataccccggcagcagagatggcagaccaggttccggaagaagtgaaggaagaacgcagagacgagctgatggagcttcagcaggagatttcttatgacagaggccaggaccgtatcggacaggaacttcttgttatgatcgaaggaaaagttgcagatgaaagtgcctatatcggacgtacctacggggatgcaccgaaggttgacggatacattttcgttcagacaggcgaactgcttatgacaggtgattttgcaaaggtacgtgtgacaggtgcgcttgagtatgatttgataggagtgctgagcgatgaatacaccgaataaacttacagttgcaagaatgatacttgtaccatttcttgtagttttcttactgacaggctggggaggagaagcaaaccgctggatctgtcttgcgatttttgtcgcagcaagtgtgacagactggtttgacggtcatcttgccagaaaatataacctgataactaattttggaaaatttatggatccgctggcagacaagcttctggtatgctctgccatgatctgcatgatcgaggttgacaagcttccggcatgggttgtgatcattatcatcgggcgggaatttatcatcagcggtttccgtctgatcgcagcggagaacggaattgtcattgccgcaaactactggggaaaattcaaaaccgtttcccagatgatcatgatcatacttctgatgctggatttcggaggtgtttttgcagtgctgacacagatatttatctggctgtccgttgcactgaccattatctccctgctgacttatatcatgcagaacagaaaggtcctttccatgcaggagtagggatcagagtatacgaaaggagtttcatttcatgatcacagaactgatatccgtaggaaccgagatccttctaggaaatatcgtaaataccaacagcgcctatctttctgaaaaatgcgccctgcttgggttaagtgtttactatcaggatgtagtaggtgataatgaaggccgtatgcgtgacgtgatccgtactgcactggatcgttccgatgttgtgatcctcaccggaggtcttggaccaacagaggatgatatcaccaaggaagtaactgcggatctgatgggaatgcctcttaaggaagattcccactcaaggaaactgatcgataaatatctgaaggaatatgagaaaaacaatcctcagagacgtatcacgaagaacaactataaacaggccatggttcctgagggagccattgttcttgacaatcataacggaactgctccgggactgatccttgagaaaaaaggaaaaaccgcgatccttcttcctggacctcccaatgagctgaagcccatgttcgaggagtacgttgtcccatatctgcagaaaaaccagccggagatcattgtgtcccagatggtaaagatcagcgggatcggtgagagtcaggtagcagaggaaatccaggatctgatcgaaagccagaccaatcctaccattgcaccttatgcaaaaaccggtgaagtgcatcttcgtgtgacagcaagcgcagagaatgaaaaggcctgcagaaagctgatcaaaccggttgtcaaagagctaaagaagcgttttggagagaatgtttttgccacagatgagagcaagacactggaggaagcagtgatcgatcttctgaaagaaaaagatctgaagctatccctggcggaatctcttaccggcggtatgatcgcccagcgcattgtcaatgtatccggtgcatctgaggtgtttggatatggctttgtgacctacagtaataaggccaagcataaatgcctgggagtgaagaaacgtactctgaaggagcagggtgcagtttctgccaaatgtgccagagaaatggcaaagggtgcctgcaaagcatccggagcagatatcagtatttccgtgacgggtttggcaggaccgggaggcggaacaaaggaaactccggttggtactgtatttatgggctgctgttataagggcaaggctattgccaaagagttccactttacaggaaatcgcatgcgggtccgcgagcagactacagcgcatgcactggcgatgttacgtgactgtatcattatgagcagatagcgaatgccttgatctgcctgctattacggatcaaccatgatattttttatataacaggactgatttttaaacagatgaaacttttgatttcaagtatctgtatcaaaaatcagtcctgctttatttttgtttcctgataataagccccggtatgggcgatgaaagaatataaacgatcatatttacaaggataatactatcataagtgctagtgtttttataagggatttcctctaaaatgtgattaaagcaatatatgacgtaaatatacgttttaccggaaagggggaaatcagaatgaaaaagaaaaaaaatctgttgtgttttgtgttgctgatcagccttatttttacgatggcatttggaagtgtgacggtcagcgccgcaccaaaactgaacagaacaaaagtaactcttttaaaaggtgagaagacaacacttaaggttactgggaccaagcagaaggttgcctggagatcttccaaaaagagcgttgcgaccgtaaacagcaaaggccaggtggttgcaaaaaataaaggttccgcaacgatctatgcaaaggtaagcaaaaaaacatataaatgtgttgtaaaggtagaaacaccgaagctcagcaggacatcgctgacattaacagaaaagaaatccagtgccattaaattgacaggaacaactgtgaaggtgaaatattcttcttccaatccgaagatcgcacgtgtggattccaaaggaaagatcaccgcagtgaaaaaaggaacagcagtgatcacagcgaaggcaaatacaaagaaattcaactgtaaggttacagtaaaagcagcgcagaaaccgaagccgacacctacaccggtgccgaaaccatctttaagtgccaccaccttaaatatgaataaaggtgatgtgagacagcttcaggtaaagaattataaagagattcttgtatggaccagtgatgatacatctgttgcaactgtagacagtaaaggcaaagtaacggcagtgaatgtgggaacaacaaagattcaggtccgggataagagtacctggcgaggcagctgtactgtccacgtgacacagacagtaaagaaacaggtggagccggttcttacaaaaggaactaaatctgcaaaaaaagagatcaccaatgataaaggacagaaggaagttattaatgtaacgataaatacctatacttacacctttaccacgatcccgaccaatgcagaggaactgaaacagtatgatatcacaacggcagacggacgctataagaccatggctcttctgatccttgcatatcgtacctggacaccgaccaatccgacggactgcgaggagatgatttcttatctcaataataaagagatgactcagtattacaaaaactttttgagggatcgtatgaaagcggataacggatataaatatcttggcaattcttacctgaatggagcaactccggccaacaattatactccgtctaaaccgatttccattacgttaagacaggacacacttccgggtaagggaaattccatcagtgaagatatcccgtattttgaaccgactcagaccactcctgcgatctacagatcatttactgattttgcaggcagcgacagttccagatggatctgtacatataagcactccaaaaccggaaaatggtatatctgggatcagtcctggcatgatcttcttactaggatcaaacagccggcaggaaactatgaatattgatcgaatgtgaatgtaccgctattcaatcccattctaaaaaaggaaccgacagcgtaaaaactgtcggttcctttttggcatacataatagaatatctcatcggtgtagcgcaaacttttcaatggcgcgtgctacaccgtcttcgtcattggaagcagtaatataatcggctgctttttttacctggggctgtgcattggccatggctacgccaaaaccgacttcccggagaagatggacatcgttgtcaccgtctccgcatgccataatggattctcttgggattcccagcatttcgccaagagcaacaagagcggttcctttgttgacaccggcggcgttgatctcaatattgtagcttaaggagcctacaagctccagctccttaagttcacttaattccttccaggcggcggcacgttcctccatgtctgcaaaaagcgcctggactttatccatgcttctgttttcttttgtaatgacatcctggatgtctggaaccgcgatacgggtagtacggacataattccacatattagggtcgtgatggtattttcctacattatcaagcttggcagcgtctgcatatccctgaccgtcaaaatagatctcacttaaagtatcatatttttcaaagatacggagagctttttttgcactttccatgggaagaagctgctcgataagaagtttattatggtctgtatcaaggactctggctccgttggaggtgagagcatagtgaattcccggaaaatttctcagttccgcgggaatgccggtatatggccggccggtagccatcagaacaaggatacctgcatcaatagcttccctgagaacgcgcctggtattttctgtgagttctttttttgtattcagaagagttccgtccagatcaagaccgatcatttttatctgctgcatatttaagatttcctttcccggttaaggtcacatatacagaaaaaccgtcccgaaaaaacattttccgggacggtacctatctgtttatcagatatcaagaagatcactgtaaactttcagtgctccgtctgtatcatgagcaagaacacgttttgcaagaaccttaccaagctgtacaccctcctggtcaaagctgttcaggttccatacaaagccctggaacatgatcttgttctcaaagtgtgcaagaagcgcacccagagacttcggtgtaagttcttcaccaacaatgatactggaaggacgtccgcccttgaagtttttgttcaggttctcatcttcttttccgcatgcaaaagcaacgatctgtgctgcaacgtttgcacagagcttctgctggcttgtgctgttctcgatatcaacatcaacaccaagctggctcttcttaaagccgatgaactgaagcggaacaatattagttccctgatgcagaagctggtagaaggagtgctgtccgttggttcctggctcaccgaagatcaccggtccggtcacataatccaccggctcaccaaagcggtttacggatttaccgttagactccatatcacactgctgaagatgagcagggaagcggcttaatgcctgtgagtatggtaaaactgcagtagaaggatatccctgtacgtttctctcataaacgccgatcagggcatccagcatatccgggttctcaagaatgttcttatttgttgcaagcttatcctcctcggcagctccgtcaaggatgtctgcgaatacttccggtccgaatgcaagggaaaggatcgctccgcctacgccggaaacggaagagtaacgtccgccgatatagtcgtccatgaaaatagcggtaaggtactcatcactctttgcaagaggagaggtctcactggttacagcaagcatatgtctggacgggttcaggcccgcttttgtaagggcgtcttttacgaatgcctcatttgtcagagtttcaagtgttgtaccggatttggatacaacgatgaaaagagagtgagcaagatctacagatgcaagaacagcagctgcatcatccgggtcaacgttgctgatgaattttgcttccatcttgaaggtgttgtttgcctttgcccagttctcaagtgcgatatataatgcacgcggtcccaggtcacttccgccgataccgatctgtacaaccgtagtgaatttctcaccggcttcatttgtgatctcgcctgcatgtactttgtttgcaaaatctgcagctttcttctgctgagctacatagaattctcgcttgtccacaccgtcaacaacaacaggctcgccaagctgtgtacgtgcaagatgatgaaggaccatacgtttctcgcctgtgttgatcactgcgccgttatataattcctggaatttttcgatcagttctgcctcatcagccagtttggaaagtgcgtcaagaacggtctcgtccacttccttagctgcgtaattgtaagccagacctgctgccatcggtacgctgtacttctttacacgttctgcaccctgctcgccggacattgcttctgcaatattcacgtgatctttcagactgttaagtttgctgtaagaagcaagagtgtccagatttttccatgttgccataatcatattcctcctttaatgactgtgatcagagatatcaccataaatccttcggatatctttttcacaattgtctacagccaattatactgaaaaaagctctggatttcaacggaaggaacgatttaattggtgaaaatcttgttaaataaggtaaaaaatatcagagataacaggatcgtgacggaaatatgaagaagtttccgtcagcagcaggacaggaatggggaaatatgatatgatagaaaacagatcacccggagaaaaaatccgggaaaataataagtgatgaagggaattgttttatggaggaaatgaagaaaaaaggaaatgtgatcgcactgctgcctatcggtgtttttctggtcctgtatctgggactggggattttgtttgagtatgtgatgaaggtccctatgggattttataatgtaccgatcgttgtggcttttctggctgcgatcctggtggcatgtgttcagaacagaatgatcagctttgacagaaagctggagcttatggcaaaaggagtaggagataaaaatatcatcaccatgcttctgatctttctgaccgcaggctcttttgtgggtgttgtggggcgcagcagtgcagaaagtgtggcctactgtatgctttctctgataccggcacgtttttccgttgcggtattgtttgtagttgcttgcttcgtatctgtggctatgggaacttccgttgggacgatcacgcttcttacccctattgcggtagcggtttccaaagcttccggttttgatatggcattttgtgtggcatcggtgatgggaggagccatgtttggtgacaacctttcttttatttctgataccacgatcgcagcctgcaacggtcagggctgtcagatgaaagataaattccgggaaaatttctggatcgcatttccggcagctattgttacactgatcctgatccttatcctgtcttttcagacagagatccagggaagagtggtacaggattatcatcttatacagatctttccatatgttctggtgctgatcggcgggatcatcggcatcaatgtatttgtggtacttctgatcggaattatctccggcgcatttatcatgcttcttggaggacatatcacaccggtggagcttctgaccaatataggctccggtgtttccggaatgttcgagacctgtatggtagctatccttgtagcagccatgtgtgcgctgatccgggagcatggaggctttgaagcactgctttctggaatacagagagtttttaaagggaaaaaaggcggacttcttggtatgggacttctggttggaactatggatatcgcaacagccaataatacggtggccattgttatggccaaccccattgcaaaggaaatggcgctggaatataagatcacttccagaaagacagcttctatcctggatacattttcctgtattttccagggggtgatcccatatggagcccagatgctggttgccatttctgcggcaaaggaactgggatttgagctttctgcttttcagatcatgccgaaactgttttaccccatgcttctgcttgtgagttctctgatcgcgatctttggtataaaaggcggggatgataaatgaatcaggaagagatgatccgggatgtccggaaaagactgtttgaaatgcaggatacaggatatcgggattttcatgcaaggctggttccgactgtggagaaagaaaagatcatcggtatccggacaccgatactccggaaatttgcaaaagaatttggaaaaacagaaagatccgaaatgttcctgaaggttcttcctcatcagtattatgaggaaaataatctccatggcctgctgatcgagcagatcagagattatgataaatgtctgggagaactggaacgttttcttccgcatattgataactgggcgacctgtgatctgctggcgctccatatgatgaaaaaacaccgtgatatatttatccgggagatttatcgctggatggagtcggataagccgtatatcatccggttcgggatcggtatgctgatgcgccattatctggacgaaggatttaaaccggaatatccggagaaagtggtagcgatccgctcggaagaatattatgtaaatatgatgcgagcctggtattttgctacagcactggcaaaacagtatgagaagatccttccattcttggaagagcagagaatggatatctggactcataacaagacgatccagaaatccattgaaagctaccggatcacacaggagcagaaggatcatctcaggacactgcggataaagaaataaacagcaggtaagggttggaatatgaaggcaatatcaatctatgcacttacaagaaatcaaaatatggaatgtgtccagaagctggaacgccagctttccggcagagatttttttctcaggatcaaagagtgggaactggaaagtatgaaagtactggtgaaacagctggaactgcatatggaagaagtatataagctccggcttttttattcgttccagatcccgaagcttggaaaggagttcgatcttcttcagatcaaagatgaccagatcgtgaatattgaactgaaaagcggcattgtgtcggacgaggctatccggagacagctgatccagaaccggtattatctgtctgtttttgggaaaccgatcctatcctatacctatatcagcagtgaagatcgtctggtgagactgaccaatcacgatcacattgtggagggggactggaaacagctatgtattgcattggggaaagaaagcccggactatgagggagatatcgaggatctgtttcaggcagagctttatctgatctctccgctgacagaaccggagcgttttctcaaaaaagagtatttccttacttcccagcagagagatattgaacggcagattctgaagagaatacgtggagaaagaggaggatatttctggttcagcggacttccaggaaccggaaaaacattgttgctttatgatattgcgatgaagttgtccgtgcgccagagagtctgtatcattcactgtggagaggcgggaaaagaatggaagattcttcatgaacgtctgcggcggatagattttctggcagatactcagctggacggaacgacggatcttggctgttacagcagcattctggtagatgaagcacatcttctgtccctggaaaaattatcggttctgcttacatggagtgagcacaggccggtgatcttttccagcgattccgaggatgtgatctcaccggaagagatggatcgtagcattgtggaaagcctgggaaatctgtcggagatccagaaattccatctgacaaaccggatccgtaccaatgcggaactttcctcttttatccagaacatgatgcacctgccggaaaaaagaagccccagatggtatccgcatattgcagtggtgtatgccaataatgaccgcgaggtggaaaattttctgaatgattttgcgggacagggatatcagcagcggatgccagagggttctggacagcttggtatccaggcagtgagagatgcggagaagatcgttgtattgctggatgaacagtattattacgacgaaaaaggatatttaagatccaggtgctctgcggaaaaatattccagtgtacgaaaactttttcatcttttgaatcaggcgaaagagagcctggctctggtggtgagagagaatatggcggtatatgaagtgatgatggagattttgcagatgcacagaaacagataaaaacaaaagattaaagacaatggagaggaagacagagggatggaagttttggagattgttttgcctgtactggcgatgatcattcttggaatcctgtgcagaaaatggaaacttttagatcagagtggtgtcaataacatgaaaacactggtaacaaatattatgcttcctgtggcaatttttcatgcactggcaacagcagagtacagtggaaagatcggaattctggttctgatcatgtttgtgatgctcttgatttcatttggggcaggattctggatgaaaagatttatggacgagccatataagaaatatcttccgtttctgatctgtatctatgaaggtggaatgatggcttacccgttgtatacaagtctttgtggcagcgaaaatctttcacagattgcagtgctggatattgcgggacttctttttggattcagtgtgtatatgggaatgctgggacagacggaaaacggggaaaagatcaatgcaaaaagcctgttttacagtgcattgcgaacccctgcttttataggaacggttcttggaattattgtgggactgacacgaatgatcacccggcttctggacagtccttttggcaattgttatctcagtgtggagaatattctgacaacggccattacgccgattattcttattgtagttgggtacagtatggaacttgcgccggaacttatcagcccctgcctcaaaaccatattgctgagagtccttttgcaggcagtgatgattgcgggagttctcatggcagtaaaatatttggtaggaggttccaggcttctgaacctggcggttattacatatatgtcctcgcctgctacattcagtatgcagacttttctgagaaagaaagagagcagtgcttatgcatccacaacaaattctctgtattgtgtggtctcaatcctggtttatatcacactggcagtggcaggatgatggaactgaaagaagggatcaaatgacgacaacgacattatgttatatagaaaacgatgataaattcctgatgcttcacagagtaaaaaaacaggatgatatgaatgagggcaaatggatcggcgttggcgggcatgtggaaagtcaggaaactccggaagaatgccttgttcgtgaggtgaaagaggaaacagggctgacacttacctcctataagttccgtggcctggtgacatttataaacagtgaatgcgaatcagaacttatgtgtgtgttcacggccgatgaatatacaggagaactgattgaatgtgatgagggagaactttgctgggttgacaaagccatggtgccgaatcttccggcatgggagggggatcagatatttcttgatctgctcctttcaggagaaaaacgctttttttctgtaaaattgcagtatgaaggtgacagacttgtagagaagaaaattcatttgtattaatagtagattgtttcatagctggaggggaaatcatgtttaataaaatgattgcacagcaaaccgcaaaaaaagaaaaacttcttgataattttctgaaaaaacatgaagcggaatatccgtttccggaagatgtggaactcatttgtgacattgactatatgggagatggaaagccctgtcatttcatggatatttaccgtccccgaaataccggaagcgttgtttccgcagattcttaaggatctgatgacaggaatgggaaatgcaaagagatattttgaaacctatgatggtgacggagaacatatttatatgacaggaaccagtgcgggggcgagcctgtgcgtatatctggccgctatgttaaaaagtcctgaattggcaaaggcttttcaggttgttccaaatgatctgaaaattcgggcgctgggtctggcaagtggaatgtattatacaaccaaaccggacagtatagggatttttcttccctcttatatttacgggaaacactggaaaaagagttcgttttatccatatataaatccggaaaacaaagaaattatccgaaacctgccaccgtcatttctggtcacagcttatggagatactcttcgaaattacagcagacagtatgcaaaagcgataatacgcagatggtggaatttcttcttaaatactgatgaaatgccaggaaaccttactggagtccggatccggattattctccctgcacaaggatgcaatcgctatatacagttaagaacacaattttcttgaaatcctaaccatagatgattataatagggagaaggtatgtcaattttgtgctattagtgatatttggcattgcgttgtattttaatatacaaaatgccatttttctttacgataagttcgcgaaaatccgcaggatattaactgtttgtgggtaatgataaccattgttggcaagttgaaaaaatgtccatttttgaccaaacggggttttgggcaccattttatagcaactttttacacaagaattggcttacaaatataaacatttttgatgtttcactgaattttatatctttaaattctttgtgaaatattactaattttagaaagggatagaatgagaaaattagcattaagtgatgaaattttgctcaaagttgataaagctgcccgctatattggcggcgaagtcaactctgtaatgaaagataaaaatgaggtagaaatccgttttgcaatgtgcttcccggatgtctacgaaatcggcatgtccaacctcggtatgatgatcctctacaacatgttcaaccagcgtgaggatgtttggtgtgagcgccttttttctccgtggccggatctggataaagtgatgagggaacagaatatcccgttatttgcactggagtcccaggagccgatccgtgattttgattttcttggtattactcttggttatgaaatgtgttataccaatatcctccaggtactggatctcagcgggattccgctgaaaagtgcggaccgtggtgaggatttcccgattgtgatcggtggtggtgcctgtgcgtataatccggagccgctggcgccgttttttgacctgttctatattggagagggcgagacggtttatgatgctctttttgatgcttataaggccaataagaaagctggcggcagcaggagagattttcttctggcagcagctaagatccctggaatttatgttccatctctttatgaagttacctataaagaagacggcacgatcgcatcctttgcgccaacagaggctggcgttccggaaaaagtccagaaacagctgattatagatatggagaaggaataccgtgcagtggaagcaccggttgttccacatattaaagctacacaggatcgtgtaactctggaaatccagcgaggatgtatccgtggatgtcgtttctgccaggcaggaatgatctaccgtcctacccgtgaacgtgatgtggagactctgaaagaatccgcacgtatcatgctgaaaaatacaggacacgaagagatttccctcagttctttaagttccagtgattattcccagctgaaagaactggtgaatttcctgatcgaggagttccatggaaaagcgatcaatatctctcttccgtctctcaggatcgatgcttttgcgctggatgttatgagtaaagtgcaggatgtaaagaaaagcagcctgacttttgctccggaggccggttctcagcgacttcgtgacgttatcaacaaaggtctgacagaggaagtgatccttcatggtgcaggcgaagcattcaagggtggctggaatcaggtgaagctttactttatgctcggtcttcctacagaaacagaagacgatatgaagggaattgctcatctggcacagaagatcgcagagacctattatgaggtagttccgaaagaacagcgtaaaggtaaggtacagatcaacgtcagcacatctttctttgtgccgaagccgtttaccccatttcagtgggcaccaatgtatacagagcaggattttgtggaaaaagccaaggtggttaaaaatgaagtccgcgcccagctgaatcagagaagtatccgttataactggcatgaaccggatgtaacagctctggaaggatttctcgcacgcggggacagaagatgcgcggatgtgatcctgaaggcttatgaaaaaggtgccctttacgatgcctggacagaaaattttgattatgatatctggaaggaagctatggctgaatgcggagtggatatgacattctacacacttcgtgaaagaagcctggatgagatccttccatgggatttcattgataccggtgtcagccgcagattcttggagcgtgaatggcagcgtgcaaaagagggtgttgtgacggaaaactgccgtcagaaatgttctgcatgtggagctatgaaatttaaaggaggtgtctgccttgaaggtaagaattaaattcagcaaagagggtcctatgaagtttgtgggacatctggataccatgcgttatttccagaaagcgcttcgtcgtgcagagctcccggtagcgttttccggtggatacagcccgcatatgatcatgtcttttgcggttccacttggagtggggatggagagtctcggagattattttgacctggaaatggcagaagatatgcctactgcagagatcgcagcccgtctggaggaacagatggcagaggggatgcatatcgttagcgtccgcaaggtagaggatggaaaagcgggtaaagcgatggcactggtggcagcagcagattatcttgtggagttccgtccgggcaaagagccttctattgactggaaaagccgtgtgaaagaatttctggcacagccggagatcaaagtgaccaagcagaccaagcgcagcgaaaaggagatcgatcttcgtccgaatatctataaaatggaagtaagagagaatgggttcttttatatgctggcatctgcaagctctaattatacgaagccggagatggtaacaaacacatttttccactggattggagaagaacttccggaatttgccttcacagtgaaacgtctggaaatgtatgccgataaaggagaaaatgcaagcccacgttttgtgactctggaatcattaggtgaggaaattgagtaaactgatcataacaagaatggagatccatggtgtgccctgtacagtagcggctctttcggaggaggaacggatcgttgagatccgactggaatccgatcaggaaaaatccattcttggaaatatatacaccggacaggtcgaaaatatcgcatccaatatccaggcggcttttgtgcagatcgagcctggaaagagatgctactattctcttgcagaggcacagagagctgttttttccgcaggaagaaaaggaaacggaccattgcggcctggagatgagctcctggtacaggtgagcagggatgccatgaagggaaaacttccggcactgacatccaatctgaattttacgggaagatatcttgttctcactacaggagataaaaagtttggtctgtcttccaagctggcactggaagatcgccatcgcctcagcggatggttgaaagaggaagcagagcgtccggataaggaattcggtatcattgtccggaccaatgccgcagacgcttccaaagaagagatcctgaaggaactggagtggctgaagggccgctaccataaagccgtagttcagggacggaaccgtacctgtttcagtcttgtactggagacagaaccattttatgtggctgctgtaagggatgcttatggtcgtgacctggatgagatcattaccgatgtgccggaaatcagagaaatgatcctgggatatctggaagagatcagcccggagcttaaagaaaagcttcgtttttatcaggacaaacttcttccgctttataagctgtatcgcgtggaaactgcactggatgcgatccagaaagaaaaggtatggctgaacagcggcggatttctggtgatccagcagacggaggcctttgtatccattgatgtaaacagtggaaaatataccggaaagaagaaaatggaagaaaccttccgcaagatcaatctggaagcggctgcggagatcggccggcagttacggctgcgtaatctttcaggtattatcctgatcgattttatcaacatggaaaatccggatcacagagaggaactctttcatgttttacagaagctcctcagaaaagatccgataaagagcagggccattgatatcacaccattgcatatcctggaaatgaccagaaagaaagtaagacgtccggtgatcgaggacattcgggagcttacaaaaaaataataaaaatatcaaaaaaactattgacataacagtatgtcactgttatgataatcgagtatgccgcacaaagaggttaaagagcttcagtttcagaacaggagccaccgaatttggcgagtaaataattaggaggtgccacagatgtacgcaattattgcaacaggtggtaaacagtacaaggttgccgagggtgacgtaattaaagttgaaaagctcggtgtagaagctggtgaaaccgtaacatttgacaacgtgatcgcagtcagcaatgacggattaaaggttggcgaggatgtaaaagatgccagtgttaccgcttctgtagttgaaaacggtaagaatcgcaaggtcatcgtttacaaatacaaacgcaaaactggatatcacaagaaaaacggacatagacagcagtacaccaaagttaagatcgaaaagattaacggttaatctggtgtcatcatgattacaattaaagtcagaaagaaaaacggatcttacgaagaatttatttcgaagggacatgccggttatgcagaagccggacaggatattgtctgtgctgcggtatctgcactgatcattaccacggtgaattctcttgaaaaattcacagatgataaatttgatgtgcaggaaaaggatggatttgtttccattcatttcagaaatgatctttctgaacgggggatgctccttatggattccttacttctcggtctgacggaaattgctggtagttataacaatcgatatttgacagtaaaagtcaaggaggtgtaacaacaatgatgaagatgaaccttcagttattcgcacataaaaagggagttggttctacaaagaacggtcgtgattccgagtctaagagattaggtgcgaaaagagcagacggacagtttgtaaaagccggaaacattctttacagacagcgcggaaccaagattcacccaggtgaaaacgtaggctgcggtaaagactatactttatttgcacttacagacggagtcgtaagattcacaagaaaaggtcgcgataagaaacaggtttctatcgttcctgtagacgcagagtaatgaaataggtaaaaggcttcaaatcgatccggtttggagcctttttttggaatagaggtgtaatatgtttgcagatagagcaaggatcattatccgctccggtaaaggcggcgacggacatgtaagcttccgacgtgagctgtatgtacccaatggcgggccggatggcggcgatggtggccgtggcggtgatgtgatttttgagatcgacgagggccagaatactctcggagactacagacacagaagaaaatataaagctgaggatggccaggaaggcggtaaaaaacgctgccatggtgcagatggtaaggatgtggtcctgaaggttccggaaggtacggtgatcatggatgcggaatccggcaaggtcatcgcggatatgtccggtgagaatcgcagacagatcgtattaaaaggcggtcgtggtggaaaaggcaatcagcactatgcaacagctaccatgcaggtaccgaaatatgcccagcctggacagccggctcaggaacttgaggttctccttgagcttaaagtgatcgcagatgttggtctggtaggatttccaaatgttggtaaatctactttcctttcccgtgtgacaaatgcacagccgaagatcgccaactatcatttcacaacgttgagccctaatcttggagttgtagatactgataacggcggctttgttatcgctgatatcccgggactgatcgagggtgcatcagaaggtgtgggacttggacatgaattcctccgtcatattgagcgtacacgagttatcatccacattgtagatgccgcttccgtagaaggtcgtgatccagtggaggatatccacaagatcaataaagaactggaggcctacaatccggaaattgcagcaagaccgcaggtgatcgcagccaacaagattgactgtatttttgatgatggcgaagaaagccctattgatcaactgaaagcagaatttgagccacagggtatttcggtttatccaatctcagccgttaccgggcagggtgtcagagaactccttttccatgtgaaagagcttctggataagagcccgatgaaaccggtagtgtttgaacaggaattcttcccggaagatgttcttgtaaatgaaaatcttccgtttactgtggagcgcagcgaggaagatccggaagtattccttgtggaaggtcctaagattgaaaaaatgcttggctatacaaatctggattctgagaagggatttgccttcttccagaaattcctgaaagagggcggtatcctggaggaactggaaaaagccggtatccaggaaggcgatacggttcgtatgtatggctttgattttgattattataaataagaggtatgacaatgacaagtaagcagagagcatatttaaaaggccttgccatgacaatggatccgatccttcagcttggcaagggtggtcttactcctgaaaataccgctgctgttgaggaagctcttgcagcaagagagctgatcaagatcagcgttcttcagaactgtctggaggatccacgtgaaatggcacaggttcttgcagagagaacaagatctcaggtagtacaggtgatcggtaaaaagatcgttctctacagagaaggtaaaaaggacaagaaaaaaatcattcttccgtaatctcgggaggttataaatgagcaaagcaacaaaaaaaataggaatcatgggtggtacttttgatcccattcatatgggacatttgatcctgggagaaaaagcctatgaacagcttgagcttgataaagttttgttcatgccctgcggaaatccacctcataaacggaaccgtaagggcagagcgactgatgaacagcgtgcggaaatggtccgtcttgccatagaggataatcctcactttgagctgtctctgatcgagatgcatgaggaaggctatacgtatacttaccggactctggaacagctgaataaagcgaatccggacacagagtattattttatcatcggtgcagattcgctttttaattttgatacctggatggaaccggaacgcatttgtcaggaagcagtactggtagtggcaaccagagatcatactccattgaaggaacttgatcagcagatgcaacttctgtcacagaagtataacgggaattttattcgactggataccatgaatattgatgtttccagtgagctgctccgttcctggcatgaaagcgggcagagtctccgctattatgttcccaagcctgtgatttcctatattgagaaaaacgatatctataaaggaaatgattcagatgggaaaatatgattttatcaagattaaaaagaaactttccaaatatctggatgaggccagatttgagcatacaatgggggttatgtacacttgtgctgcgcttgccatggtttatgattatgatctggaggatgcacaggctgcaggacttcttcatgacagtgcaaagtgtattcctaataaaaagaaactgaagctgtgcagccagcatgatattccggtatcagattttgaaaaggatcatccgtttcttcttcatgccaaactgggggcttatgtggccagcagtaaatatgatattaaagacgaagagatcctgacagcgatcacttatcatacaacagggagaccgggaatgagccttcttgagaagatcgtatatatttcagactatattgaaccaatgcgtgacaaagctccgaatcttgcgaaggtgcgaaagattgcttttgaagatctggatgagtgtatgtatgagattttaaaggatacactggaatatctggaggaaaatcccaaggaaatcgacagtacgaccagggatgcttatgtttattataaagaactccatgacagaaaaatgcaggatgcagccaacagacaggaggattaaaattctatgagtatcgaaaaagagatggtccggatcgcctgcaaggcactggatgataaaaaagcaaaggatatcaagatcattgatatccatgaggtttccgtgatcgcagattattttgtgatcgcaagtgcttccaaccagaatcaggtacaggcaatggttgacaatgcagatgaaatgcttggccgtgccggatatgaagcaaaacagatcgagggaaccagaaactccagctgggtcctcatggattacggtgatatgatcatccatatctttgatgaggaaaacagacttttctacgatcttgagaggatttggagagacggcaagattcttgacgcggaagaatttcttggtgagaatgagtaaaatttgttatattggtttactgtaaaaatattatgtgaactaaataagaggaaatcaaaaagcagaagttttctgctgaaaaagaaaagagagatatctttgtggggctgtacagctaccttaaagatatctctctttttagatcacattacattgggtgggatctgttgtctatattttcatgaaaagaaacgaaatacaccaaatactttgccgaggatctgcagattaccggtgatgatgatcggttccatattgtcgttttccggttgaagtcgataataaccattttctttgtagaaagtcttaactgttgcagaatcatcaatcagagcaactaccatgtcgccgttttctgctgtcgcctgctgctttacaagaacctgatctccatcaaaaatacctgcattgatcatactgtcgcctttgacagtcagcatgaaactttgttcattgggcatatattcagccgggatcggaaagtaagcatcgatattttccactgccaggatcggctgtccggcagcaacagtgcctacaagaggaacattgacaacctcgcggcggaccagattgaaattatcatcaatgatctcgatcgcacggggcttggtggcatctctgcggatatatccgtttttttccagagcttccagatgggagtgaacggaagatgtggatttcaggtttactgcttcacagatttcacggacggagggcggaaaacctctgttaaggatctcatttttcatataatccagtatttcctgctgctttttactgattctgccatatgtcatgtgtacttacctccctgggttgattttatctgctgtcgaccataatatgacagcatcacgaaattatattttgaatagtataacatacttttgaaaaaatggcaaacggatattcggaaagtatgttcgcacgttttaaagcttgtattcatttaaataaaatgttacaataaaacgaactttaagagatgaacgatgtaaaggaggcattcatttgccggataataaagtacattccggaaaaactccgggattcttagcaaagcttcgtaaaatttttggtctgaacattggaactgtaatgttcggagcaatttttatctatatgatctttagtgtgattctttatcttacagcttctcatatggaatcttatcaggttccctccggtccgttatccatgaatgagacatacacagggctggcgatcatgacagagaacgtagtgcaggcagatgcgggcggttacgttacatattacgcaagggaaggtaccaagatcaatgccaacggtgctgtctacagcctgaacagttcaagatctgcagacaatgtaacctctctgagcagagaggagctggcggatatacgcagtaatatgcaaagcttttccaaaggatttgatcccagcaaattcaacagtgcctatagttttaaatatcagctcaatggaagcatccttcagtatgcttcagacagttcgggaacttcttctgcaagcacgacgtctgaagatggagaggaagccacagttacaactatagtttccagtgatccgaatatccgccgtgcgcagacagacgggatcatcctgtattctacagatggctacgaaaccaaaaccgttgataatgtcacagctgccgattttgatcagaattcctatcaggaaacggatctgaaaacagatggacagataaaggccggagatgatatttatacgatcattacagatgaacgctggagtcttttgatccctttaagtgagaagcaggctgctaatctgaaggagcgtacatcgatccgcgtcaagttcctgaaagatgatctgacgcagacaggagacttttcgatcatggagatcgatggggctaaatacggtaagattgattttaataagggactgatccgatatgcgtcagaccggtttctggaaatagaacttgtcacgaacaatgtgacaggtttaaagatcccgttatcttctatcgtaacgaaggagttttatgcaataccttccaaatatcttacgacggatgatgaaacacagcaatccggatttatgctttccggcagaaataaaaaaggcgacagtacgacaacctttgtcagtgccggtatctatggccgtgatgagatcacagacaaagaaacacaggaaacaagctatatttattacgtagacaagaataaatttaaagaaggcgatgctcttgttgagccggatagtggagagaagtttatcattggagatacagaagttctggagggagttttctgtgtcaatcagggatatgcggtattccgccggatcgagatcctggatgaaaatgaggaatatgcggttgtatcaaaggaaacctataatgggcttgtccgatatgaccgtattgtgaaaaatgcagataaagtaagtgaacaggatatactttactaattaaaggaggatttatatcatggtagcggaaaatttggcacaggtgcagaaaaatattaatgaatcctgcaataaaattaacagagatccgaatgaagtcacactgatcgcagtaagcaaaaccaaaccggtggagatgctgaaggaggcttatgatgccggagcacgtgtctttggagagaacaaagtgcaggagatcgtggataaatatgatcagatgccttcagatgtcaaatggcatatgatcggacatcttcagcgtaataaagtaaaatatattgtggataaagttgcaatgatccattctgtagattcgcttcgcctggccgagacgattgaaaaagaagcagcgaaaaaagcggttattgttccgatccttatagaagtaaatgtagcgcaggaagaaagtaaatttggtctgaaaccggaagaagttttaccgcttatagaacagatcgcagatttttcacacattcggataaaggggctcatgacaattgctccctatgttgataatgcagaggaaaatcgcgaaattttccgtgaacttaagaaattaagtgttgacattgctgctaaaaacattaataatgttactatgagtgttctgagtatgggaatgaccggagattacatggttgccgtgcaggagggcgctacgatggtgcgtgtaggcactggtatttttggtgcaagaaattacgcattataagactaataagattggagatttaaaatgggcgttttagacaagtttttagatgccatcaaactgaacgacgattatgacgatgacgaattgttagatgatagccttcttgaggatgaggacgattatgaggacgatttcctcgatgaagatgatgatatggaagagaaaccaaagaagaaattttttgagaaattttccaagaaaaaaaatgacgaggaagaggattttctggatgatgagccggaagatgaaacggttaaggcacctgttgccaagtcatctgcaaagacagctgcagccaaggccccggcaaggcaggaacgtatttccagaccggcaccttcttccaaaatcaccccaatgcgtacaagcaagcgttcttcccaggctgcaaatatggaagtttgtgtgatcaagcctacaactatggaggaagcaagagaaattgcggatacactggtcgataattctaccgtgatcctgaatcttgaaggaatcgatgtggagcttgcacagaggatcatcgattttacttccggtgcatgttattcacttggaggaagccttcagcaggtatccagctatatttttgtacttggaccatataatgtagatattacaggtgatcttcagaatatccttggcggttctgtgccgtctgttagagtgggttattaacctcatggataaagaagaactttttgttaagagaatccgtgaactggcaaatctggcctatcagagagatattaccacatttacggattttcttaatttaaatgaacggaatattttaaacagtcagaattttcataagctgggtgttacagcggaaggttttggcggatatgagaatgcagagcgtcagatggtagcctttcaccctgatgctcttgcttttacatgggattatcccattgattgtatccggcttgagccaaaagcagtgaaattttcagaagatctgacacatcgggattatttgggagcgatcctgaatcttggggttgacaggagtgttgttggggatattcttatagaagatcatactgcgagttttttttgtctgcgtcagatgacagatttttttctggagaatctgtgtcgtgtaagacataccacagttgtggcgtcgaagatagaagatccgggtgatcttccgaggccggaactgaaaccagttagtggaacctgtgcgtccgtacgcctggattctctgatcgcattggcttttgggacttccagaagcagtattgtgcattgtattgaagaagggcttgtttttgtaaatggaaaactgatcacatccaatggttatgagcccaaagagggagacatcatatccgttcggaaaaagggacgttttatttatgatggagtatcccgtcagacaaaaaaaggacgtcttggggtacggattctgctttatatctgaacagctaggaggaaaacgcaatgacagcatcaaaattacttgtaaaacgagaaggtgattttcattatcccatctgttttgaagaagatttttctaatctggcacaggttatgaaggaagaaggacttgttgacagaaaaatctgcattgtaacagattctaatgtgggaccactgtatgaagaatctgtaaaacaggttttaagtgaggtaagttccgatatttctgtgttcacctttgaggcaggagaaaaaaacaaaaaccttaataccgtttcggcattgtatcaggccctgatccaaaatggtcttgaccgaaaaagtctgcttgttgcattaggcggtggtgtggtaggggaccttaccggatttggcgcggcaacttatctcagggggattgacttcattcaggtaccgacaacactgcttgcacaggtagacagcagcgttggcggaaaaactggcgtagattttcagcagtacaaaaacatggtaggagcttttcaccagccacgtcttgtatatatgaatctaagcactctttcttcgcttccggcagaacagtttgcctgcggaatgggtgagattttaaaaacaggattgatctgtgatggagattttttccgttatgtatgctgtgagcagaaagggatcaaaaagctggatatggaacagattgccagaatgatacgcagatgctgtgagatcaaagcaggcgttgtggagcgtgatcctaaggaacagggagagcgtgcgcttcttaacctgggacatactgtggggcatgcagtagaaaaacttaagaatttcaccctgctccacggacagtgtgtgggagtcggactggtggcagcggcatatctttccatgaaacgaggacttctgaccaaagaagaatatcaggaaatttgccagggatgttcggattacgatcttccggtgcatgtagatggtcttatcccggaagaagttctttccgcaacaaagaaagacaaaaaaatggaacagggacatatcaggtttatcctgatggatggtatcggaaaaagctttatcgacaaaacagttaccgatgaagaaatgctttcctgtattcaggagataactctatgatcggtcgtgttaaccatcatcagaaaatgtcttttagtaagtgtatgtcgggggacatttttttgctgatcttactcgtggctgcggatcagggagcaaaatggctgtcatatctgtatctgaaaggacaaccatcggtttcgctgattcctggcgtacttgaacttcattatctctatccggaaaacaggggaattgcgtttggaatgtttcagggaagtgtactcttttttgccattgtgagtgtactgtttctgggagtgatcctctatgcatggatccgtattccgaaagagcggttttatctgccgttgctcaccattgctacagtacttgcagctggtgcactgggaaattttatcgatcgttttttcagagggtatgtgatcgattttatctatttctccctaatcgattttccggtatttaatcttgcggatgtttatgtggttgtaagtggaatttttctgatcctgtttgtatgcacgaaatacagagatgatgattttgcgtttctgaatatcaaacagtgatccgggcagagatataatgcatttatctgttcttgtaggagatataaatggaaatatatgattatacagtagaaaaagaagaagcaggtatacgaatcgaccgctatcttgctgagaaagacagcggtctttccaggtctttccttcagaaacttctgaaagaaggacagattaccgtgggagagaaggctgccaaatctaattataaggtccgtgaaaatgacaggatccatctggagatcccggattccagtgagccggatatcgttccggaggatattccgttggatattctttacgaggatgaagatgtactgatcgttaataagcccaaagggatggttgtacatcctgcagccgggcattatcagggaacactggtcaatgcagttatggcacattgtggtgacagcctttccggtattaacggagtgatgcggcctggaattgtccacagaattgataaggataccaccggggcactgttggtatgcaaaaatgatattgctcaccgggatctggcagaacagctgaaatgtcacagtatccgcagacgctacagggcagttgtgcagggaaatctgaaagaggatgagggaaccatagagggacctattggacggcattcgacagatcgtaaaaaaatggccatcaatcataaaaatggtaaagatgcaataacacattacaaagtgctggaacgttttggcgaggccacgtatgtggaatgtcgtcttgaaacaggtcgtacccaccagatccgtgtgcacatggccagtatcggacatccgcttcttggggacacggtgtatggttcatccagaaatccctatcatctggagggacaggcacttcatgcaatgatccttggatttgttcatccacgtaccggggaatatatggaatttacagccccacttccggaatattttgttaaattgctgacaaaattgcgaaaatagctggaaaacttgtggaatatagtgtataataactatattaaagaggaagcggagttaatatttgcaaattcgctgaatctgagcagaaaggatgtggctgttatgagtaacaatacaacaagttctattattactatcggtcgtaaatatggcagcgccggaagacagatcggccaggaagttgctaaatattttggaatcaaatgctatgataaagagctgctggagcacgcagccaatgacagtgggatctgcaaggagctgtttgagcatcatgatgagaagccaacaaacagttttctttattctcttgtaatggatacttattcatttgggtattcctcagccggatttacagacatgcctatgaaccataagatttttcttgcacagtttgaggcaatcaagaagctggcttcagaaggtccctgtgtaatggtcggcagatgtgcggattatgcacttgcagataatccggattgtttcagtgtatttgttcatgcaaaccttgactggcgtatcaaccgtattgctcagaaatacaataaaaatgccaaagaggccaaggacatgatcaacaaaacagacaaaagccgttccagctactataattattataccaacaagaaatggggatctgcggacagctataatctttgtctggatagcagcaagcttggcattgatggaactgcgaaggcaattatcgaagccattcacatttatgacagcctgaaaaaataaacatcagatttttaggcaccctgccattttatggcggggtgttttctgtatcagcgcgataccctgaagtcggaatttatctttgcaggttattattggaaaataatgtttatgttttttttagacacaaaccagagatgctatgttataatcacttggtggaggaaattactatgaaaattcgttggaaccatcgctatgtgcagttaggtgtgactgcatttctggttattgctgccagtattttattttattacgggattttccatatgaaatctctgatcaccggaattaaaacatttttcggtattatggcgccgatcatttacggagctgccatagcatatctgctaacccccattgttaattttttggagcggaagatcatttttccgatttttgaaaaaaggaataaagcacttcagaaaaaggggaggaaagtagtacgctggatctgtgtgatcctttctgtatttcttatgtttctggtcatttatgcccttgtcatgatgatccttcctcaattgattcgaagcatcatgaatattatctacagttttcctcattatgtaagtgtagtggaaaactggttaaattccgtcgtggaaaagggatggaaattgaatccggatatgatcagccagatcaatcagtattccagcagattacaggagtatctgacaaatacgatccttccccagatgcagtttatgatgaaaaatatatccgcaagctttctggatcttcttgtttttctgaagaatttccttattggagcgatcgtatctctttatatactggcggataaagagggatttgttgccaaggcaaaaatggctgtttatgcagttcttccaaccaaatgggcaacctttcttgttcattccatgcgttttacgcataaaacctttggtggatttatcagcggaaagatcctggattccgcaattatcggtgtattatgttatgttggaacatcgatcatcggaaccccatatgcgattctggtcagtgtgatcgttggagttacaaatgttattccgtttttcgggccatatctgggagcagttccgtgttttcttcttattttgctggtagatcccattcagagcttgtatttcctgatctttattttgatccttcagcagtttgacggaaatatccttggaccaaagatcctgggtgagtcgaccggactgtccagctttatggttattgttgcaatcatggtcggtggtggtttatttggagttccgggaatgatcgttggagttccggtatttgctgtgctgaatgctgctgtatggaagctgatcggacgtagtcttgatgaaaaagatatgtctgcagatgctgagttttatagagatattgattgtgtagaccccgtttccggaaaggtcctgccaatgccggtgaaaaaatccgtattaaaagcacaggaagttacagtaaaagcggaaaaaaacagaatctggtccggggcttgggatgaaattaaacgaatgtttacatttttagttaaatttattcaggcgaaatatataggctttcgattgaagcagaaaaacagacggagacggaggaagaacaggttatgaaatttgtaattcagcgtgtaaatcatgcagaagtcaaagtagacggagaaattgtcggaaaaatcggaaaaggttttcttgttctgatcggcgttggccgtgaggacaccaaagaggatgcagactggtatctgaaaaagcttctgggacttcgtatttttgaggatgaaaatggaaagaccaatttgtccctggcggatgtaaacggggaattgcttttggtttcacagtttaccttatatgcaaactgccgtaagggaaaccgtccaagctttatagaagccggtgcaccggatgaagcaaataaattatatgaatatattatttcggaagccagtaaacaggttccggttgtggaacacggaatttttggtgcagatatgaaagtatctttggaaaatgacgggccgtttaccgttatttttgatgaaaacctcagagggtaacgacaaataataataaaaagtgcttccataaggaggcactttatttacttgaaaatttatcaaaaacaggcaattttgcaggaagtagctgtttatactacccatctatttgaaaaactcgggtttgtcgtatagatatagatgagtgtaaaaccacttcttttaacaggtgtttcaggtgtttcaggtatttcctgcaaattatgtaaaatttatatattaaggagtttttatggataacaaaattacttaccacgaacaaaatgacattgacaatactttaaaactccgtgaggttttaaaaacgcttccgccattttgcagggactatttccgggctatcgatgcaacgactacaaccaagaccagaatttcctatgcatatgatattcgtatattttttcagtttctgttagatcagaatccaatgtttaaagacaaaaatatgtcggattttacaattgctgttctggatcagatcaaagctgttgatcttgaggaatatgaagaatttctcaaagtttataaatccgccgactcttccaaaacggaaacaaatggtgaacgtggcgtcaaacgtaaaatttctgctttaagaagtttttatgcttactattataaacatgaaatgatcaccaccaacccgtctgttctgatcgatgtgcccaagatccatgaaaagaatattatccgtctggatacagatgaggttgccatgctgctggattatattgagaactgcggagatacgctgaccgggcagaaacggatgtaccatgaaaaaacgaaggacagagatcttgctattgttactctccttcttggtaccgggatccgagtatcggaatgtgtcggactggatgttgaggatgtagacttcaaaaacaatggaatcaaagttacccggaaaggcggaaatgaaatggttgtatactttggtcctgaagtagaaaaagcgttgaagaaatatctggaagtcagggagaatattacgcctctggcaggccatgagcacgctctcttctattctacccaacgccgccggatcggtgttcaggctatcgaaaatctggttaaaaaatatgccagggagatcacaactacaaaaaagatcaccccgcataagcttcgcagcacctatggtactgccctgtaccaggaaaccggtgatatttaccttgtagcggatgttttgggtcataaggatgtcaatactactaagaagcattatgctgctctggatgatgccagacggcgtcaggcggccaaggcggtacgtctccgcgaggactgatgaataatgggactgcggagcaactgattcgtttgacatgcattgcatataaatatagagacagttagttcacataatataaattatgtaaatcaactgcctctatatatttaatcagatcaagaaaatctcaaattccctgtagggttcaaaaaaccttaagcagtggttatggacatctgtattatatccatgacccaaaatcaaaatccgtacttaacttatttatcaaaatctgtctcgaatacaccctccggagtacgcatggtaagaacacccagattaaattcactgtccataattgagatatgatattcaaagatcacatcatcatcaaatttggaaagcagcacatagcttccattctctttcccatcgatctgatcgcagatgtcgtcgtaaacgtcctctccggaaatctttcgcgggtatccgcttgctttgatcttctcttcgatcgctttatataattcttccatactttatcccatatcctttctgaaattaattggctgataaaccagatatgtttttatcataccagatttatcagcaaaaatcagcaaatatttggttgtttctgataaagtttcagataggagtacagttatataatataaaactgtgtagccgaagaatttattttttctcgtagaggaattcttccggcagagttactttgaaatcttttgcaagagcacggaagtcattcggtgtgatggtctgcagtttctgaggagccatggataagatcttaaccaggatctctgcggatttttcaacggtatgaagaagtccgaaggtcaggtcaaaatcctcgcctgagcagaacataccatgatgcgcccagataaccacatcatattttttcatcagttcagcggttttgacagcaatatctcttccgcctggaaccatccatccgataactcccacaccatccggaaatactaccggacactctgttgcagattcccagagttcacgggtaaatactttgtcatcaaggggaagaacaaaggtaagtgcaatggtattggtagtatgtgcatgataaataacacgatgtcttccgttggtaagttttttctttacttcatggttcataagatgtgtcgggagctcgctggtcggtcttcctccctctacaagaccccagcggatacggtagttggttcctgtctcatcaagctcaatgatcgcaagacatacttccgggtcaacgatgatattacggaagtattttccgcttcctgttaccaggaaaaactctccggcaagtcccggaacctcaacaccgatgggagtccattctccgggggcgttcagtcgtgggcggatcatttccacttcttctgccttcagacgatagcttaagtttccgccgtttctttcatgccacccctgcttatatccatcatctgccattttgataaagccctgtacgaatttagattcaagaattttcataatatattccctccgtgtttaaatgtggtttattgttgagtttgcgattgcttcaatatgctttcttgttgtttgtgactttattatatgcccgattatgtggatttgtaaagggcttttttgaaaaaatatcaataaatccacatgcaaaatgcaaaaaatcttgtaaacattcaataaaccacataaaaataaatataaagcaacaaaaaacacgagtggtcaatagtaatgacatgtacattgaatgtggtttgatgttgctttgtgatgtgggatttatagtatggtagataaacttggaacgccgaagaattgtaagaaaaggaaaaacaggaacatttccgtattctgtacctttgatactcacacgaaaatattcctgctggtttaaaaaagatttttatttaattttttcggaagcatactgagataagaagtctgtacagtgtccgacatgtgatatcccaatatggcaagcagatcttccattttggataaaatttctttccgctcactttcctgctctgcgatcacctcaagctccaaaaagtctccaagtccctctacctgatccagacaggcggtaaatctgccacatttcatatactttcgcgttttcatgacagacgctaccggagaaaaatccaaatggatgagaatatttttaagcacttctgcatcggatacttctgtttccagttccattcgggacatggagattttatccagtttgggccccttaaaattaatctgagtcttagaaataccggatctgcagtctgtgcttgttcggatacgcagtgcttcatcacgtttttttacatcatgatagacactgttaaaataggtatcttcttcctggatctgtgctgtctcctgaaatccctgatctgtcagaaatttcagggtttccttaagattctttaatggaagcttgatctcaatttcaaactgggccatgtgattacttcagaatttctgcttttttgttcagaagtgcttcgcaggctgcacatgctgggcagtcacagtattttgcaccggaagctttgatctcctcagcgtgagccaggatcttttttgcgtcatctgcgccaaatacctgtgcgcccatgtcagaacctgcaaaagagatcagtccgtcgatgggcatgatatctgcttccagctcttttacgtaagcagttgccgcatctgcttctttctcagttcctgccgcatccagataattctgtgccgcttcttttacttctttgcatgcagatggtgcctgaagaagatcctgtgttaattctttaattgtttttgccatgataatttctcccttctgatcatagcactcccagaaattactgcatcaagttcagctgtgcagaacatgaatggttggaagtgctataataacagataaaatctgcctgttatgtattgataacaatatcataccacaaccctggattatttgcagaaaatattgagacgttttttataaaggcatgcaggaacatccgattcccagtccgtctgggccaatatggcaggaaagtccaagggaaagatcatcacacatcacatccattcccggaaagctttcccggatctgtgaaatccagtctgcggtaacttccgcagtgctgctggaggcagccataagatatacttttccggcatcatattcttttttgaaagttgtttccaattctctgtgcatagcatcgatcatggcttttcttgattttttcatgcctctgcatttctggaaaacatccagtttaccggttccaaatttcataaccggtttgatattgagaagatttgcggccagtgctgtggtggtattgatacggcctccctttttcagatattccagtgtgcttaatccgacatagatcacagttttttcgcgggatgcttccagaatatccttgatctgcggtgctgtatatccatcttccaccaggtctatcgcatccagaatggaacggtgaaggggtgtggaaacacgcccgttatctaccacaaacactttgttttcgtattttggttcctgagacaaggcggcagcagtcatgcaggaaccgcttaaactactgctcaacggaatgtagaggatctgatcataagataaaagcatttcgtcccacatttccataacttcctgtggggaaggctgtgaagttgaaacatctgctccttcacgtagcttctcataaaatcctgttctggaaaaatccaggtcttcatgaaacagttctccattcagataaaaaggcatgggaaggacatgaatatccagttcctctgcttcttgttttaaaatgccactgtggctgtcagccatgattccaatttttttcattttccatttatctcctgcgtaatttatgaatgtgtttcgcaacgcggttcttttttataaagagctacactttcccggaagcgttttttgtttagctcccgcatctgggaaacctcgtttttctttacgaaaccatgactttccataaaggttctttgatccagctggtccatatatatggaataatccgtatccttctctgttgaaatctgtttgagaagcccggtaccgattccgtttctgcggtaatctttgcttacataaagaaagaggatatttccgggagtcggtttctccggggaaacagtcaattgttttttcatatcctgaagtttgttaaaatgctccagattcttccggccttccttagtaaacttcaggcgcaggaaatgatagccttttttcaaacggaaaatcggggcaaaatggccatgagattctttaccggtaatgagcaccccaactacctgatcacggtaggttgccacggtaacgctatctctgtatatcatataggtgtaaaagaaaagtctggtcagacgtttttcggtatgtgtttcctcaaactcccagcggtctttataatttcttcggataaattcccggatcattgaaaaatcttccttttctgctttccggtaggcaggtgctttttt

SEQ ID NO: 254 - DNA, 23287 bp, Unknown
  gut microbiota DNA sequence
aacttaacatcaactgtttctcaacaattgttgaagtttatgaaaaagtttatataaaataaaaaacaacggaagaacctcatgaaaaataaggtgtccgctgttttttggttttatggatatgtgtaaaatatttgttttacagtataacagtaaaacgacagccgcttccgggaatattttccacggaaacggttcccatacacaggttcaggatctgttttacaagggcaagtccaagaccgtttccctcctgtttatgggaactgtcgccctggtaaaatttgtcaaagatatgtttcatggagtattcactgatctggggaccttcgttttctatagaaaaacggatcttttctccttccggcatcatccggatatagatcgtaccaccacagggactgaatttgatagcattggaaagcagattgtcccatacatgacagatgagattttcgtttccaagatactccacatccatcatgtccacatcaaattcaatttctttttctgaccatttcggttccatcataacaatggattgtcggatctgctcatccagacggtaccagttctgacgggtctggatcgactggtgttcgattttggacagcagcaggatatttcctgccaggtgggaaagccttctggtattaaaaaggattttgctgatgtactgctcctgctcttctgatataggcatgtcatcatcctgcagcagagttgcataaccctcaatagcactgatgggagttttgaattcgtgggaaacattggaaacaaagtctgtctgtagaatctccgttgcttccagttcctggaccatcaggttgaaattagaataaatatcccggatttccttcatttgcttttccgtttccagtcggacggaaaaatcgccttcagcaacctgttgcatggcttttttcagctttagtacaggaccgaaataccggatactgagaaagttgttaaggacaccccctgcggtcacgctggccaggatgatccatacgatgttcggaacagctgaaatatgcagtacatccataacaagccaggatatcagagatacacagacaagctccaacatgatcataaagataaaacgtaaacgaatgcttaaatttatgaagggtttctttttcatgcctttaccaccttatatccaactccacggatcgtcacgatcttaaaatccggattatcgcggaagcgttcccgaagccttccgatgtggacatctactgtgtgggcatcgcttgcggaatcatatccccagatatcatccataagctgttgccgggtaaagatttttcccggaaaggaaaccatcttatataagagcatgaattctttctgaggaagtaccatactttccgaggaggtggagaccgtcagggaatcgcactccaaaatggtatctccgattcgctgtttccgctcattgatcatctgtgctctgcggagaagtgcacctacccgcaaaaccagttcattgatattgaccggtttcaccatataatcatcggtaccggacagaaatcccatacgcatatcatcaaaagcatctttggcagtgaccataagtacaggaatggaatctccggcatctctgagtgagcggaccagttcatagccatccatgttgggcatcattatgtccgaaatgatcagatcgtaataatctttttccagggcatccagcgcttcctgtccgtcagagaccccttttactgtataaccgttttttaagaggacatgccggaaaagctggcggagttccaggtcatcttccgcaatgagaattttaaacatttttacatccctattccttgatcttttcaatgtccatgttttcaggcaggatacagcttaaaacaatggatatgataaatatacaacagcaactacattttgcgcaaaaacggactgtatgatcgacgggaaaatatcccagatcccgctctcacttgctgtggtgaatccgattccgacagcaagtgaaagagataggcggcagcagtccgatgtgaaacaaactactattataagaaaaattacggaataatcataacatagattcgttgtggaaaccagacggattttgatgaataaatgtaataatagatgaattaggtcatattatgaatatttatacacgaaaaaaagaaataccctcttgcattttcgaaacttttactgtagaattattaaccaggtaaacacaaatgtatgccatacccgaacactgattacaaagatgtaaccaatcttaactgtatcagtgttttttaatatacaatggggaaacgaggaaaaaattatggaaaaaaagcatgaaatgatgagtctggaggactccgaacagctgaaaggcagaatgaaattctttgaaaaggaactggtagagaatcatcacatcgatcccaacctttatgtggaatacgatgtaaaaagaggacttcgtgattccgcaggtaaaggtgttctcacagggcttactgagatttccgatgttaccggctataagctggtcaatggcagacgtattcctgcagacggtgcattgtattaccggggaatcgatgtgcaggatatcgtaaacggactgaaggacagacgttttggttttgaggagacgatctatcttctgattttcggtaagcttcccagcaaggaagagctttccagatttcttgagcttctttctgacatggaggatctgggaggacgttttgtccgtgacgttgtcatgaagggaaccaatgccaatattatgaatgctatggagcgctgcgtacttgctctctatacatatgatgataacccggaagatatttctgtggagaatgtactccgccagtctctggaactgatcgctaagcttcctgaaatcgcggtttactcctatcacgcataccgtcatttccgtaaagacgagacactttttatccgcaatccgcagaaggggctttcacttgccgagaatatccttctgatgcttcgtccggacggcaattatacagagcttgaggccaaggtccttgatatcgcacttgtacttcatgcagagcacggcggtggtaataactctacttttaccacacatgtagtaacatcttccggaacagacagctactcttctacctctgcatccatcggttcactgaagggaccgcgtcatggtggtgccaacctgaaggtccagaacatgtttacagatctgaaggccaatgtaaaggactgggaaagtgatgaggagatcacagcatatctgcagaaaatactgaataaagaagcatttgatcatgcaggtctgatctatggtatgggacatgcagtttatacactctccgatccgcgagaagtgatcctgaaacgttttgcacaggctcttgcagaggaaaaaggaatgatggatgaatttaagctctatgataaggttgagggtattgccggaaaactgatcatggaacacagaaagctgttcaaaaatgtttgcgcaaatgttgacttctacagtggcttcgtttactcaatgcttggtattccggaagaactttttactccgatctttgccatcgcacgtatgcctggctggagtgcacatcgtctggaagagctgatcagtgccaataagatcatccgtcctgcttataagtatgtggggcatcatgcagattttgtaccttttgatgagagataataaacagaatgataaaagcagtggggatttttgacctatttaagttggaaatctctgctgtttttttgttctcctaaattacagaaaaacaggatcataactatacataacatatattatgtaaaataaatatctgttttcacaaaaaaacaaggctcaccgcataagatatgatcggattgccttgttttttatggaatcttactttattattcttttcctatcggaagctcttcagccagtttacaagagaatcatgccagatgttgtcgtatacggtctttttcatctggtcatctacgggtccgtttcctgccatttttgcaaggatagcagcctgaagttcgcctactgtcatttcttctggtgttttgtgcggatttggcacagtgaccgtttcctgtggattggaggattctgcttcaggagttgacggaacatccgctgagtttgctgtattgtcagaagctttatctgtattttcggcgtttgaagcttctttttccggggcagcttctgttacagtgctgttttcagcagcctgctcctcttctgcctcagatgcagcgttttcgttctcttttgctgcggcagtttccggaacattagtctgaaccggcttatattccggcatatctcctgcaggaagccagatctcaccgctgtttgctgcaacacggacacggatccgtccgctctgtgcggaaaccttctgatctgtgaggacacctacgtattccggagcacttcctgttggaaggttcatctctgaatcactgtcatcattattcacagtaacgatcactcgtatgccttccagatctcttgcaaaggcaaactgacggtttgtaagagccagttctgcgtaggaaccgtagcttaatgcaggagttccctggcggacctttccgagggctgcgatcagtgcagtacatgggttctttgttgcagcatctgcataatcgttaagatcaagtgccggacgtaagctggcatcggaatatttttctttttttccgtcaataccgaattctgagccgtaataaatgcttggaacgccaggtaaagtataaagaagtacatgtacaggagcaaaatgtgctttgttctgcaatttagtatgaattcgctctacgtcatggttgtccacgaaattgtagaggtccagatctcccatattctgaagatattttactgtatgagcgatttcaaaatagttgtggtcattatgtccgctataaagtgccttgtgaagggcatagttggttacgctgtgaagagtctgtccgtttacccagcggctgtaatctccgtgaatgacctctcccataagccagaaatctttcttgacctcgtctgcggtatgacgtagaatacgcataaaatcaaaatccaggacatcagcggcatccaggcggattccatcaatatcaaattcggaaacccagaaacggatcacatcacagatatagttctgtacttccggattgcgctggttcagctttacaagaagattgtatccaccccagttttcataggaaaaaccgtcattatattcggtatttccgccgaaatttacattacagtaccagttaacgtaaggggaatgctcacggtttttctggatatccttaaaagcgaagaaatcacggcctgtatggttgaatacaccatcaaagatcacgcggatgcctttttcatggcaggcttttacaaaattggtgagatctttattggttccaagacgggaatccagttttttgtaatcggttgtctcatagccatgtccgacactttcaaaaagcggccctatatataaggcagtacatccgatctctttgatgtggtcgatccacggcagcagtgtgttcagtcgatgtacaggagttccgtaatcattttcttttggagcgcctgtaagtccaagtggataaatatggtagaagattgcttcgttgtaccagctcataatattacacctctgttctaaaaatttgcaatttcctgataattagagaaattacacaaatatcttctctataataccagattcctataatataatccagaataaatcagccagtttttcagcggaaaatccggcatattgctaattgccggatcttacctgatggacatatgtttattcgtcaaattctgcagtaactataaagccgcgtggcgtatgctcaatgcttttgatgatgccctctttggatctgatgcggtctgcgtttctgtagcagccagacatggctactgcaggctcaatgatatagctgtagtttgtggcagagagaaattcggagatcttcactttatctcccacctgtatcagcccctgtctttccattttaaatttttcttctcgcataaacatgccttctttctgtataaatacgcaatgtgaatatatctgtaaataccattaattacacgtttaagatctttaagaaccggatgggatccgtaccagaagcttctgtccgtctttttctactgctgtaagaacgggaatatgtttttttcgcagagcatgaacgatgggatacagggaaaacatggcattatctgcaaaaactgcttccggtttgcagcggaggatttctttaatcctgtcttttatagagcttttccattctgtcttttccatggagagttctccgtagattccgttcagagttagctccggtaattggggaaccggcagatgtacgatcctggcagaagaaagatccggaagcttttgaagcagcatgtctgtttctttatttccgccaaggcttacgatcacagcttcttcatggaaggcggcaagactgctcctgcaggcaagaacagaatcctcaagggttccgcaggtcatgagaaatcctcctttatgacaaaaggctgcacttttaagaccggttaccaaagataactcttcgccttccaggccaagccaggaagaaggaaaactgcatttgtaattcatggaatattcttttttctgtggctggatacagtaaccgccccggttggacggaaagatcacaaaagcaatgttggtttccgaaaggcgtttttggcagggaataaattccggaagtataaggatattggtattttctgccggggtatcgcccgaagcgagggaagcagcatgttctgtaagaacttcttccacccgtctgtctgcacgttcatttccaaggtaacgctcgaatttattttccaggatcatgcctgccacactgactgcctggaaaaaggcttcgtcattactgcttttggaatcccatcccggattaaaattgccgatcagtgtggcaagttcatttttttcaccggtattatcattgatatccagaggctggacaaaggattcatcgaattttagtgccagctcctcacctaggatttccggtccaagcttctcccagagaaggccgaaggccgcatatgggacgccattatcgcggatacggctgtctttctgatgatgatcatactgtcctctgccaatatcaaaaacaagaccttcatagttttcaggaacctggtttccacgtgtgatggtgatctcgggattcagatataaaagcagagcggcagaaaaaacatcgtctgcgtgaaatttcccgctgtgggtgaatgcggatgaatttttttgtttgattttttccagtaaatgattcatatgaaacgctcctgtgtgtttattctgctcttcagtataccacagaaatgaagaataaacaaaatttcctacagttaaaaaggaatccgtcctgaagacagatccctttaaaaatttacgttcttttatgctttatgtacaaaataggacgttcatattcaattttattataatgcgcagataattttatcctgatatgcttccggaacttcttctttatccagagacatactgataataaaggaaactttgaaggtctcaccgatggcacttaactgatccagtgtttcggttgcatcctttccttcaagcttggctgttgtaaggaagctgtccagatatacctgttccagatcatgatcctgagagaggataccacagataaatcctacaaattcgtccgcatttttaaccggaaatccggaaacatcgataaggcggaccttgttgttcagctcatacatgtgcttggtgctcttgtctaagtaaacaatactgccgttggcgtccttaacagctccgtttactttgtctaacagtacttttgtttttcctttgcctttctttcctacgatcagttcaaccatcctgttttcctccttagacacatataataattttgaataaaattgctattgatatgcttcaaattatagtgcattgtgaataaaattgcaagggctttttgaaaaaaactggtaattttattcaagctttactgatctctttcattttccatttgtgcttttgctttccttccgatccgggcagtgctgttcatgatactggcccgggtaaccttgtcgtttccgtacttcagacggatggaatccagtgctgcatccagtttctgctggcgttccttcttgtgagtatcctcaaaaaaggacagctgttcaaaggaatcatccgtaagaccggtcagtgatactcccaggagccggagtggctgtctcatccaggactcctgaaagaggttttgggcatttctgtaaatctcttctgtgatatcggtggcatttggcagtttagtctgatgagatttgtttcgaaaatccagggtacggaaggttacagaaatgcaggtgcattttttctttttgcggcgcatgcgggcggccagaatatcgcattgttccagcaggatcggaagtgcctgctccagtgagaccagatcatcgttaaatgtagtttccagactgaatccttttgcttcatcaggttttgctttcacaggggagtcatcaaggccacgggcatactgatataactgctgtcctgctttttcaccgagaagtgcctgtatctttgcttttttttcatgagccagatcgcctatggttctgatccctgcgtcctgcagctttttttcagaggatctgccaagaaaaagaagctctctcactggaagaggccacatttttacagggatttcttccggaaataaagtatgcaccttatctggcttttcgaaatcagaggccatttttgcaagaagtttattggtggagatgccgatatttacggtaaagccgagttctgtacggatcttatccttcagctcatgggcagttgccaccggatccgggtaaatataggaggttccggtcatatccagaaaaacctcatcaatggaaaaggattccattaccggtgcataggacccacagatttttttgaaggctctggaacatttatcgtataattcaaagtcagatggaacggccacaagattcggacatttgcgaaaagccatagccataggctctcctgtctggattccgtatttttttgcaggaatggatttggcgacaacgatgccggtacgtttactggggtctccgccaatacaggaagggatgtctctcagatccggaagtcccatctttactctttttgctgcttcccaggaaagaaaagcactgtttacgtcaacatgaaaaatcaatcgttccatatagggttcttctttcagttgtataaagtgtgtctgttatatctatttacagatttttgcagacagctgatcaaaaaggttccgatattcctcttctatctgtgaaaaagggtattgccggtattggatcggaacatggacaaccggttttggagtgtccggtgtttcattcagaagatatttcaggtcataccagagcaggtcattgtcgatctccttcagcttctgctcttctatggtagaaagtccggatcccagatatttctgatagataatgtttaaaagagcttcctcctgtttccgatactcaggaagacttttcttaaatggtcttggaacatcggacatataacattcgctggcatcgtgaagaagggacgccagtataagacggccggaatagccacgtgcttcggcttctttggcacagaggatgcagtgctgccctacagagaaaaaagtccttacatgaccatttccgcggcatagaagagaaagtgcgtgtgcaatgtcctcaatgcagatcagctcttcgtccggatgtgtcggatcaaaatgttttccagtgtatgtggtaatgcagtcgcccataaaatgttacgcctttctttaagcttatgaataaatatgattatttattataaacacccagagaaagtgtgtctatatgatcgcgaaataaatttcgggaactgttacagaaaaacaaaagaaatacatggctgttttacaaatatgagtgattctgtgctataatacaaaaaaacgacagggagatcatcagcgatgaaacatatggaagaaatgaagattgccggattagccatggcattatgtatcgtgatgctgggaatctatatcgtcgtcccaaaggatggaacggtttctcatcttactgctattccggataataatgcggcggagcctgttacagattctacatcagagggaactgctgatgcggattttccaatctatacagaggacagctacagcagtgagcccgagagttcgtattcttatgacgatactggggacggagattcctatacggaagagccgacttatgatccaggtgataattcttacgacggcaatacggatagtgaagccaatggagcagatacctcggatacttcagatacatcttcagatggaaccggtgaagacgcaggcaattatgaagatccggacagtggctccggtgaagtggtcgatgacaatgattacagtggtacttcggatacggatcttgatagcagtgagaccgaagataccggcagtgatggcaccgatgatacagtagaaattaattgaatgtaaaaaaaagaataaaaaagcagatctgcgaaataaaatttcaaacagatctgcttttttgttttttgtatggaatcctgtcagttgatgttctggagcaaggatgtcatttcctgataaagaacatcctttgaggacgcacccatgacgatggaaataaatggcttcccataaccattctggcttaaaagtgccagacagttaccggctttatcggttgttcctgtttttcctccaagaatagtgacatccttaggagttgctgcctctccggtaagataatgatctgtagcgggtaaggtagcacttgcatcggagccatcggaatgcttatagctaactgtataagatgccatttgtgtgatgtctgtaaactccggataattcaaggcttctttcagcatcagataaatgtcataaggcgttgtataatgattttcgtcctgaagaccatggggattggtaaagtgagttcctgtacagccaagttctgcagcaaagctgttcatcatctctacaaatttatctgttgatccacctatatgttccgcaatggcagatgctgcatcattggcagaataaacaagaagacaatgaagaagctgatccatggtaacctgatctcccgcctggaaaccagctacctgagaaccggattccagggtaacattctcctgtgagatcgttactgtatcgtccatgtttccatatttcagtgcaagcatagctgtcatgatctttgtgatgctggcaggataaaccttgttgtaggcaccttttgcatagagtacctttttatcactgagattcagaagcacaccggactggctgtcatccagactgacagaatccagagcaacatcttttgtaacaacacagagatcatgggcgaaacctgccgcgcgctgctcttctttggaagtcagagtattatcaaactcggagaatgcattgaaagaatttgcaggagtggaaaaatctccgcccttcagcatgtaaataccaaaaccgccagctgtgcatagtacgatcagcagaagaaggagaaaaatggtgttgcgaatccttttgcgacgcatccgtttcatccgggtattttgagctttacgtctggctgaaacagttctgtcagacggcatggaagttgtttttgtccccttggaagctgtatgtgcagcccgggaagcctgacctctggaaggattgccagaacgtatatgattttttacaggttctttacgtgtcataagtattcctctttccgaaagtaggtatccgatttctgaccttttttctgtaattctttattatatgcactgctctgcagtcctacattgagaacaagtcccatacccataaacagactgatcagagaagtaagaccatagcttacaaaaggaagcggagtacctgtgtttggtgcaaggccggtagcaacacagatgttgatgaagctctgtatggaaacaatgcttccaacaccgcagcatatgatcttaccggcaagatccttggcccgcaggctcatacggatacattcaaaggtgatcagaaacagcagcagtacgatcagagtacagccgataaatccgtactgctctccagccaccgcaaaaataaagtcggtctgattctcagaaacaaagtttccatcatttacggatgtaacactggtgtcattactgaaagcacgtcccacaagctctccggaggcgatggctgtttttgagttgttctgctgttcaatatcatctgcgtattcttcgttctccggatacaggaatgacatgatacggtttctctggtaatcctgtatcagtttctgatccggctgcacgataatggatagaaagatgatggccagaggaatcgcgatcaaggctacacctccgatgatcttataactaagtcctgcgatgtagatcagaatacagaacaggactgttacggtgatggtgtttttcatatccggctgtacatagatcagcatcagtgggatgaccagaaggacagctgattgtatcagagtctttaaggtattcagatcttcctcatgatccataaaaaatttggcaaaaaacaggataatgatgatctttgaaagctcggtaggctggaaacggataaaacctaaatccacccatctggcagcaccattggcgctggatccgaagaaccggacagccagaagcataacgatattaaatccatacatgatccattgaaaattcagcagccaggaataatccatcagtgaaaggatcagcataaagaccacaccgatgatcacacccagaagctgacgtgtgcgaaggtagtcggcagctgttcctacaagctgaattccaataaagctgatcgccaggagaaagatcaccagtcgaaaattgtaaaaccgcagcttatactgtttaatcataaattatgcatctcttttcttaagtacgggtatgactgcatgcagaacaggtggttcctgtgtgatctgtatggtcacccctggttcatcaattacaacgtatttttttacggcatgtatcagatcgttccgtaaaagcttcatcatctgtggagaacagtctatgcgttccgatacaagaagaagcttcatcctgtcgcgtgcatagcctgcagagtggtttttcccggagaaaaatcccataatcattcctcctgtgatgaaaaatgtcagacagcaaagcgtctgttattttcgaaaaatgctgccaagacggtggaatacaccattttttcgacgcacagtaacataagggacctcttcgcccataagcctccggcagatattgcgatactcttcttctgcctgggaattttttccggataaaggttctccctgatttgtggagatcacgatctgttcatcatctaggatcgcaccgatcagatctacagccaggatttccaacacatcttctacggacatcatatcacctctggcgatcatttccggtcgaagccggttgatgatcagccggatatcccggagtcctccggactccagcaacccgatgatacggtctgcatcccggatcgcggaaacttccggtgtggtcacgaccaatgcacggtccgctccggctactgcatttttgaatccctgttcaattcctgccggacaatccagaaggacataatcgaattcttcccggagatcatcggtaagcttgatcatctgttccggagatacggcagttttgtccttggtctgggcagacggaagaagatacagttctgaatgccgacgatcccggatcagtgcctgtttcaggcggcaactcccattgatcacatcaaccagattataaacaatacggttctccagtcccatgacaacatccagatttcggagtccgatatcggtatctacaactgcaaccctttttcccatggcagccagtccggtcccgatatttgccacggtggtggtttttccaacaccgccttttccagatgtaatgacaatgacttcactcatgttttctgattcctcctataaaatgttccacacttctggtatcctcataaagtttgtttagtcattcgatacattactggtatcgcttgctgcatagccagtgagaatggtgctttcatctgcaagtccgaaaatgtatttaaagatatcattagctgcaaggcaggcattaccggatgcatatccgtttgcgattcgtacagatattgcgtacttgggatcagaaacaggcgcatatccgataaaaagtgcattgttcggatgataatagtcaatctcggcagtaccggtttttcctgctacttcaactccaagtctgttaaactgatcatgagtctgcactacacgatacataccgtcatggatggcatcccagatattgctggaaagatccaactgtccagctgtttcggaaggatattcctttataagttttcctttggaatccgtcacacggtccagaagggaaagcttgtagatcgtaccggaagtggcgatcgttgacgcatagcgtgcaagctggctggtcgtaaacgtattggtaccctgtccaatataggaaggaaccgcgtttttgtcagaaacctgcggagaagcctcggaaatttcaatgccggttttctgatccaatcccatgagggaagcatatttctgaagcattccaagacttctggcttcagaaaaattaccttcggaatctttaccaagttcgaaaccgatcgtagtgaaaaatacgttacaggactgcccaatggcctcacggatatcaagagaaccgtggccctgtttattccagcagttgatcggaggtgttacaaggtcaaagcttcctgtacattcaatatatgtgccatcatctattacgccctcggacatgccggcaacagtagataagatctttaaggtagatcctggagccgtcttctgctgtgttgccttgttgaagaacgggctggaaagatctgtggaaagctttgcataataatcggtgtccatattgttggtcagacgattattatcatatcccggataggaaacacatgcgagaacatttccggttgtagtatctgtgattaccgcagatgcagagcacggagccaacgcaagctgggccggtgtgatctcaagatttgcgatcttgcgatacatgaaggtgtaggcatcaagaccaccggaggccattgtctgatacagttcgtcttcttttgaaagaacgccctgttcatagagaacaagacacagatcttctccactgatggtgtcttcctgaagcatatatttatacagaagctttgaaaagcctgtatctgtcttcaggtaatcaatgatataggcggtaagagcctgatagatctcttcagaatccagatattctccggaggttgagatctgggaaatatcgatccagttctgactggcagcatagttcagataatccttcagactgatactctggtcatttttccaggctttgtatgtttcatctgaggtatcaatggaatcacttttcagtaccttcagggtattggtaagaagatcatcacagatataggtaagatattcctgcatctgcgtatcttcatccttataggctggaggattgtcacctgtcagcctgttacttattgtatcaaaaacctgttgctgtttttgctgaaatttggcgtataaatttttttctgtatcggaagcatctgcatcgctgaatttattgatatcgatcacactgtttgcgatcagtgcattgtatacatcatagattgggatggtgatcttacttgcatctttctctgcttcataatcaaagcttttatttggtgtcagtttagagaggacaataccggcaacacgctgttccaggatctggtaaatactcttctgccagtcggaatcaatggtcagataaacatcgtttccggccacaggatcaacagttttggaatggtcgatatcaaggactttaccaagattatcaactgtgaccgtttcttctccatcttttccctgaagttcaagctccatatactgttcgatcccggcttttccaacaaccgcatcattggaataatcaggattatccttacgaagggtttccagttcttcagaagaggcctggcctgtgtaaccgaggatcggcgccatactctcatcgtccacatattttctggtggaatcttctacaatgtcaataccctggagagcggcctgattttcttttatggctgccacagatttttcactgacatttgttgcaatggtcaccggcatatatttcttgaaactgttggtgttcagctgatagcgcatgatcgcaatttcgaggatttcctgtttggtaagctcttccggaagagaatgtgcggcaagttcttccggggtgtaggcatcttttccgtaaagaacgatagaaaatccgctgcttccggtaagatgatccatgatctgggctgcggttgcgtttttctgctcctcactgagatcatcaatctgtgcttctccgtaaatatccgcacggaaacggttaagagtaaatccttcatctacatcaaaagcatagtcgccatgatcattgacggtaatatgaaaattatcagataagctgtccccatttttggaaaggatctgtaatacctggtaggcgataccgttcagagtcagattcttttctctggtgctgttgtatgtaccgctatcttcgaatgtgacagaatatgcaagtacattggaggcgacaactgtgccgttacggtcataaatattaccacgggtgcttttgatcacgcgtgttttggtggtacgtgtctgaaatttactgatgtaatcctctccctgtatgatctgcagactgaaaagctgccggaccaggacagatgacagaaaaataaatacgatcacaagaactgtagtacgtttcagacggatttttttgatgattttttttattttaattcccaaatagactcactttctttccttacagtatccattaagtggtagttgatccagtaaaatacccggtatacgatgatggtgagaaaaaccgtatatacaatctcggggataatgatcctgtatatgtaggtccagaatccaagacggcctctgagcagaaactggaggccatacacagccagattataaagaagatctgttcctgctacaagaaaaagcggaactttcagatcatcatcataaaaactgcggaatgcatagccgctgataaaacctatatacatatagatcagtgcataaaatccaaacaatgatccataaaagagatcgacaaaaagcccggaaaaaaatccagtccacagaccgacttttcttccacgcataagtcccatggatacacacaggatcaaaagcagatttggagtgatggatccaatggaaatacggtccattactgtgcactgaaggagaaaacagacaatgatagtgataaataatatgatcctatttttcattggacgcatcctccgatttgtctatcgcgtcctgtttattggtggtgatcacaaatacatctttcagatgaccgaaatcaaccggtgtaacgatcgtacctgtttttgtcaggttattgggatcctgctggatctcactgacataaccaataaacagtccttccacatatttttcactgatgttcgaggtgacaatacgttctccgactgttaccttgttatcctgatcgtaaagctgctcaaagcttaatttgccttcatcgatcagtttcagatctccagtgacaacgcagttgtcggaagtactgactgccatggcactgacattgctgctgtcatcgatgatggaacggacagtagcccaggaaggtcccacttctgtaacgatacccacaagaccctttccggcgatcacgttgttatcaacccggatcccgttattactgcctttgttgatcataaaggtatcataccagtttccgggatctttggagattatccttgcggcaaccttgggatagtcggtatattcctgatcaagatcgtaaagttccttcaggcgtgtgagctctgtctggtcctggatcaggatgttattctgttccgtaagactgttgatctgacttttcagctcttcgttttcctgaagcacgtcctgtttatcacgaagattgttttttacatttccaaatatatcgctgacaccggcgatccccttttcaaagggaacgataagaaaaccggctgcctcctgaagtggtgcggaagaggttccggaggctgctgtagctacgatgcagcttccacagaaaaatgtcatgattaccagaagatgtttactttttaaattaaaatgaaaacgcactttttttcggatgtttttcattatatatgcccctttacagttttttctgctttaccggctgggcccatttgcgcaggtttctgtcgcggatgatcttttccaggccgtatgctgcagaagtttcatacagatcagaaagattaaaggcaaatcctgtatagctagccagatagttatctatataaggaagccgtgtactgccgccggtcagataaatgccctcttttgcgatatgataagcaatctgtggcggggtacgttccagaaaagatttcatctctgctgcgatctggttcacacagttggcgatcccttcattaacaacgtaggcagaaataacttcttctcgtggaagtccggaaatactgtcgatcccgactacttttcgggcttcttttttctgatcattcagtcttcccataactactttcagacgttttgcagttcgtgttccaatctgaagattataatgttttcggatttcgctgcagatagattcgttcatctgtctgcctccgatggggatcttacggctgatgatgatcttgccgtcggttatgatggaaaactctgtactctgtgcaccgatgtttacgatcatgctgccctgattcttttcagggtcgattcccatggcaatggcatctgcaataggggcctccaccataaaaacacggtttttccgcagccagtgaccattgaccagatgatagtatgccctcttttcgatagcagtcatatcaagtggtacggagaaatacatgtctgctccgagaccggatgtatgatcgattttttttatcatgctgtaaaggacgatctcctgcaattccagatttgccagcataccgaaagccataggagaatttacagaaatatctgcaggtgatttttcaaacatttcataagcttcgttccctattgcaaggatccggcgtcctctgtaggctaccatgttcttttctatgtaacttttgtttctgaaaaatgaatagacttttacagagctgcttccaaggtctactccgtaattatttctaaaaagcataaatctgtcccttcacttaagtatattcatcaaaaatccctttttcgcggaaactgacatacctgtgatcaccgataatgatatgatccagaagatggatgctgaggagttcaccgcaatgatagatccgttccgtaacatccaaatcagcctgactgggggagggatcgcctcctggatgattgtggaccaggatcaggttcaccgcccgatactttacagcttctacaaagacttctcttggtgtgatcagtgtggcattgacagtaccgcggcttaaaagctgttcccccgacaaatggttatgtccgtccagcatcatgcagtaaagcaattcctgctcttcatgccggagccgctccatataatatttcgcaatggttaccggatggtgaaaagacaattccggttttgcagctgcggttgccatacgcttggaaagttccccgatacatttcagctgtatggcttttaccttaccgatcccatggatcttcatcagttcctgcatggaaatatgaaacagtccaagcaggccactgtatccggtctgtttcgataaattcaggattttatctgccagagtcagggaactggatccctgtacgccacagcgcaggatcacggcaagaagctctcgatcgctcaaggactgttctccttcccgcagacatttttcatacggacgctgataatctggcatttccattatagtatctttcatatgatttcccttttcgctctcgaagaaggggatgcaaaattgcagaagttattttagcataaaaaagcagggatgtacactctatcccggaaatttccacttttttcacattttgtttacaggcagggcataaacagaagcgactgcttctgccaccttgatcccgtccattgctgcggatgtaatgcctccggcgtaaccggcgccctctccgcaggggtagatcccttctatattggaagtgagctttttcggttcccgaacgatccgtacaggagaagaggtacggctttctactccttccagcaatgcatccggtcggtcaaaaccggaaagcttttttccaaaagcatggattcctgcttcaatggaatcgccgatctctttcgggaaaatactgcggacatcggtaagtgtataagctcctttgatacaggggatcacatctccaagcctggtacttttctgatgggtacagtaatctttgaaaagctgtaccggaatttttccgtttccggcttcccaggctgcgcgctccagttttcgctgcagagcgattccgccgagaactccctcttcaggaaaatcagaagggtttaccgtaacgatgatagcactgttggcattatggctgtcacgtgcctgatagctcataccattcactgcaagcataccttcttcagaagatgcatttacaacatatccgccgggacacatacagaaagaataaacgccacgtccgttttccagtgtatgggtaaccttgtagctggatgcacccagacggtcgttttccggttccccgtaaagatcctggttgatcatggtctgtggatgctccacgcgtactcccactgcaaaagatttcggctccatattaatattgtgtttatccagcatggcaaacgtatctctggcgctgtggccgggagcaagaatgcagatttctgccggtatttcctctttttcattgacaatgactgcattaagtttccggtcacggatcatcagatcagttactgtggaacgaaaacggaattctccgcccatttcttcaatctgatgacgcataaactgaacgatacctacaagctgatctgtgccaagatgaggcttttgctggtaaaggatctcagaaggagctcctgcctccacaaatcgggaaagaacttcctttcctcttccaaaagtatcttttaccagagtattcagctttccatcggaaaaagtccctgcaccgccctctccgaactgtacattggaatccggatccaggatgccgtttttccagaaattttccacggtttcctggcgtttgtctgcttcttctccccgttccagtaccagtggacagtacccggctttggccagataccaggcacagaataatcctgcaggtccgcttccgatcactacaggacgatgggacagagtttcagagccagatgagggaaaatgatatttcttctcagaggttaacataatattttcatcgtgaatctttttgagaacacgggattcgttatccagtttaatatctacagtgtagacaaattttttgtcctctttgtgccgggcatccagagattgttttcggatctcataggtgaacggctgatttccaagacgaagcatttttgctatttttcggtgaagctgctcttctgtatgggtgatgggaagcttcagctgtgtgatccggatcatttttcttcctcctttgctgcccagataccggcggcagctccgcttgaccatgcccactgcaggttataacctccgcaggtaccgtcaatgtcaaggagctctccggcaaaataaagacctttatgaagtctggactccatggttttgctgtgaacttcagacgtatccactccaccggaacaaacctgtgcctgttcaaaggaaaggccgttttttaccgggagacgaaaatcggtgatcccgcggataagatccttctgtgcacataaaacacggatcagtttttcaggaaaaagtccgatgagaagttctttttctgttttgtaagggcaggctgcttttctgtgctccaggtattcttccagctctttccggctcagttccggaaaaaaatttatggaaagctccacatttttgttttcatggacggcacggatagcatagcgggaaatctggaataccgggatcccggatacaccgtaatcggtaagctgcagctctccctgctgggagactgtcggtgtgccgtctatataaagtgttatcgtcccttctgttcgtacaccactccagccggaaaaagaatttcccttacatttcagagctgtcagagctggaaggggttcgatcaggtgatgtccaagactttttgcaatttcgtatccgctttcgcaggaacctgcaacggaagaagcacgggaaccatttgcaaggatcacggcatcaccactgtaggtccatccgtcagtatgaatcttccactgtccgtctgcaaaagacacgccggtaacagtctgattggttttcagctttaccttcaggctgcgtgccttcatgacaagaacatctactacactctgtgcctggttgcttcggggatagatccatccgctgcggtctgtggtacagattcccaattcctgaaagaatttcagagttttttccacaggaaactgtgccagagcatctttggcaaattcaggatgagatccccggtaagcgttttcatcctgattcaggttcgtcatattacaacggccatttcccgtagcacagatttttctgccgggacggtcattttgttccagaaccgtaactgcagctccgtttacagtagcctgaatagctgccataagaccggaagcaccggctcctacgacaaagatctgtttttttaagtccggtccttcggattttttcataatttcacaagttccttatcaaccatatactgaagagatttcaggattcccagctttgcatgctcccaggtaagaccaccctggaaataaactgcataaggaggtttcat

SEQ ID NO: 255 - DNA, 8030 bp, Unknown
  gut microbiota DNA sequence
attggtattactggatttcagtcccagaactttgtcggatctgacggagtttatgattccatatccgatttcctcacctttcataagagcaatagtcttatgaaatttgagcgtacccgccgcctgtgctgtgaccggtgctactgcaagatctgtcacgataaatgtaagtgccagaaataacaccaataatctctttactgcttttttcattactttttcccccttttataagccttttggacttattctatacatattagtatacaggagtttttcatcttcatcaatgttttttctgaattttctgtacactatcttcccgaacctttgcgcgaagctctgtcagatattctgagaatttcacctgctcatttccgtaagtcatctgcagatcatactccagcggaatccaggttttaatatcagattcattgtgctggatcagggcttccagcttgtccagagctttatagatcctggcctccagagtctgctgctcttccatttcctgatagatttctgacatttctttattgaacggctccggcagagtcttcacccattctcccagcacatcggcttctttctccgaatccttatccgttttttcaaaggccgggatatcaccggtaaaagcttctcccagatcatggatcaggcacattttcataattttcagaagatctgcctcaggaaactcatcactgacaaaatatgccatcaacgtgatcctccaggaatgctctgcaacgctctcccgcctgccaccggaagtataactatgacgcactgcatcctttaaccgctctgcaacggaaagtacttcgatcagtttttctggtttcatatatattacgctcctcttctttttattatgtcaaccatctaaatcagctattttcagcctatcttatatagctgtccataaaaccgttatagcgttttcactttactataccataattttccaaagaacagacccccaaaaaacactctccttacttctgcgcgctgacatttcccatcccaaataaatttgtccaagctaatttctaaaaaaactataaaccatattgcatttttctccataatcgtcataatgaagttataaacaaaagaaagaaggtgattgccgatggatatcacggtgtcggatgaggtctcacaggaatatcatgcgcttgtgaagaacatcctctgtaacagagagttcctgaagctgagcctgtacacccaccaccagtggaccacacggctcatgcacagtatcaatgtttcttacctctcctggttcattgccaggaagctgggatgtgacgagaaagccgccgcaagggcaggacttctccacgatttctgtccctatgacttcagggcggagacaccgaccggtgagcatcaggcgttttatcacccgaaggctgccgcagacaacagtgccacacactttgatgtcacagacagagagctggatgcgatactctcacatatgttccctctgggacctcttccacgcaataaggaagcctggatcatcagctttgccgataaagcctgcgccatcgcggaaggctgccatatcgccattgcactggccaggcggaaccggatcgtcatcaatccggcataatttccacacaaaaaacagggccgtcgccacttctgacgagccctgtttttgtgtggaaatttattttatggtaatactttgcagattactttatatatcttagttctctttcacaacaaccttatccaggtgccagatatcatctacatactcctggatagttctgtcggatgtgaacttaccgctgcatgctgtattaagaagtgccatcttagcccagcgtttctcatctttgtatgcttcctcaacacgtttctgtgcttctgcataggaacggaagtcgccaaggataaagtactggtcaggtctcggcatgttgcgtttgtcgagaagtgagttgtagatgtcacggaacatctctgtatcactggagaaggttccgttgatcagctgcatcagtacctgacggatctccggatctgtgttgtagatgaagtccggatcgtaaccgccgttattctcatagttgatgatctggtcagagctcataccgaagataaatgcgttctcctcgccaacctcctgtacgatctcgacgttggcaccatccatggttccaagtgtcggagcaccgttcagcatgaatttcatgttacctgtaccggaagcctctttacttgctgtggagatctgctcggaaacatctgctgccgcaaaaataatctcggcgttggatacacggtagttctcgatgaatacaaccttcagcttaccgttgatggaagcatcattgtttacaacatctgccacacagttgatcagcttgatgatcttctttgcacgtgcgtaagctgcggaagcttttgcaccaaagataaatgttctcggatagaaatccatctccggatgtgccttgatctggttgtacagatagatcacatgcaggatgttgagaagctgacgtttgtactcatgaagtctcttaacctggatatcgaagatggagtgcgggtcaacctcaacaccattgtgctccaggatatattttgcaagacgctctttgttcttgaacttgatggtcatgaactcctgaagagccttctcatcgtctgcataaaccttaagcttggaaagctgggaaagatctgtgatccagtccggtccgatcttgtccgttacccagtcagccagaagcgggtttccatgagcaaggaaacgtctctgtgtgataccgtttgttttgttgttgaacttctcaggcatcatctcatagaaatccttcagctcctgattcttgagaatctcagtatgaaggcgtgcaacaccgtttacagagtagcctgcaacgatcgcgaggtgagccatcttaacctgtccgtcatagatgatcgccatcttcttgatcttctcgaagtttccaggatatttctgctggatctcaagaatgaaacgacggttgatctcctcgatgatctggtatacacgcggaagcagtctggagaacagctcgatcggccatttctcaagtgcctcggacatgatagtgtggttagtgtaagcacagcattttgttgtgatatcccatgcctgatcccagccaagaccttcctcatcaatgaggatacgcatcagctctgctactgcaacagtcggatgagtatcgttcatctggaatacaaccttctcatgaagttttgtgatatcatcatgagttttcttatatttggcaatggctgcctgaaggctggcagatacgaagaagtactgctgtttcagacgaagctctttacctgccatatggttatcattcggataaagcacctctacgatagtacgtgcaaggttctcctgctctactgcgttgtgataatcacccttgtcgaaagagtcaaggttgaagtctacgatcggctctgcatcccagatacgaagtgtgtttacaacatcgttgttataacctgtgatcggcatatcgtaaggaacagccttaactgcctgatatccttcatggatgaatttattctcgttcttcaccggatcccactcaacgcgtacatatccgccgaaatgaacctcttttgcatactccggacgacggagttcgaaaggatagccgttcttcagccagttatccggtacctctacctgataaccatcgcgtacttcctgcttgaacataccgtaacggtaacggattccgcatccgtatgcacagtagttcagagttgcaagggaatccaggaagcatgctgccagtcttccgagtccaccgtttccaagagccggatccggctcctggtcttcgatgcagttaatgtcaagtccaagctcctcaagagcctccttaacctcgccgtatgcgccaaggttgatcaggttgtttccaagggcacggcccataaggaactccatggacatataatatacgatcttcgggtcctgtttttcatacgccttctggctcttaagccagttgtcaatgatcacgtccttcacagtgtagcttacagcctgaaaaatctgctcctgtgtagcctcttccagtgtttttcgataaaggaattttacgttttcttttacgctttttttgaactcctctttctcaaactgcttgtcaatcattagttttcctcctgtactttggatactcccagtgttacagcctctttgttgatgttccattctttggtgtaaccctctgcttctcccagaacaatgttttctgccagtacttcacgtttgatctcatcctggtttgctttcatgatatccatgatcttatcgttatcttttgcatagacaatgatcttgtccatgacttcgaaaccagcctctttacgcatggtctgaactttactgatgatctcgcggacaaagccctcctggatcagttcaggtgtaaggtttgtatcaaggacaacggatgtttcaccgtctgtctctgtcacatagccctcgctctgggctgtttcgatcaataagtcttcctctgcaagctcgactctgtttccgtcaatgtcaagaacgagaacaccattatctctcagcgctttcattgctgcggttccgtcgatctcggagagtgcggtacggatgccgttcagaagcttgccgtatttcggtcctactgtacggagctgcggcttgaagctgtaggaaatgaaggactctacatcatctgcgaatttcacttcttttacgttaagctcatctgcgatgatatctgtgtagaatttatccatagctttctcagcttttacatacatggttccgatcggctgacggttcttgatgtttgcggtatttctgcatgcacgtccgagaacaacgatctcaagaagctcttccatgttcgcctcaagatccttgtcgatccatgcctcgtttacctccgggtaatcgcagagatggatactctccggagcgtctgtgtcaatgcttcttacaaggttctggtagatatcctcagtcataaacgggatcatcggagctgcagccttggcaactgttaccagtgctgtgtaaagtgtcatgtaagcattgatcttatcctgctccatgcccttagcccagaaacgttcacggcttcttcttacataccagttactcatatcatcaacaaattcctgaagtgctcttgcagcctccggaatcttgtaggaatcaagatctgcatcgacagtcttcaccatggtattcagcttgctgagcagccatttatccataaccggaagcttatcgtaatttaaagtatatttagtcgcatcaaaattgtcaatgttcgcatacaatacgaagaatgcgtaagtgttccacagagtgctcatgaactttctctgtccctctacaactgccttgccgtggaaacggttcggaagccatggagcactgttgatgtagaagtaccagcggatagcatctgcgccgtatttgttcagtgcgtcaaacggatcaacggcatttcccttggacttactcatcttctgtccgttctcatcctgtacatgtcccagaacgattacattcttatacggagccttgttgaaaagcagtgtggactcagcaagaagagaatagaaccatcctcttgtctggtcaacagcctcggagatgaagtctgccgggaactgctgctcaaacaggtctttattctcaaacggataatgatgctgtgcaaaaggcattgctccggaatcaaaccagcagtcgataacctccggtacacgatgcatggtcttgccgcaatccggacacttcatagtgatgtcgtcaatgtatgggcggtgaagctcgatggtcttcgcacgctcgtcaccactcttctcatagagatcctggcggcttcccacggattccatatgtccgcactcacactgccagatgttcagtggtgttccccagtaacggtttctggaaataccccagtcctgaacgttctcaagccagtcaccgaaacgtcccttaccgatgctctccggaatccagttgatggtgttgttgttgcggatcagatcatcttttactgctgtcatcttgatgaaccaggactcacgtgcatagtagatcagcggtgtgtcacatctccagcaatgcggataatcatgctcgaatttcggtgcgtcaaaaagtttgccctctttgtcaaggtctgtgaggaccatcgggtccgctttctttacgaatacacctgcgtatggtgtctctttggtcatgttaccctgtccgtctacgaactgtacgaacggaaggtcatactcacgtccgacacggctgtcatcctcaccaaatgcaggtgcgatatgaacgataccggtaccatcactcatggtaacgtagttgtcacaggttacgaaatgagcttttttgtgctgttttgctgctgcctctcctgtacatgcaaaaagcggctcatattctctgcgctcaaggtctgttcctttatatttctcaaggatctcatatgcaggctcatcatcctttgcaagcttgccgagaaccttgtccagaagtgcttctgccatgtagtaggtatagccgtctgctgcttttaccttacagtagatctcatccgggtttacacaaagtgcaacgttggatggaagtgtccacggtgttgttgtccatgccaggaagtatgcgtcctcaccaacaaccttgaaacgaacgatagcagagcgctctttaacagtcttgtagccctgagaaacctcctgtgcggaaagaggagttccgcagcgtgggcagtaaggaacgatcttaaagcctttgtaaaggagacctttttcccagatctctttcagcgcccaccactcggactcgatgaaattgttgtcgtatgttacatacggatgctccatgtcagcccagaaaccaacggtagaggagaaatcctcccacattcccttgtatttccatacgctctccttacactgctgaatgaacggctccattccgtactcctcgatctgctccttgccgtcaaggccaagcttcttctcaacctcaagctcaaccggaagtccgtgagtatcccatcctgcttttcgcggaaccatgtatcccttcattgtacggtatctcgggatcatatccttgataactcgtgtcagaacgtgtccgatgtgtggcttaccattagcggtaggcggtccgtcatagaatgtgtatgtctcgccctctttacggctgtccatactcttttcaaaaatcttattgtctttccagaatttctcaacttctttttcgcggtcaacaaaattcagattcgtgtcaactttacgatacacaatttttacctcctgtgtctgattactggctgctgcctcatctgtaaggccacagcggattgtttcttcacagatacctgttcgtgccaatgcttcgggcacttataaaaaaagaccccatcctgtaaaaggacgaagtctgattcgctgtaccacctgttacattatacgggcctgtgtccagatccctgcgtcttctgctgtgttcttatgctctgtgttatggcgcgggctgttgttccatgtctgttcatggcggacaattctttgtatctgccgatatatgttccctgtaacggaggaaatccgtcagttcttacttaatgatcatctgtatatcagatattcttccggctgctgccggacaacttcggaactgaagctcaggagtgatattccgccatatttactcgtcccaggctcccaccatccccagttcgctgcaagctttccatatggcctactgtctccatcacagctttttctatatacgctgtctattataggttggggaaaatccatatgtcaagtgttttcatggatttttcttattatatgtatgttcacttcttcttaatggaattttcacagactgcaagtagtttttccgggaggaaagtggtatactactacagaatcttgagggcaaaaatacagcttttcattaatac

SEQ ID NO: 256 - DNA, 17892 bp, Unknown
  gut microbiota DNA sequence
gctctttccggcggtcagaaacagcgagttgccatcggaagtgcaattatccggaagccgaaagcctttctcatggatgagcccctttccaacctggatgcaaagctccgtgctcagatgcgtgtggagcttgtgaaattacataaacagctggacaccaccattatttatgtaacgcacgaccagacagaggccatgactcttgggactaagatcgtggtcatgaaggatggtctgatccagcaggtgggagcacctcagagtatttatgacaatccggtaaatcttttcgtggcaggcttccttggttctccgtccatgaactttttccggtgtacggtaaaagcagaagaaaataatcgcacggcccttcttctggatgatgccaaaactgtgaaaaaggtttatctggacggaaccagaggaaaacagatcgcagacagatataacggcagacacgtgatccttggaatccgtccggaggatatctacgagtttgatgaggcgaaaaagcttggtattgaaaatgaaagcgtagatgtagatgagcctgtagtaaaccgcgagatgctgggagcggaagggatcctctattttgatgagcagggcaaaaccctggcagtccgcttaagtccggaaaatcagacacaggtaggggagaaggtttctctgtattttgatatggagaaggcccatgtgtttgatccggagacagaagaaaatatttttgtgtcatgaatttatgtcacggaagagcttgagtacaggcagatcagcctgtagatagaatctgattatgcaaggaggagaaatagttatggaaaataacagcaaaagcaagatcacaccgtacttatatctggtgccttgtatgcttatttttggaatttttctgttttatccgtttgtgaaaacaatttatttaagtctttacaagaccaacaagatgggacaggcaaagctgtacgttggtctgggaaactataaagaactgcttcagtcagcatcctttatcaacagtctgaaggtgacgctgatctttgtgctgatcgttgtggtcggcggcatgcttcttggtctgatcgcagcagtgctttgcaacaaggcgtttccgggaatccgggtgttcagtacatcttatgctctgccaatggctattgcatctagttctgcggcaatgatcttccagatcatgctccacccggcagtaggtattgtgaacaagcttaccggcctggatatcaactggctgaacgatccgaatactgctctgatctgcgtagccattcttactgcgtggcttaacagcgggatcaattttctgtatttttccgcaggactcggaaatattgatgagaccatttatgagagagcttctgtggatggagccagcagtgtgcagcagtttttcagcctgacgcttccgggactttccccgatcatgttttacacactggtggtaaatatcatacaggcctttcagtcctttggacagatcaagatcctgacagagggtggtcctaatgagtctaccaatgttattgtttattccatttacagggatgcgttttttaactaccgcttcggaagtgcggcagcccagtctgttatcctgtttgtgatcatcatgatcatcacactgatcatgttccgtattgagaagaagggagtgaattactgatgagccagatggaaaatatggcagtcccggcagtgggaaacatgtcaaaagaggagcttctggagctgaaaaaagctatgaatgcaaaggctcttgcaaagagaaggacaagaacagcgctccgtgttacggcaaatgtggtgtttgcagttctgatcctgcttccattgctttatgccatcagtattgcactgatgccttccagtgaactgtttactacagagttgaatctctttcccaagaatccgaccttttccaactttatcaatgcattccgcaccgttccacttctccgattcatattgaattcctttatcatggcgggatgcattaccatcggacagatcattacctgttctcttgctgcttttgcgttttctttcctggaattcaaaggaaaaggtattctcttcatggttgtgatggcaaccatgatggttccgggagaggcaacgatcatttccaactacctgacggtatcaagctggggaatgctggatacttatcaggtactgatcgtgccttaccttacatccgcaatgggaattttcctgttccgtcagttttacatgactttcccgatctcactgtatgaatcggcaaagcttgacggctgcagcaatctgaaatttatcgtaaggatcctgcttccgctgacaaaatccgctatcggagctatggcagtgtataccttcatcaatgcatggaatatgtacatgtggccgttgcttgtaacaggctccaacaatatgagaaccgtccagatcggtatcagtatgctggacagtgtggattcacagtccatcaccctgatgatcgcaggtgttgttatgatcatcattccgtccatttccatctttatcgttggacagaaacagctgatcagaggaatgttttcgggtgcagtcaagggctgatatcggagcaggcagcaaccctgcagcatcctgctgtaagggaaaaatattgcaaaaagatactgcaaagtcgtaagacaagcagttcatcttatataaaaaaatgaaaaaagagaaaatttttcaagaggagaaaaaagttatgaagaaaaaaatcatcgcagctttccttaccacagcaatgaccatcggttctctttccggagtaactgtattcgccgcagaggccggcacagatgaaaaagtggaaatggcagatgcttccgatgtagacggaacttccattaccttctggcattccatgggtggtgtcaatggtgaggcaatcgatacactggtaaaaaaattcaatgatgagaataaatacggaattactgtagatgctcagtatcagggtgaatatgatgactccctgaacaagctgaaaagtgcgcagatcggaaacatgggtgcggatcttgtacaggtatatgagatcggaacaagattcataatcgattccggatggatcgtgcctatgcagcagatgatcgatgcggacagctacgatgtatctgagatcgagccgaacctggctgcatactacaccatcgacaatgagctgtactccatgccgttcaactcttccacaccgatcatgtattacaacaaggacatgtttgataaagcaggcatcacagaaattccggacagcctggagggcatcggtgagatcggacaggatcttctggacaaaggcggcgcaggcgaggtcatgtctcttggaatctacggatggttcttcgagcagtttagcggaaagcagggccttgagtatgcaaacaacggaaacggacgtaaagaggctgctacagctgttgcttttgacgagaatgatgctgcaaagaatatccttacagcatggaaggatcttaacgacaagggcttcgcaccggtcgtaggaaaaggcggcgatgctggtctggcagatttctctgcaggaaaatctgcgatcacacttggctccacagcttccctgaaacagatccttcaggatgtaaacggaaaatttgaggttggtactgcatacttcccgaagatcaaatccagcgacgagggcggtgtttccatcggaggtgcatctctttgggcactgaacaacaatgatccgaaaaagcttcgtgcaacatgggagttcgtaaaattcctgatctctccggagtctcaggcttactggaacgcacagaccggatatttcccggtaactgtaaaggctcaggaagagcaggtatttaaggataatgttgcaaaatatccgcagttccagacagcgatcgaccagctccatgattcttccgccgactatgtaggcgctctgttaagtgtattcccggaggcaagagctaccgtggaatccgagattgaaagtatgctcaacggaaaagaggatgtggatacagctgtgaaaaacatggcagattccatcaacaaatccatcgaagagtataacctggtgaatgaataattcgaaaaggcgtggaaactgaaaaagaaaaataaatatatacagccaaaaatccccgggtaaactccaggggatttttgctatagtcacggaaaaaaacatcctgacaggaaaatatcaggagaaaaatcagaggaatctctggacgtaagagtatatattggctataatgatggagttaatatctactcctcaggaaggaagaaaaatctgtgaatagaagtaaaagagaagattataagagatttgtggtattttgtctggcaagtctgatcgtgatcgcacaggcagcgatctttgcttatgtatggtatgatttttacagtgacctgatcctgaagccattctggagaaagggtaactgggtaatgatcctgatctatgcgctgatctatctgatgtttgccaagctttacggaggtctgaaggtaggctatctgaagcgtatcgatgtattttattcattgacgctggcaacgatctgtaccaatgttgtgacgtattttcagatcacactgatcaacagatggtttatgtcggccagaccggtgatcgaaatgaccggagtccagattgttgtgacggtactgtggatctggggctccaggtatatttactccagactgtacggagccagaaggctgctggtgatctacggagaccgtgatcccggtgatgtgatccacaagatgaacacccgaaaggataaatacgatatcagcggtaaggttcatatccgtgagggcgaagagaagatccatgccatgatggaagattatgaaggcgtgatcatctgggatcttccgtcccagatccgaaacaagtatctgaaatactgtttttctcattccatccgctgctatatgagtccgaagatttccgatatcatcctgcttggaacagacaggatccatctgtttgatacgccgcttctgatgtgcaggaatcagggactttccatggagcagcgtgcagccaagagagttctggatatcatagtttccggacttgggatcatcgtatcctcacccatcatgctgatcattgccattgcggtgaaggcttatgacggcggtccggtattttatctccaggatcgtcttacctatcagggaaaggaattccgcattcggaaattccgaagcatgtgtgtggattccgagaagaacggggcgcgtcttgcgtctaagcacgattcccgtatcacaccggtaggacatgttctgcgtaacctgcatctggatgagcttccccagctgtttaacgtgtttatgggtgatatgtctcttgtaggtccacgtccggaacgagatgtgatcatgcaggaatatgagcaggaaatcccggaattccactatcgtcttaaggtaaaagccggactgaccggttatgctcaggtatatggcaaatataacaccacaccgtatgataagctgaagctggatctgttttatattgaaaattattcattccttctggatatcaagcttctgtttatgactgtaaagatctttttccagaaagaagtttccgagggcgtggatgataatcagaagaacgctcttaaggattccgaagacaaaaaataagtaacgaaacgaaatgcgtgtcaggctgcggcagatcatcctgacgcgcattttgtggatagagaggacggaggttgtttttatggaaaagccgttggtttccgtagtgatgcccgtatataacggggaaagatatattggaaaagcgatcgaatcagcactgggacaggaggttccggtagaagtgctggtcattgatgactgttctgcagacggcacagagcttgctgtaatgaaatatatggacagcggaaagatccgttatatccgaaatgaacagaatatgggtgctgctcgttccagaaaccggggcgtaaaggaagcccggggaaaatatatcgcatttctggatgcggatgactggtgggaaaagggcaagctgaaggcccagacagaggttatggaacagaccggctgtgcgatctgctccaccggaagagagctgatgacgccggatgggcgcactaccggcaaatatattccggtaaaggaacggatcacatacagggagcttctgaagcataacagcatcaactgttcttccgtattgctgcgcagagaagatgcacttgcgtttccgatggggcatgatgacagccatgaagattacattacctggctccggatcctgagaaagggaggatttgcagcagggatcaacagaccttacctgaaataccggctcagtgaagggggaaaatccagaaataagctgaagtctgcggcaatgacttatcaggtatatcggtatgtaggatatggtccgctgaagagtctgtttttctttgtttcctatgcgttccacgggatatggaaataccgttgaaaaattctggaagaggtgaataattctgacatatattaattttttatttccaaattcataaatatatgttattatttattcatacttttatcaaatattacaaggtggaaacaaatgaaacagagaacggatagccagggagttccgtattcttacctggtcgataacattaaagtagtactgatctttcttgtcgtatttaatcatctgatcgcatttcagctggtcaaggtggacatggtggtgcgttatgtatggtatgggatcaccatttttcacatgcctgcttttatttttatatccggatatctttccaagaagccacaggatgtactgaagaatgtgaagaatctgctgatcccttatattcttggatacagtctgacctggtatgcgtatatctggaccggcagaagcatggattatgagcttctccgtccgtccggaacagttatgtggtatgtgctggcactgtttatctacaggctgactatcgaagcacttggcaagatacgttttatcgtgcctctgagcattatttttgcattgtgggcaggaacaagaccggaatttacgacttatctttcaagctccaggatcgttgtattttttccgttttttgtggcaggctatctgtggaagagtgattacacagacgtggtccgtaaattcaagggtaaatggatcctgctcctggtttcagccctgcttttgtatgcagttccgaattttatgatcgccaatgagatcccggtagatattttccgtgggaatcatacgtatcagttatcgggaatggatgatatcacaggaatgctgatccgccttctgatgtatctggtatcttttgtgctggtgctgacgtttctggcattgatcccggatgtgaagctgccggttacctttgttggaagaaataccatggggatttattttttccattatccgatcatgatcgtactcaacggcctgcttcttctcagcatcccgcagatgctgaatgtctgggtgcttttcggagtatcctgggtgcttgttctgatccttggaagcaagccggtatctttcctctacggaggagtactgaacctgcttacatttattctgttcaaacgtgagaagcaggtgcaggatgaaggacttgaggatgaatatgatgaagatgaccgttatgagatcatactgaaaagaaagaaagccattgaggagcttgcggcaactctggacgaggaggatgcacgtaaggtgaaggacgatgtggcggctgtactggaacatgagacagaagagacggaagaaatccgtgacgaggatttctttgtagatgaggatcttgagatggaggaaggcatggatgatgccggagctccacaggaatttgagcagctccaggacctggatgatatattagagattacagaaccgcagggggaaatggaagtgcttttgaaaaataaagaagagaaagcgcaggattaaattaataatgaaaaaagtcattacttacggtacctttgatctgttccaccagggacattacaatattctgaaaagagccagggagctgggggattatcttgttgtgggtgtcaccagtgaaagctatgatatcgaacgcggcaagctgaatgtacaggacagccttctgaagcgtatcgaaaatgtccgcaagactggttttgcggatgagatcattgtagaggaatatcaggggcagaagcttaatgacattacaaaatacaatatcgaccttctggtagtcggttcagactggcgtggcaaatttgattatctgaagaattactgtgaggtcgtttatctggaacgtaccaaaaatatttccagtaccaagctcagaagtgagggtatgatctacagcatgggcattgttacggatgatgcagaggacaacgaaatggtgatggagtccaagtatgtcagtggactgcatgtagaaagtgtgtattccgaggacgtttttgttgcgagagaattctgtgacagatacgaacttgactcttatggtacagattacggacagtttctggaaggattggatatcatttatatccgatccggtctgaaaaacagggcagattatatccgaaaggcactggaatgtgataaatatgtgatcagtgacacgcctatggctctggagccggaagagataagagagctgtttgcactggcgaaggcccatcaggttgttctggtagagaggcttaccatggtctatctgcgtgcttttacgcagctcgtctggctgacacatggagcacttgtgggagatgtggtagctgtaaaatgcgcgatttctcaggatgattttgagggcggaaagaatttcagtgaaacagtcagccaggcgctttgtgcatgtatcaagcttctcggtaaggattacctggatgtgaagaccaatgcgatgaagagcagtgacggctgctttatttatgatatgatcacgataaagtatctccgggcactggcgaccattgagatcggaacaacggtggatgtggaaaacgagcttgcgatcatcggaaccagggggcgtatcaccgtacccggtgactggtggaataccggatattttgaagccaaaatagaaggtcaggaattcctgaaacgctacagctttaattttgagggaaatggtcttcgctatctgcttcaggagctggtcatcatgatccgtgacagacggacagaatgtacgagatttttttatgaagaatcagaaactctggctgagcttttgaaaataattaatcaaagaggttgacagatgacagaaaaacagaagcttcttttgcagctcttccgggaggttgacgcgatctgcaaaaagcataatcttagatatgtaatggccggaggtactctgatcggtgttcttcgaaatgaaggctttatcccatgggacgatgatgtggacatttacatgcccaaaagtgactgggataaatttgtagaaatatgtcagaacgagatgccgccgaaccgggcggtttattgtgcagaagtggaccgtaattataccaacggttttccgcgctacggaagtacggatacctgtgcgatccacaagcatcagatcataggagacgacaaggctggtgagatcattgacgtactgactctggatcccattccggatgatgaccgtgagtatgagaaataccgggaccatatgatgatctatacggaacttctgaatatcagcatggtcgtgggagtcagatgggaaatttctccctggcggtatctgtactggcttttccgctataccttctgcggaaaggacagaaccttaaagaaattggagaagatcatgttttcttataaagaagaggagtgcagccgctatgccatgcgatggggaggctgcccgtttctttttgacaaggatatgatgttccctgtaaaatatatggacttcgagggcgaaaaggttatgattcctcacaggaccagcgattatctgatctggcattacggggacgaatggtcctatataccgcctcatggggaaagagaatctcatgagtctgttgatgttccgggcgccagctatcaggaggtgcgggatgaatatatgccaaggatcgacaaaaaacgtatccgcagacagatgcttttccgcaaattctattgccttcttatggcaaagggagaccataaacaggatgacagacgaagaaggatcaaagccggtgttgtagcccgggatgtgtctgcccgactgatgagatccgaaaaaacagcggagaccctgctgaaagagagaagatatgatgtgcttggtgagatctttgaggagtattaccgtgtacagctcagcatggagtttatcgggcgtgaggattttaaggggatccgtccgttctatcatccggtcctgatcccgctggaggatgaggcttttcaggcggccatgctgacactgatttatcaggagcgtgtttccaaggcataccgtatgtacgaggtacgtaagaaaatggattatcttactccggaaatggagcagacagtggaggatatccgacgtttccgaaaagcagccagccactatgaatttaaagaaatgcaggaagcagaggcgattgtggatgatcttctcagaaaatatccggatgctccgggattcctgaaatttaaatgccggtttgtgatggagcgcctggaaggaccgcagaatgcttcagaagcggagaaatttctgtcttactgcctgagagtatttccccaggatggatattttatgaaatataagggggatcttctctggaaaaagggcctccggaacgaagcaatggcagagtatctgaaagccagagaatgcaccaataatggcattgtgcagctggaactggataaattcctgaaaaaacagaagccccaggcgatccgggactgtcgggatctgcttggaagccagagaagatcagaagcgctctctctgatggaattttggagcagactgatgccggaggatgaggagatcagaggcgctctttatcttgcgaaggtatcttccgtccgtacaaaaggggagctggaagagctggtgagagagctttgcaaagaactggggatcaccggtaattctccaagggagggaacccttgaggagccagtgtacaaagaggcacttacctgtgcatggcagagattcggctatcccaaagcactggcagagggccgtaccaggatcctgtgcagtgaggaagagggcgagatggaatatctggcagaggagatccgcagctttctggtccataaggaatggcagggagaggtatacaagcttctgggagatatccggaagaaacaggggcgtacccgggaagccttcgaaaattatttcctggcattggatcatgagccgcatccctatataaaaaatgagctttccaggattttcctggaggatctttacgatggaagccggcgtaccggatttttcgcaaagaaggcagacgtgacagaatttctgaacagctggctggataagtataaaagtcaggaggagcttcaggagcttctgaagcggatcctgtaatgacagatcaacagaaacgaggcagagtgtattgaacagagaacagcagaaagtactggaacttctaaaagaaatagataccatatgcagaaaaaataagatcacatattatctttctccgtatcttaccctctgtgcggtaacggagcgcccttttcccatgaatccggcaagcaatgatatttatatgaagaccggtgatatggcccggtttaaaaacatctttgacgaagaaccggagctgcgcagagctctggaatctatggagaataacagccgtttccccggattttttctgcgttatacagataaagatacgttgttttataagctggacgagtatggaaaatacaaacatccgggactggggatcaatatccttccgctgcagtgtgaatatggcccaaagggaaaatatctctggaaccgtatgcgcgaagatggatggaaaagaatctacggaaaaaaaggcgagtggcggaaccggcgtgagctgggatgtatctggatggtgcgagtcctttccctttgcggacgaggctggctggcaaagagcatattccgggatctgctccggcagccgcaggatggcgcaaaaacctatgtactccgatattttgaccagaatctttattttcctgcgcatatttttgaaaatcccggggaggcaatgcttggaggagaatcctttatggtcccgggaaacacagacagctatctcacccgggcctacggcaaaaattatcgaaataagtcaatggaaaactatgttcccggctcgctggtggtgtgcagcacactaatcccatgtgaggaatttctgcagcagtcaaaggaactgaagaaatttgcttctgtcaggaagaaaagggaaaagcgcaggcagtttggaatgaattaccgggaatatcttgcacagtgctgggattatgcaaaattctgcggggaaaaatatacctgtgtactggcttatcgcaaaaagctcagctatatccggaatctcttcaaaaatgaagattatgtggaactggaaaaagcatttgcaggatataccaggatgaatgatcgctgtctgaaatatgaagaagcatttgaaacagatccggaggtttttgacctgtatcttaagtatctggaaaaaacaggaaggatctcgtatatggagaaggtaaaaaaatatgtctaaggtcaagcttacagattatgttgtggaatttttgcagaaaaaagggatccatgatttcttcggataccagggaaccatgattgcacatctggtagattccattgagaagaatccccatgtaagaagtcattccagctatcatgagcagggagctgcttttgccgcctgtggttatgctcaggcaaagaatgcctgcggctgtgcctatgccaccagtggtccgggagctgccaatctgctttccggtgtggcagatgcgtatttcgattctcttccggtgatctttatcaccggacagctgaatacctatgaatattccggtattacaggccttcgtcagcagggctttcaggagatcgatatggtttccatggcaaagccggtaaccaagtacgcggtgcaggtccgtgatccgaaaaatatcgttcgtgaactgaatcttgcatggcagatcgccaatacaggacggaaggggccggttcttatcgatcttcctatgaatgtgcagagaggcgaggtggaagatccggcttatgatatggaattttccgaggaagagatcgagacagctgtatatggaaaaaatgatccggaaaacggggcagtcttttacagggatgcagttgcaaaggcggattcttctgatggagcagatgcggcagaatatattctgaataagatcaggactgcaaaacggccggtatttatgatcggtcacggagcttccggagaagcagaaaaaatgctcacagatctggcgcgtgcccatcacattccggtgatcacaagcgtacttgcccggtccgcactgagctttgatgatcctttgaacttcgggtgcatcggaggtgcttacggacaccggtatgcaaatatgatcgccaatgcaaaaagcgaccttctgctctgctttggaatttccctgtgtacccgtcagattggtactaaggttcatgagtttgcgaagaatgctgaaatcatccgtgtggatattgatccttataatcttcaaagagaaatccatgagggaagagaaggtgagaaatgcttttgcgttagcgcagagactgtggtgcgtaagctgacagagcagcaggcacagatcggttcctatgaggaatggcttgctgtctgccagaagatccgtaaggaactctggaaagtggacgatgagacaccgcagcgttatccgaaccgcatgatcgcatatttgagtgatcagctttccgataccggagcggttgctgtggatgtgggacagcatatggtatggagctatcagtccttctacaatcagcaggggcagaagacacttttttccggcggacatggtgctatgggatatgcacttccggcggctatcggagcttattatgctaccggcaagccggtggcatgtatctgcggagacggagccttccagatgaatatccaggagctgcagtgggtgaagcgtgagaatatcccagtgaagatgatcgtaatgaataatgaggctctgggaatgatccgtcatcttcagagagattattttgactgtgtatatgcggatacctccgatggcagcggattctcgtcctgcgattttacagatgtggcgcaggcttacggaattcctgcaaagcgcatccagggagaagacgtggaaaaatatgccggtggattcctggagcagaacgggccggagcttctggagatcatgctggagcatggaacctacgcatacccgaagacctgtctgggcgagccgatccacaatcagcagccttatataccgaaaccgatatttgatgaactgatggagctgtaaaatgggaaaaataactgtgatcacaggcggtacctccggaatcggaagagggatcgccgaaaagatcctggcagagtcagcaaaagctgacaggatcttcgtaacatatggacatgatgagaagaaggcactgtcgtttcaggagagccttcctgaggaaaaaagatctcaggtgactttgataaaggcagatatgtcttcctatgaagagatgatggtttttgtggaggagctgaaaaagcagacagaccatattgactggcttgtaagcaatgccggcatcagcacctacgcaaaatatgaagactacagctttgaggagtggacacggatcgtaaacaccaatctttccgtacctgtatttatggtaaaagagctgagatccatgatggtagagggcggcagtgtgctctttaccggttcctatgcaggacagcaggcgtattcttcctcccttgtatatggagtcaccaaggcagccatccattttctgacaagatccctggtaaaggaatttgagccaaagggcatcacagtcaacgctattgcacctggtttcatcgaaactccgtggcacagcgcccgcacccaggagagctatgaccgtatcaaccggaagatcgcactccacaggtttggaactgtggaggaagtggcggatatggcttatgcagtgctgtccaacggatatatgaacggcagtgtagtggatatccacggtggttatgactacttttaaccgcttgactatcagttgaaagtacacaggaagacagaagaagatacgttgtgcctgcacataaggggcttctcatgactttctttatatttaagcgaaaaaggcttgacttgtacctatgctctgtgataaaattgacgagcgacatggaagttaggtcttttttttatgcccgaaaatgacgacggatatacgttccgggcggcatagaagaccatgcaaatgaaaacactggaggtggaagttgtgcgcgttaagattacattagcatgcaccgagtgcaagcagcgtaactacaatatgacgaaggagaaaaagaaccatcctgagagaatggagaccaagaaatattgtaagttctgtcatacacacactctgcacaaggaaacaaagtaatcacagagatttgtgaggttatgctatggaaaaacagaaatctgaggataagccgcagaagaaaagttggtttcagggacttcagtcagaatttgagaagattgtctggacagaccgtcccacactggcaaagcagactgttgtggtcgtgatcatcacgatcatcctggcagtggttatcagtgtaatggattccggaattctggaattcattaatttcttaatgaagtaaggacaaggtgattatatgtcagaagcagcaaaatggtacgttgtccatacctattccgggtatgagaacaaggtaaaagccaacattgaaaagacgatcgagaacagacacctggaagaccagatcctggaggtacgtgtcccgctgcaggatgtagtggagatgaagaacggaacctcaagacaggttcagaaaaagatgtttccaggctatgtgcttctcaatatggtgatgaatgacgatacctggtacgttgtccgtaatacccgcggtgttacaggattcgtaggaccgggatcaaagcctgtgcctcttacagaagaggaaatgatgccgcttggtatccagaaaccggatatcgaagtggacttcgcagagggcgacatggtagtcgttaccggtggtgcatggaaagataccgcaggtgtgatcacaggtatcaacatgcagaaacagacggtaacgatcaatgttgagcttttcggtcgtgaaacaccggtagaaataagtttcacagaaatcaaaaaagctgagtaattcaaaaacaaggtaacagcaagtgggagggacacacccccgccaataccacataggaggtgccgaaaatggcaaagaaagtaacaggatatatcaaattacagattccggctggtaaagcaactccagcaccacctgtaggtccggctcttggacagcatggtgtaaacatcgtacagtttactaaggagttcaacgcaagaacagctgatcagggagatcttatcatcccggttgtcatcactgtttacgctgacagaagtttcagcttcataaccaagactccgccggcagcagttcttcttaagaaagctgcaaacatcaaatctggttccggtacaccgaacaagaccaaagtagctaaagttactaaggcacaggttcaggagatcgctgagctgaagatgaaagacctcaatgcagcatccatcgaggctgctatgagcatgatcgccggtacagcaagaagtatgggaatcgaagtcgtagactaataaataccgaagcttaagttcggggttcccgtagaaaaagtgaaattttcaagtgggagggcttttccccgcaaataccacaggaggttatagaaatgaaacgaggaaagaaatatgtggaagctgcgaaagcagtagaccgcgcaacattatatgatgcaccagaggctatcagccttgttaaaaaagcagctgtagctaagttcgacgagaccatcgaagttcacatccgtacaggctgcgatggacgtcacgcagatcagcagatccgtggagcagttgttctgccacacggaacaggtaaaaaagttcgtgtacttgtatttgctaaagatgctaaggcagaagaggcaaaggcagcaggagcagacttcgtaggagctgaggacctcattccgaagatccagaacgagggatggcttgactttgacgttgtagttgcaacaccggatatgatgggcgttgtaggtcgtcttggtcgtgtacttggaccgaaaggtttaatgccaaacccgaaagctggtactgtaacaatggacgtaacaaaagctgttaacgacattaaagcaggtaagatcgagtatcgtcttgacaaatccaacatcatccatgttccgatcggaaaggcttcctttaccgaggagcagttaagcgacaacttccagacgcttatgggagctatcacaaaggctagacctagcacactgaaaggtcagtatctgaagagcgttacaatcgctccgacaatgggacctggtgttaagcttaatccgattaaattagctcagtaataaattttaaataccctgtacagaggaaactttgtatggggtatttttttatacatttatacaccttgatttttgggggcaaaaatcctacaataaggcacaaacagagttgtaacaga

SEQ ID NO: 257 - DNA, 2875 bp, Unknown
  gut microbiota DNA sequence
aagcatgtcatacacagccagacggatataacttgatccgctctgtcctaaggtatgacatgctttttttattttacttattattttttcagttctttcagcagctgcccgatctttgacacaaacagatcaaaggccacattattcttaccgctgttgatcacaatatctgctttcgcccgtgtaggctccacatacagataatgcatcggttttactgtggtaagatactgatcgatgattccgtttaaatcccgtccacgttcctccacatctctggagatccgtcttaagatcctctcatctgcatctgcctccacataaaccttgatatccagaagatctcggatacggggatctgcaagaagcaggattccctctaccagaatgaccggtcttggttcgatcttcagcactttgtcggagcggttgtgctgactgtaatcgtataccggacattggatggttctgccctccttgagttctttgagatgctctaccagaagatcggtttccagtgaatccgggtgatcgtaattcaccttcacacgttcttcaaaaggaattccgtcctgtctgcggtagtaattatcatgatagatcaccaccacatcgtctccgaaatacttcttcagtctgtttgtaaatgtagatttgccggagcctgatcctccggcgatcccgataataatactttccatcgtctctttacctcttaagctggaattcttccgctgtggatcccgcaggcttcccgaagagtttttccgtatagagaagctttttcttacacaaaagctgcccggtcggtgtgcatctcctgcatccggttccggacagcttttctgattattttttataaagcaatcattctgatcagatctcagcctgctccagaagtgccgggatcttggactcccatccaagtgccatgatatgtacaccctggcagtatggcttgcactctttgatgatacgtgcagcgatctcaacacctgtgataccggcttttgttttctctttgtctgctttcagctcctcgatcatctcatccggaacatgaatgccggcaacgttgttgttcatgaacttagccattccagcagacttcggaatgatgataccaacctgtaccggttttccgaactgttttgctttttccataaatttgatgaatttctccggctcaaatacagcctgtgtctggaagtagtctgcacctgcagcaacctttctttccatctttgcaagctgagcgtcaacggaatcgctgcatggagatacaacggcacccttggagaatttcggtggctcaccaaccagctggtttcctccaagatctacaccggactcgagaagctgtactgtatgaagaagagatacagaatcaagatcgaataccggttttgcctgcggatgatcacccatcttcgtatggtcacctgtcagacagaggatgttctcaataccaagcatagcagcacttaaaagatcagactccagtgcgatacggtttctgtcacggcatgcaagctggaagatcggatccattccggcgtctttgagaactttacacattgcaagagatccaagacgcataaccgaagactggttatctgttacattgactgcatgaacgcctttgagataagttttggcttcttctaccagttcatctacatggatcccttttggcggtcctacttctgcagaaactacaaattcaccacggtcgaataattctttcattttcatattatatttgctccaatcatttaaaatttggggtacggtccacctgctctgctgcatacattgcggaatatttccggtgaaccgtatcataatttaatttggcttcttaataaatctttgcttattatttcacttcatcatctgtagcgaaattatggatctgtgtcgggcatttcagtgcgtcaaggcgtccgatctctttcagacgtctgtagatgcgctcccatccacactccatgtcactgtccacttcgcatttaccattcttggaaccgccgcactggccgttgacaagactcttggagcatgctgtgatcgggcagatcccgccggtaaggttcagataacactcaccacactggtcacatttatattctaacggtgttacaccctggaaaccaggtaccgggtatgtatcgcaggctgcgcataccatcttgtcttccagatattctgcgatggtctgtacaccaacaccacaggagaataccaggaccagatccgcttccctgatcttatccatgtgtttctgaagacgtaactgcatattttccggattacagatataatccgttgtcatgatccctgtcacatttccttcagcggaaagctccttctgaagttcaacagcttctttttccggaaaacgaacttccttgcatccatggcagttgatgataaaaactttctttccggctgccagtgatacgatagtttcttttgcttttaactgggtaatcaacatatcacttcatcccccttactgcattttttccggctttgatactgttaatgatcggaatcttggaagaacagatatactgacagcatctgcactcaacacagtccatgacattcatgtccttcatgccctgccagttctcttctttcgcatattttacgaaatacagaggagaaagttccatcggacatacgtccacacagcgtccgcacttgatacatggctgctctttggtctcgtctgtatcaatggcgatgataccgttggagcccttcatcataggtacatccagagtgttcagagggaatcccatcataggtccgcccatcttgaccagaacatcgtcatctgtaaatccgccgcagtaatcgatcagct

SEQ ID NO: 258 - DNA, 30933 bp, Unknown
  gut microbiota DNA sequence
agaagacacaggctctccgcccaggagcgtccgtcagacgcccgacattgtacaatatctggtacaattttctcattatttttatcaataatacaattacatgtatattataaagaacatacttccaagctgttgactttaaattcggaatctgttatcttatggtcgtcatgagaaatgttatatattactaactgcgcgggcagtgaacgaaatattgagacaacaggaaaggatgtgtaacaaattggcaaaagttgattttgaacagtggaatggttttaagggtgatcgttggaaagagaagatcgatgttcgtaatttcatcagtatgaactatacaccatatgatggagatgcttccttcctggaagcaccaacagaggcaacagataaactctggggcaagcttcaggagcttcagaaagaagagcgtgctaaaggcggcgttcttgatatggagacagaggtagtaacaggaattacagcatacggtcctggatatatcgatgaggaactcaaagacctggagcaggttgtaggtcttcagacagacaaacctctgaaacgtgctttcatgccatacggcggaattaaaatggcagagcaggcatgtgagacttacggataccatgtaagcgacaagatcaaagatgttttcaacaactatgagttcaaaacacacaaccagggtgtattcgatatctacacaccggagatgaagagagcacgtcacaacaagatccttacaggacttccggatacttacggacgtggacgtatcgtaggtgattacagacgagttgctctttacggaattgattatctgatcgcaggtaaagagaaagacttcgcagcatgcgaccgtcagggtatgagacgttatgacttccagcttcgtgaggagatcgcagatcagatccgtgctctgaagaagatgaaagaaatggctcagatctatggctttgatatttcccagccggctaagaatgcaaaggaagcattccagtggctgtactttggatatcttgcagcgatcaaaactcagaacggagctgcaatgagtgttggacgtatctccacattccttgatatctatattgagagagaccttgagaacggaactcttacagagaaagaggcacaggagcttgttgaccatatcgtaatgaaattccgtatggttaaattcgctcgtatcccgtcttacaaccagctcttctccggtgacccggtatgggcaactctggaagtagcaggtatgggacaggacggacgttccatggtaacaaagaacgactatcgtttccttcatacacttgaggatatgggaccggctccggagccgaaccttacagttctctactcttcaagactgcctgagaacttcaagaaatatgcagcagacatctctgttacaacaagttccatccagtatgagaacgatgatgttatgcgtccggtatggggcgatgactatagcatctgctgctgtgtatctgctacagagacaggtaaagagatgcagttcttcggtgctcgtgcaaaccttgcaaaatgccttctttacgcgatcaacggtggtgttgatgagaagacaaaacagcaggtaggaccgcagtatcagccgatcacttccgagtaccttgattatgacgaagtaatcgcaaaatatgatcagatgatggactggcttgcacatctgtatgttggaacactgaacatgatccactacatgcatgataaatactactatgaggcagctgagatggcacttatcgatacaaaggttgaccgttccttcgcaacaggtatcgccggattctcacacgtagtagattccctttccgctatcaaatatgcaaaagtaaaagcaatccgtgacgaggacggaatcacaacagacttccaggttgagggtgacttcccacgttatggtaacgatgatgacagagcagacgagatcgcaacaactctgctttccacattccttgagaagctgaaacacatccatacctatcgtgattccaagccaaccacatccatccttaccatcacatccaacgttgtttatggtaaagctacaggatctcttccggacggaagaaaagccggcgagcctctggcaccgggagcaaacccgtcttacggcgcagagcagaacggacttcttgcttccctgaactctgttgcaaagcttgactatgaggatgcccttgacggaatctccaatactcagacgatcaacccggatgcacttggccattctgaggaagagcgtacagagaatcttgtaaatgtacttgacggatactttgaccgtggtgcacatcacctcaatgtaaacgtattcggtaaagagaaacttatcgatgctatggagcatccggaaaaagaggagtatgcaaacttcacgatccgtgtttccggatacgctgttaagttcatcgaccttacaagagagcagcagcttgacgttatcgcaagaacctgccacgaaaggatgtaataaaaaatatggacgaccagaaaaaaatcactggctacgtccactcactggagagcttcggctctgttgacggaccaggagtccggtatgtgatctttttgagcggctgcgccatgcgctgtcagttctgccacaatccggacacctggcaaatgaaaacagggacggagtacacagcagatgagctgcttgaaaaagcctgtcgataccgctcttactggggaagtaagggcggtattactgtgagtggaggcgagccactgttacagatcgatttcctcactgagctgttcagaaaagcaaaaaaacttggaatccacacaacacttgataccagcggcaacccttacacagaagagggtccgtggtatgaaaaatgggaagagctgatgaagtacacagatcttgtcatgctggatatcaagcacattgatgaggaacagcataagatcctcacaggatgtaccaataaaaatatccttgccatggcccggaagctttccgatatgggcgtatccatgtggatccgtcacgtactggttccagaacgcaatgaccgggatgactatctccaccggctggctgactttattgcaacactgaagacagttgagagagtggaggttcttccatatcacacactcggaacctttaaatgggaaaatctgcatattgattatccgctgaagggaatcaatccgccaacgaaagaacgtatcgaaaatgcggaaaaaatcctgggagcaggtacacagtaataaaaaaaccatatcttatgtcgaaaaacagacatagatatggtttttttgatgttcacaccagttctttgtttttgatcagcatttctttgatgatatcctgtgtataggaacctaagcggcgctgagtatcccggtcaagctctgaaggaatgataggcttgccatattcgatcactacgtgtgtaggtgtcatcttcgggaaattggcctcccagatattggcagagttgctgatcgcaataggaatgatcgggcttttggctctggctgcgatcttgaagctgccatcatggaaaggtagcatttctgtttcatcagcattcttatttctggttccttccgggaagatacatacggaaatgccggatttcacatagtctgcggcctgaaggatcgttttcagaccctgcttgatatcctctctgtcgagaaagagacagtagagattgcgcatccagttggagagcagcggataatgctccatttccttcttggcaacatagccggtgcggatcggacagcggctgtaggtgagcaggatgtcgaaatagctccggtggtttgctacatagagaacagcctgatcctttggaacgttttcttcgccgatgacggtgactttggcgcctgtgatccacaggatgaatttgaatatggcctgtaccatgcgcagagagctgatatccttagtcatgggagaaaatttcccgatgatccattctacaaggagaaccggaatggtcagcaccagataggcgatcaccacgatacagacaagtatgaatcgaatcatgtcttttgtcctttctgttatagatacttgcggagagttccgcagtaagatggtatttttatattatacgaagaaaatccgatagttgcaataaatctttccctgctcacatagaataaatactgaataatggttactgtttactggtgatcttccgcaaagcgtgttactgagaacggagtgaacagtaacgaatcatgcaggtggcttatattatgaaaaaagcagtatttctgcggatcgtgctgacagctgccgtgctggcactgctgctttccgggtgtcgatttgtccgggtggaggaagaagaacgaaaaccggtagattacaccgttgtggaacgccgggatatcccggaggagctttccaggcttatggaagaaaaaaaggaaaaggaatttcagctgagttatgaaaccggagaggatctttacctggccaaagggtacgggcggcagatgagtggcggatacagcatccaggtagaggagcttggagaatcctcgaatgggatattttttgttacaaaacttcttggaccggaggatcttaaggaggcaggagttccgtcctatccctgcattgtgataaaaacccggaaacaggaaaagccggtaacgttccgggaaagcagcagtccggtgaaaaaagagtcggagaaaggggaatagactgtggaattaaaaaaagaaagcatgcagatattaaaggaaaaaagcagggcaaaaagtcagatcacttttgatgaggattttaatgtaccggatgcaaaaccggatgcaggaagactgatccagaataagggcaggatcattatggatgatgttcgtcttactgacgggaaaggtattcttacgggaaatctgcaggtagatattctttatgtgggggaagaaagagggatcgtcagcagtcttactgcaaaacttccatttgaggaaaccttgaacctgaagaatatcataaacggggataaaatgtgtctgaagtgggaaattgaagatcttacgatccgcctgatccattccagaaagctcaatatcaaagctttggtaactttttgtgcgactgtggatgaaacggaacagatccgccttccggtggcgctggatgcagaagaggtatccgtcagaaaaaaaacagtccgttttctgggacttaccgtacataaaaaagatacactccggatcaaggatgagtataccattgcctccaatcgtccggatatcgccagcctgatctggtatactatggatgtacggggactggatctgaagccggaggaaaatgtggtaaaggcaaggggagagctgtctgtttttgtgctgtacggagcagaagatacagaagccccggtgcagtggctggaatattcgctgcctttttccggagaagtggaatgtccggactgcacggaggaactgatcccgctgatcgaagcttcggtgatgcatcagagcctggaggccaaaccggatgtcgatggggaagaacggatccttgtttcggatgttgtgctggagctggatatgaaatttttcagggaagaggaatatgatcttattaccgatgtgtatacaccgatccgtgaatgtgttccggaaggaaagaatgaggtactggaacgacttctggtacgtaatttttccagatgcaggatcagtgacaggatccaggtaaaggagactcagggaaaagtcctccagctgtgtcacagtcagggaaaagtgaagatcgataagaccaggatcgtagagaacggtgtgcaggcagatggcgtggtcatgctgaagatcctgtacattattggaaatgatgatatgccgttttattccatggaggcaatgataccgttttcccatatggtggaagcaagagggatccgacaggacagctgttatcagttaaaagcaaagctggagcagctttccgcagccatggcagatggaaatgagatcgagatccgggcaactgtaggactggagcttctggcagttgccagagaaccggtatttatcattgagaaagtagaggaaaaaccactggatatgaaaaaactccaggctatgccgggaatcctggtttatatggtaaaaccgggagatgaattgtgggatatcgcaaggaaatatcacacatctatccaggagatccggacgatcaatgctctcaaggaaaatcaggaaccctctccgggaactccgcttcttgttgtgaaaaaagtggaaggtcagatcaaataaaaagtggaatattttgctgttgaaaagaatgtaaaaatcatataaaatacatgtataaatactgtatacaaagtacaaatggaggggcttatgcgtttaaaagcaatggcaaagatcaatctcggacttgatgttctgggaaagagagaggacggttatcatgaggtacgcatgatcatgcagaccatccgtatgtatgatatcctggatatcagaaagaccagacggccggggatcgtactgacgaccaatcttccgtttattcctacagatcagagaaatcttgtatataaggcagcacagatgctgatggaggagttcgatgttgaagagggactttccatcaagcttcgtaaatttatcccggtggcagcaggcatggcaggaggcagctccgatgcagcggccgcatttgtgggtgtgaaccggatgttccatttagggcttaccgaagaacagctgatggaacgtgcagtaaaggtcggagcagatgttccgtattgtatcatgcggggaacagctcttgcggagggaatcggagagaagctgaccagacttccggaagttccgaaatgttatgttctgataggaaaaccgggaatcaatgtttccacaaaaacagcctatgagaatctgaatctggaagggatcggaaaacatccggacatcgatggactcatcggagctatcagaaataatgatctgtatgccatggcatccagaatggagaatgtatttgaaccggggatcatccgacagtatcctgtgatcggcaatatcaagaaccttatggaagaaaaaggtgcgctgaaagccgtgatgagcggaagcggtcctactgtgtttggaatctttgataacagggataagatggccgcggcagccagaagcctcagaaagagcgggcttgcaaagactgtatttgccacggatatttacaatagagatggaggagttacaaatgacaagtgatttttctgtggatatgaatgaatatctgccgcttcgggatgttgtttttaacaccttgcggcaggcaatcctgaagggagagctgaagccgggcgaaagacttctggagattgcccttgcagagcgtcttggcgtgagcagaacaccggtgcgtgaggctatgcgcaagctggagcaggaaggtcttgtagtgatgatcccacgcagaggtgcacaggtagccagcatcacagaaaaggatctgaacgatgttctggaggtgcgtatcgccctcgaaaatgttgccatagaaaaagcgtgcaagctgatcacagaggatgagctgggaaggctctgggtggcagccaaggaatttgaaaaaacaaaagcagagggaaatctggtccgtctggcggaaaccgatgtggctttccacgagatcatatatcaggcttctgataataagcgtctgaatcaggtcctgaataatctccgtgagcagatgtatcgctatcgtgtagagtatttgaaggaggagcagacaagaaatcttctggttagtgagcatgaagagctggtaaaagccatccgtgaaggagatgtgcaaaaggcgcaggatatttctttccatcatctggagaatcaacgaaaagcgatcatccgtactatccgcgcggagaatgaggccaaagaggccgagaaaaaagaataagaaccggatatgcgggaatattaagagagatgtcattggggcatctctttttttaaccgaatcaagtaagtcccctgtttcaattgcgaaaagcaataagcagtgggggaacttgctgtaaaggatggtgactttatggaaacaaggaagatatcgatatctcttcatgaaaatgaatcgtatatccggaaacggtgtgaaaactgcgatgatatcctgatcaggcccatgcgccttggtgagggacataaggcggactgtctgatggtctatattgaggttgcggtttcaaacatgatgctggatgattctgctatcggaaaaatgatcaatcatttctgggagatcccggaggaaaagatccgggaatttatccgccgaaacagtcttggaattgcagatgtgaaggagctgtcttccatggaggaggtatttggtgccattctttcgggaaatgcagttttctttctggatggatacgacaaagcaatgaaaatttccagtaaaggatatccggggttggctgtatcagaggtgaaaacggaaaaggtcctcagaggctccaaggagggcttctgtgacagtgtaaaaaccaatgcggcccttgtgagaaagcggatccgggataccaggctgaaggtggagcagagcagcatcggtgtacgctccaatacggtggtacagcttctttatgtggaggatctggtccatgaggagcttctgactgctgtgaaagagcgcctggaatcttttacagtggacgggatcctggacagcgggatgctggaacagctgacagaagaagcatggtattctccctttcctcagtttcagacaacggagcggccggaccgggctgcccaggagctgctgaatggaaaagcagttctgctctgcgacaattcgccggtggcactggtggttcccggagcattcaacagttttatggaaagcagtgaagactggtacaaccgttttgagatggcatccttcctgcgggtgctccggtatctggccatggctgtggcaacgttgctccccggactttatctggctgtgatccggtttcatacacagattcttccggcgaatctgatcctttcctttgcacaggcaagagagggcgtcccattttccagtgtagtggagctggtgttcctggaactgtcttttgagttgatacgggaggctggtgtgcggatcccgggagctcttggaaatgccattgggatcgtaggaggactgatcatcggacaggctgcggtggaggccaatcttgtcagcccggtggtagtgatcatcgtggcactgacagcactgggatcactggctatacctaatgaggaatttgcttctgcattccggcttctgaagtacgcttttctgtttctgggaggatttctaggtatattcggaatcgtgttgggactgtatctcaccatggcgcatctggcaggacttttaagcttcggtgtcccatatctggtaccttttgtagagaagaacagtgaggcggaaaccggtggaaggattttgcgacagcccttccggaagcggaaattccggccgctgtatgccagaaatgcccagaaacgcaggcttcggacaaggccatggagccggaaaggataaaggttatgagatttgcggagaataacaggatttcccacagacagctttttcggcagatcatactggtgtttccggcgccgtttctgctgtgcctgtttaagaatggagcgatgttgggcatcagtgccatggcagggacagctgctgcggccgtagtgctctctttttatgtaatctggctgatacgtctgacacctgcatatggggagctttccaaaaggacaggaagttttactgtacgatttattggcctgttctttttggcatatgtgatcgtaagttcggcatttctttcgggccttctgggggaggtgatcccggaaagtctgatcagcgggatttccggaaaatggctgtctcttcttgcagttgcagcctgtagtctgggaacgcatcgcggaatgcagagaagagggcggatcgctgaggtgtccggaaggatttttctggcagggatccttcttctgatgcttttatgtgcagggcagggaaaaacagagtactttatggaagtgatgaaagatccggaaacaggatttacaggagagcgatggctccgtgatctgtatacacttttgtgtgctttttcaggagcaggacttcttcccttcgggctggagtatgcaaaaaaacagggaagtgccagaaaacctgtgatcctggcttttcttacagtttgcgggatcatttttggaatgcagcttcttcttccggcagtttttggaggtgcacgccttaaaaacgagatctgtccggtactacctcttctggagggtgcagatcttccgggaaatgtactggcgagatttgatgtgatatggatgggatttctggtattcggacttttgttttctctgggaagtttgtttcattacggaaatcagatcgcggaaaaaaccggattcgggaccggtcggtactggatcccggcagcaggctggctgctttccctgtatgagagaaacgggatggggatccgggagtattatggctggtatctggggtacatctttgtgccgtttctgcttgtgatacagctttttctcagtacggaaaaccggggaagacggaagaaaaaagtaactgtggcaggacttgtcctggtcatcactttgacgggatcaggctgtgcggcagtagaaccggaaaaaagagcttatccgctggcactgggggccggtgtttcagagaatggctttgtgctgaaatatgcaatgccggatatgagtacagctaccggacaggaaaaaccggacgaagatccgatttctgtgctgactctttccggccgggactttcaggagatcgaggcagtctacaaccggtctcaggaaaaatttctggatctgggtcatcttgaagtactgatcctggatgaacagatcctgggagagggagcccgggaagcactgatcggatatctgaagcaggaagagcatatcggagaggatgtctacgtgttccggacggatatgctgggagatgtttttcactggaagggagcccgggaaagctccataggggaataccttcagggaattcaggagaaccgcacatctgggcagcagaagaagggtgtgactctgcgggaggtatatcatcagttctgtcaggatggaacgctgccctggcttccggagatatgggtggaaggtgagcttctggaagtggattacggcagtaatgaatagatgggagccggactgttaataatacagatgatgatcagtacgataaatcgtacagtatatctctggataagatcatcagaagatttttgacaggagggcttgctcatggagcatataaaaatgaagaagcatgtattaaaaaaagcaggagggttccttttgctcacggcagtgatccttgcagggagtacctgggagagaagaactgccggtgatcggcagccacagttttatgcctggtggggaacgatctacccggaattctgttttgaaaaagcagaggacaacggggaaaataagccggtgaagatatccttctggcttgcgcaagccctggattggtgatacaatatttcaacggaccaatcacgttcgattaattatttcaggagataagatcaatgaatatagacagaaacgcaccggtgggtgtgtttgattccggtatcggaggactgacagtagcccgggagatcatgcgcaatctcccatcggaaaaaatcgtatatttcggagacacagccagagttccctatggaagcaaatccagagaaacggtgatccgttattcccgccagatcattcattttctgcaggaacagaaggtgaaggccattgtggtggcctgtaatacagccagtgcatttgctctggatgcggtgaaggatgaactggatatcccgattcttggagtgatcgaggccggtgccaaagttgctgcccaggaaaccagaaataaacgggtgggcattatcggaacggtgggcacggtaggaagcggtatccatgcctcttatctgaaggaactggatccggagatcaccgtgatcggaaaagcgtgcccgctgtttgttccactggtagaagagggctggtatcatgatccggtcaccgaggaggttgccagaagatatctgaaggagctgcaggagcaggagatcgatacactgatcctcggatgtacgcactatcctcttttaagatctaccatccgcaagatcatgggtgaggaggtctgccttgtgaatcctgcatatgagacggcgctggagcttaaaaagttactctccagactggatcttgccagcaatgaggtagcacaggaggaattcccgtatcgcttttatgtaagtgatcttgcagagaagtttaaggattttgccaattccatcctgccgtataacgtagaaaaaacacagaagatcgatatcgaaaaatattaaacagatctgtacataaatgataggagaaaagaatgcagaaagaagttttgatccatgtaagagggcttcagatgatggatgcacagggggatcaggaacctatagagatcattgttccgggacagtattatttccgcaatggttctcattatctcagatatgaggaactgctggatgaaacagcagaacccaccatcaattacataaaagtatccggaaagggtctggaggtcagcaagaagggactggtcaatgtacacatggtatttgaacagggcaaaaaaaacatgacctattatactaccccttacggaacacttcagatgggaatctcagctacgaatctggagctgacggaaagcgaagagaaccttcagatcaaagcagattatgcgctggatatgaatgaagaacatgtggcagactgctatctggcgatccaggtacagccaagagactgcaaggattttgttttatagatcctgcagaaaataaaagatatataattacactacataagaacagccgccatgcatcaggggaattcctgaaagcatggcggctgttttggattctgatcatttacggaatcttgcgaggaagccttttttcttcttctgtggtgcttcgagagaaccacggattccttttacgccaacgatgtaaaggccgctgacttcagctttgatttcttttttgaccgggatcagatcaaaaactttttcatctgcaataaggatgttgatcttcggaccgactttggcttttacgatcggaagcttggaccggcgcataagcttaggtgtctggtcgatgaccatctgtggaagtccggaatctttcagcggcatccgttttttatcgatgaccagcatggaaactgtctgcttgttagcctggatctgagcctgctgttcgtcctgttttttctgagctttttttccgaagaaatagagtgcgatcactgctgcgatcagaataacgaggatgaccagaagaacgatggtaactgtactcatttgagaatccccctgtatatatatttgtttcgcaatcggttacattacgcaaacaacattttagcattgtttcatcaaaaaggcaattaaaaaagtgaaaaagacaggtggaacggtggaaatttcagcagttaccagttataatgattacgatgcagttcatctgtgtatgctgcagagaatacaggacataactatctttgagctaacatatgtaatggataaaccagagatggaggaaatattatatgaaagagaaaaagcccgggggaacccgaccggaaatgggaactcctgagtacgaagaatggcggaaagaggtattgaaacgccgcagaaagcgccagctgaaggaacgcagaaaacgtctggccatcataacagcggcaatgatcgtcgcagtcggggcatcagtaggggtcggtgcgctgaagggcagaagtgagaaggcttcaaaagagaagatggtttcttctgacaaacagaaagaacagactgtttccggagaaaaagctttagaagcaggtactaaaaatacagagaccgcttccaaagatactctcgcagaggcagagcttctggccagtcagtataactatgacaaagctatcgatcttctgaaaaaggctccgtcctatgattcggataagaagatgcaggcagctgcaaaaaaatacgaagacataaaagcaacctgtacggcatggccccttgaaaaggtgacacatgtcttttatcatattctgatcaaggatccatccaaagcgtttgacggagactacaaagaagcagattataatcaggtcatgacaaccattgatgagtttaacaagatcacgcagaccatgtatgacaagggctatgtgatggtaagcatcaaggacatggcaaaggcagacgacaacgggaatatcacagagggagagatccttcttccgcctgggaaaacgccgtttgtcctctcacaggatgatgtatgctattatcattacatggacggtgacggctatgccacgaagctgatcgtggatgataaaggaaagatccgcaatgaatatgtggaagatgacggaagtgtctccgtgggagattatgacatggttccgctgatcgaccgttttgtggaaaagcatccggatttctcataccgcggtgcaaaaggaatcctggcacttaccggatacaacgggatcctgggatatcggaccgacgaaagctatgagacccgtccggcagatctggatgaaaataaagtacagtggctggatgcacatccggatttcagcctggaaaaagaacgggcagccgcaaaaaaggttgccgatgccatgaaggcagaaggctgggaatttgcgagccatacctggggacatcagaatgtgggacaggtcacactggagaagcttcaggcagacaccgaacgtttcaagaaaaatgtagatccgctgatcgggggaacggatgttatcatttttgcttttggaaccgacattaccaatgaccaggagtattccggggataaattcgaatatctgaaggggcagggatataattattactgcaacgtggattccagccagtattatgtacagatccgggatcggtacttccgtcagggaagacgaaatctggatggataccgtatgtattataacccggaactgttatccgatctttttgacgtaaaagatgtttttgatccggcaagaccgacaccggtaccgccgatgtaacggtcatattcggagatacgaggggacttttagaaaggggcatatatattattatgaagaaaaaaattgcaggtgtactgacaacagtgcttgcggcgtcacttcttgtgggcggaaaccatccggtcactgttcaggtggacaatatgatctccgggacacaggatgacgaggatacacagtctgatgaagcggaagcagaagctgcggaagccgaagaagaacagtccgaagaagccaaagtagcagcggatccggaggaccagccggcagctaccgagacaccgaaggaagaaaaaaaggcagaaaaagaaacacagaaaagggaagcagccgagaacagctccgacagtacttcctcagacgaaaaaacacttctcaaaaaagccaaaaaactggcacagcagtatgattacaccggcgcgatctccgtgttgaaaaacaactggaaatttgccactagtgacaagatgcaggaagcagcagcagcctacatgaaaaaaagagatgcctgtgtggaatatccacttgagaatatcacccatgtattttttcattccctgatcgtgaatacctcactggcctttgacggagattccgatgaggccggatataatcagatgatgaccacagtcagtgagttcaaaaaaatgctccagatcatgtatgataagggttacgtactggtgagtcctcatgatatggctgtgatcaatgatgacggaaccatgagcaggggaaagatcatgctgccggaaggcaagattccttttgttctttcagaggatgacgtcagctactatcattatatggacggagacggatttgccacaaagctagtgatcgacgacaacggagatatcaaatgcgagtataagaaggcagacggtacagttgtgaccggagattacgatgtggtgccgatcctggattcctttatcaaagaacatccggatttttcctatcatggaagaaagggtattctggcaatgaccggttataatggtgttctgggctaccgtacagatggggcatataagaccaagaagaatcttcaggatgaccagaaggcttttctcaaggccaatccggattttgactatgataaagaagtaaaagcagccaaaaaagtggcgaaggccatgaaaaaggacgggtgggaatttgcaagccatacctggggtcacagaaacgctacaagctccacagcagcggagttgaagaccgataataaaaaatgggaaaaatatgtggcacccatcctcggaaaaaccgatatgatcatttttgcctttggtgcggatatcggcgattgggaaggatacacctcggataatgagaagtatgagtattacaaaagccgtggctaccgctatttctgcaatgtagattccagtcagtattttgtgcagatcacaagtgaatatttccgtcagggaagacggaatctggatggatacagaatgtattacaatccggatatgctcagtgacctgtttgatgtatcggaggtgtgggattcttccagaccgacaccggtaccggaaatgtaagacagcaaacacactttacaaatctgtataaaaaaagattataatcgaaccgacagtacttgatgaagggagtaggttatgaagaaaaaagcatatctcatggttcttgcactgtgtgcggcactggcgatcactgcatgtggcacatcaacagaccagaaagatgacaaaaaacctgcagcagaagcgcaggatacaacagataaagaagattccggatctgcagattccaaagagtcagaagaaacggattccaataaagacagcgaagaggcagcctccggagatacaaggcttgtttccgtggatgatgtgagcaaatatgtgaccatcggagaatataagggactgactcttgataacacagtagaagccgtaaccgatgacatggttgacggaaggatcaaggaagagcttcagaacaaggctgaggaagtaacggaaggcagtgttcagaacggagatgtggttaccattaattatgtgggaaccaaggacggagtggcttttgacggcggtactgcaaataattatgagctgaccataggctccggaacatttatcgacggatttgaggacgggatcatcggaatgaaaaaaggtgagaccaaggatctcgatctgactttcccgaaggaatactcttcggaagagctggccggacaggaagtggtatttaaggtcactctgcagagctttaagcgtgcacctgagcttaccgatatctgggtagccaagaatacagactgcaagagtgtggatgattacaagaaggaaatccgtaccacactggaggatgaagcgaagacaagtgcacagaacacattgcgtgaaactgcatggaacacagtgctctcagcatctgaagtgaaggaatatccacaggaggatctggatacagccaagacagagtttcgcagtctgtatgagaattatgcaaaacagggtgatatgacgctggaggattttgtaaaagctcagggaatctccatggatgattttgaggagcagagcggtcagtatgcggagtttaaagtaaagcagaacctgatcgtacagggaatcatggatgcggagaatatgacacttgaagataaaaaatctctcagtatccaggatgaactgatcaaagcatacagtgtgaaggatctggctgcgctggtagataaatacggacaggcagccgtggatgaatccatcggacttctcagagtggaagattttatcctggacaatgcaacagttgaggagaaggtttctgccggtgatacccagggagtaaacggagatgatccttcctcggacggaagcagtgcggaaggtaccgtggatgaagagctggaagcggcagaggctacagatatggtgccggaagacggcgaggcggatcaggatgcagcgggtcaggagtgatctgacagtatcagcagctaaaaaagtgtggtgcccggaatgtgtttcgggtaccattttttttacatgtgcatcgcgaagtgtgttactgagaacggagtgaacagtaacaaattaagagattctttcgggaatttccattgtatttaagcgttaaatgcggtatgattaaagacagacattaaatatcaaagaaagatatgagtatataaacggggatgtaaaaaatggacaaaagagttttgcgtgagaggatgcgcagaaaacagcagcagttaagacggcggcggatgatgaagcggataacctgtgtagttgcggcgattcttctgctcgtttttgttgttcgaggggtaattcttcccatcgtcaaccatgcaggcggcggaagcaataaggatgcggagacagtaaatgtccaggcaaataccgccggagcttccacaggcagcagtacgaaggacggtacggcatcgacggatacggctgcttcggatacagacagcgcggattccggtacggatgcaacggtgatgccggtaaagggcagtgcagcaggcgaaaggctttctgttatgactccgggatggcatgaggattctacaggaaagtggtatcagaatccagatggtacatattatgtaaatggttttgcggatattgacggaacaacatacagctttgataaaaagggatacatgcagaccggatgggtggagaaaggtgtgaaggactattattttaatgaggatggctcttatgatccttccaagaagcgcccgatgatcgctctgacttttgatgatggtcccggagagtatacagagacacttcttgatactgttgagaaatacaatatccatgttacgttctttatgctgggacagaatgtggagggccgtgaatctaccatacagcgaatggtaaagcttggctgcgagatcggtaaccatacttgggatcatccggaacagacgctgccgaatatggatctggattctgttatgcaggagttccagaagacggatgatgcactggtaaaagcctgtgggcaggcatcaacggtatgtcgtgcaccgtatggcgcgatcacagatgagcagatgagtgcagttggcaagcctttcttcatgtggtctacggattctctggactggaagctgatggatgcggatgcagattataaccagatcatgaatgattcctcactgggagacggttctatcatcctgatgcatgatattcatgaaccatctgtgaagtgtgccacagagaagctgatcccggcactgatcgaccagggatataagcttgtaacagtcagcgagcttgcagaagcgaaggatgttacgttacagagtgcttcctattctgacttctgggacagctctcttcaggctggtcgtgttgcaggatatgcaggaaattccagcgattcagaggattcctctgaggatggctccgatggaagcgattcttctgacggatcggatgtcagtgacggatcttccgatgaaggggactattccgatggttctgacgaaagtgattattcggatggatcttccgatgatggaagctatgatgatggttcctacgacgaatcttatgacgatggaagcgaagaatattaaaaaatgacaggagagacctgaatgacaaaatgtgcgtcattcaggtctcttttttgactttatctgacactgtcggataatagacacatattagccggagagggtttttccttgactgaaaatatggggattggtataattatagaataaaaaattccacttaaaattggggaatggacggtggcagaactataaagggaggtacctgaaaatgggaaagaaattacaatttacggagcttgaccagtatctgtttggtcagggcacgaattatgatatttacaggaagctgggagcacatccggacacgcagaaccggaaaaaaggggtttattttgcagtgtgggcacctaatgcacaggcggtttctgttataggtgaattcaacgaatgggatacggagaagaatcccatgaaaaaagttggacccattggcgtttatgagacatttgtaccgggagcgaagatcggacagctgtataaattttacattacaggtgcacatggtgaggagctttacaaggcagatccatatgccaatgccgctgaaatgcgtcccggaacagcttctcgtattacagatatcaccaactataaatggaaagatgatacctggatgaaaaatcgcgagaactttgatccggacacaggtgccatgtctatctatgaggtgcatccgggttcctggatgaagcatccgcagacagcagaggatgaggatggtttctattcctacagagaactggcgccgaagcttgcacagtatgtcaaaaaaatgggatacacccatgtggagcttatgggtatcgcagagcatccttttgacggttcctggggctatcaggtaaccggctattacgcaccgacttcccgctacggaacaccgcaggatttcaaatatctggtggattatcttcaccgtcagaaaatcggtatcattcttgactgggtaccggcacattttccgaaggatgcacacggactggttaactttgacggaactgctgtatatgagcatgcagatccgagacagggtgagcatccggattggggaaccaagatctacaattacggacgtccggaggtgaagaatttcctgatcgcaaacgctctttactgggtagaggaatgccacgttgatggtcttcgtgtagatgcggttgcatccatgctctacctggattacggtaagaaagacggtgagtggatcgccaataaatacggcggaaacaagaatctggaggctattgaattttttaagcatctgaataccgttgttctcggaagaaatcatggaactgtcatgatcgcagaggaatctaccgcatggccgatggtaacaggtaaggcagaagacgacgggcttggattctctctgaagtggaatatgggctggatgaacgacttcctggaatacatgaagctggatccatatttccgtaaatttaatcataataagatgacattttctatgacttatgcatacagtgagaaatatgttctggttctgtctcatgatgaagtagtacatctgaagtgttctatgctggagaagatgccaggagagctggatgataaattcaagaacctgaaggccggatatacttttatgttcgggcatccgggtaagaagcttctgtttatgggacaggatttcggacagctgcgtgagtggagtgaggccagagagcttgactggtatcttcttggcgaggaaaatcatcagaagctgcagcagtatgtcagtgatcttctgcatatctaccgcaaatatccggcactttacggtgcagataatgatccatctgcatttgagtggatcaatgccaacgatggcgacagaagtatcttcagctttgtgagaaaatctcctacaagacgtaataatatcctgatagtatgcaactttacaccggtagcacgtccggattaccgtgtaggcgttccgaagaaaaaacagtacaagctgatcatggatgagcaggggcttcttccgaagggcaaggtatttaaagccgaaaagaaaaattgtgacaaccgggaattttcttttgcatatccgttggaagcttatggagttggtatatttacatactgatattctgtatagcgaaatctttgaaagaaaatataaaagataaaataaaaataccggagatctgtgtacctttgaagtgttggcttcagaggtgccggatctccggtattttatggatctgggtataaactggttacgaaaagttatcgctattcttcgctatcatcgtaggaaccatcatcgtaggaaccgtcgtcgtaggaaccgtcgtcgtaggaaccatcgtcgtaggaactatcgtcgtaggaaccatcatcgtaggaatcgtcgtcagaataactgtcgtcgtaggaaccgtcatccgaggagtcgtctgtgctgcctgagttattatcagcagagttaaagtcttcggaagtgatgtcaatgcctttatctgcgtaatatttttctgctgtgatggagtcggtatcttctacgacatttccggatgcatcgatcatgttcaggtctgtgtcaatagtcacatccaggaggttggtccctgtggatggagtgacattcatggacatgatctcgttgaacttctttttcaggttgtcaagagtgaatacaccggaaccaatgtatgactgtacaccgttctgagatgcaagttcttctgtgtaatcggaaagcatatatggtccgaattcaccggcatcgctgttgtaatgcatgaccagaggttccactgtaggggtcaggatctcaattgaggtcttgccgtcctgtacggttttctgaatggtgaattttgccattccgccgagaagttcttccagcttctgctgggtggatacgaaatttcccagagagtagaagactacagtttcattgcctttgtcatcagtaaggcggccatatggctggagtacatgtggatgtccgccgatgatgacatttacgccctgctccataaggtaggctgcccactgtttttcgtattcgtttggcatggtttcgtcttcggtaccccagtgtgctacaaagatgatgcagtcggcctgctgttttgctttctggatcatggctgtgatcttgtctttgcggatcatgtcgatcatgtagtcttttccttcaatgccgcctacgtttgtgccgtaggtgtaatccagaaatgcgatcttgataccgtttacttcacggatcttgacggtgtcggcatcttcctgggagtcgtggatccccagaagtgtgacatccggatatttggttttccagaagttcagtgtgtctgtgaggaagccttctccgaagtcatcgatgtggttgttggcagattctactacgttgaatcctgcttttataatggcgtctcctacttctgtgggtgttgcaaaggatgggtaggagcttacgctgtcatggtcggttgtgaagacggtttcctgatcgatcattttgatgtctgcgtccttgatggcgtcctggatgtgggtgtagatcttgtcgtagttccagttgccgtcagaggatgctcctgcgtcgatgagactctggtgatagaggttgtcgcctactgcgatgacggaggcagtggtagtttcggcagtggtgtcggctgcttcctgatcggccttggctttgactgccgcggcttttttctgggcgtctatggctggtttgcggatgaggcggtagtccagttgattgaagaagaggaccaggatcgcaaggacgatgacggatgccataagacttacacgggcattgctgcgttcgcggaagttaagggggatgttgtccttggggttgcgccggggttctctgagggaatccggggtggagctttttttgaagactcctttgagggagtcggggattttgatgttgggtggaaatttcatttatgttttaccttgtctttctttggattttgaatgcgattgattggtgattgttcgctttgttatttttgatttttgttgtgtggttgtattatagcagatttttattttggtgggaagagggtggtgggggtgaacgtacgcccgagccggggatgctgtctggtctgcggcttcgtcgggggctggcttctaggctgccgggaatctgctaaaagcgttttccaaaagtccgaactcgcgtcttgcagccgctcagacagcggacttttgaaaaacaacgcagatttccgccagccaagaatcagctcccctcctgcagaggcagaccagacagcatccccggctcggactgtgaggttcaaggcggtagggatagggtggctgggcgggagttggatgagccgtcagcgctgcgctggacggcgtggaggaaaggctgagtttccttgtggcttgatgggaagggggtgggccgaggcgcttcgctgtcggctgggagtgtgtcgaggtgcttcgctgtcggctgggagtgtgtcgaggcgcttcgttgtcgactgggagtgtgtcgaattgtggtggaatttttggatgggttttgcgtgattttttctctggtgtatggtatggttggtatatcttataagatcttttgtctgtatggacattcttggagcttcgggttctgaagcgttttccatttttttgttactgtgaaggttctgaaaatccgttttatggggtttttatgttttctttgtatggtataatttatatatcagtaggagtgttaatgaccaataatactatatttgatgatgtttttcggacgatgatggagtagatgaagttatgggtggaaaggttttacagttggaatcggaacgcttgcttgagctgggagaataatagacagtgcggaggcgtgcagggagttgtataaagagtatggtttgtgagaaataaagaggatattttgttactggtgacaaatgtcagatttttacagaagagaggatataaacatgggtgtttacaggcgtaaggcacagtatcatgagacggatcagatggggatcatccatcattccaattatgtgaaatggatggaagaggcccggatcgatttcatgaaggagttgggctttggttatggtgaggtggagaagcgggggattgtttctccggttgcagaggtttcagtttcttataagaagccggtgctttttgatgatgtagttgggatttcggtttcggtgaagaagtacagtggtgtggttctggagctggcttatgagttttttaatgtgaccagaagtgaggtttgtacagaggcttcctcgaagcattgttttaccaggaatggggagctggtttctctgaaaaaagagattccggaactggatgtgctgttcagaagctgtgtgaagggggattgagtctgatggaagttgtggagatgcttgataatctgaaggaaaaggcccgcagggacccggcgcttcgggagatgttgcttgctacccgcagggagaaagcgccgctggctgctttctgtaagaagtgccgggagcttggggttccggtttatgagatggatctgatcgcagctggtgaggaattttatgcagcgatgaagaggagtaccaatggcggcggagagaattctccgatgcttgagggtgaggatgatttttatgaactgttttttgctgggttggagtgaaaaaacagtttcaaaattccgcatcaatatacttctccagcaccgggaactgtacaccaccaatcttcagtacctggctgtggaaagctttcagatcaaagtcctggccaaggcggttctgttcggaggtgcgtaagtccagaaggcttaagtagccccagtagtatttcagataatttcccggggtttccaggatatactggtagatctcggagacaacggcgctgtcttcgataccaaaggctttcagaaagctggcggcttcggcctgagtccagccgttgtaatggatctcaatgtccagaagggagtacatgcataaattgatgcttcggttcagccaggagatcctggcaagctctgtggcagaaggatcctgaatataatcggcggcgtactggtaggcatagggttcgatgtaggtggcccatccttctgcaaagccggaggtacagaggagatttcggatgttggaggatttttggcgttggaaggtgacagtctggtaaagatgccccgggaatccttcatgtgccagtgtggtaaaaagctccagaccctggtagctggcagccggatttatgtagatcacattgggggttccggtatccataggtggggtgagataaaaggcggggcttagatattctttcatggaatcgtggactgtgcggagctcaaaggtgacatctgtgagaggtgggaagtctgtttggatcttctgctgcaaggcattcagcatctgggcaggctttatttctctgaaagtgattccccggctgagagtagtcagaagctccgggttttgtcgaagtatggttcctgcgatgccgatctcgtcggaaagctgtccggagagtcgtttttccatttgctttacaggaacgtaagagccggtctgactctgaagaagatagagataataggcttttcctcccttgaaataagtcaggccacgagtgttttttcctgtgccacgcaaagcttccagaccggtcataagttcctgataggctgggatgacttctgttttcataagattttggtgggtcaggaccagagcgttctgctctgaggaaggaagttttccatattcggatagctttttctggaaaatttccagcatataattgttgtcgggattctggataaaagcactgcattgtgcaaggacccggtccagggtagtatcgctcataaagaagccagcttcggatttctttttttcaaatttcaggatgctccgaaagtatgggcggatggtggtgagaagagtgaaatagtcggtgatatcacgatcttcataaaaggcatattccgccagaagaaccggaagctgagcttgaataccaagacttgggccaagaggctcctgaagcagataattgtcgcccagtgatttttccgtgtggtaatagaggagcatggagtccagcgtcagctgattttccgtggaaaggcggctgtagcggaaggatttcagctttttttcgtattggctgcagatctggtatgtatttttcatatctgtggggacagtgccaagagaagctttttttcgccggataccctgtttttccggatgtgccagggtataatggagggtaagggtgctgccggaaacttcattttgaaaaactttttcggaaaaggcttcgaattttccgttttctgtgatcccgtgagtggaaaaataaccggcagtaaggccggtgagaagtgccaggataagaagcagagtgatgataataggagatttatttttcctgattttaagagacataagacagtctttcattactgtttacagacatataccatgtggagagtgctgatggtctcgaagcaaacagtaacgtcctttcagagtggcgctttgttctatcatattggaaaattacggaatctatgatattatgtgagcggaaatatacaaaaatggagaaataacatgagtgatatttatgatcttgcaattttaggcggaggtccggcagggatcacggcagcgatctatgcgtccagggccaggttaaataccatatggatcgataaaaactttgcaccgggcggccaggtcacagctacctatgcggtggataattatccgggaatgccggggatatcgggcatggatctcggagaagcctttggggcacatgcccggaagctgggattggaaccgcagcgagagaagattctttccctggaaaatatttccggagagatcaagacgattcgtacaaaaaagcatgaatatcaggcgaaagccctgatccttgcatttggggcagagcaccggaagctggatatcccgggagaggatgatctgagcggccttggtgtttcctactgcgctacctgtgacggagctttttataaggatcggaccgcagtggtagtggggggaggaaacgtggcagcagaggatgcagtttttctttccggcctctgtgaaagggtatatcttgttcatcgccgtgatgcgcttcgagcagatcaggcacttcaggagaaagtctttgcctgtgagaatatagaaatggtgtgggacagtgttccccttgagattctgggacaggatgaagtgacaggtcttaagatccgtaatataaaaacaaatgaagagagggaattgaccgcagaaggtgttttcattgctgtggggatcgttcctaatacgacacttgtaaaggaccagctcaagctggatgaaaatggatatatctgtgcaggagaggagggtgttaccagcgcacctggggtttttgcagcgggggatattcgtaccaaggcacttcgccagatagtaactgctgtttcagacggagccaatgcagtggcttccgcacagaaatatctctggaggaaagataatggcaacgattaaggaaatcgcgcaaagagcaggcgtgagtacaacaactgtttccaacgtcatacatggaaaaacaaaaaaagtatctcctgccaatattcagaagatcgagaatcttatccgggagatggggtatgtccagaaaatgggactgagagttctgaataaagaaaaatcccagctgatcgcagttgtgatcaattatcataaagacttcaaggattctatcatcggagatcctttttatggaaagatcatcggttttatcgagaaatacgtgcaggaactgggatattatctgatgctgtattccgcaaaggatacagataagatattccagatggtcatgggttgggatgtagatggtgttattgccatttccttcagcaaaagcaactgcgaaaaaatctatcagctgatcaacaaaccgatcgtttctattgatgcatatggtgagcttgatgcaggccaggaaaaccatgtcctgaatatcggactggacgacgaaagtggcggctatcttatgacaaaatatcttctggaatgcggctatgagcatatccaggtttgtgcaggccgtgataatggtgtggatcatcttcgttacatgggcgctcagcgggcggcgaaggatcttgcaaagaaaaagcagaaggtgcagtttactgctcttggaatgaactacgccaaacgaaaagaaagctatgcgtggctgctccagcggaaaaaaccaaaggccgcactgtttttcctgtcggacctctatgcattggaggctatcagctttttcagcagtcgtggagtaaagattccggaggaaatcggaattgcaggatacgataacatcagctatgcggaattttccgtgcctcgtctgactactatcagtcagaatgtggagcagaaggcgtctcttgcagtggaaattctgatggaacggatcaatggagtggaaaaagagcgtgaaaatgagatcatgcttccggtcacgctgatccccaggagatctgtacagccgcagcatgaggaaaagtaagtctgcagagaatgtacctgatctgatcaagggggtagatacgagaagtcactgcagaactgtgaaaaatagaaaatcgggactttcaatatagtaagagtacagagaatctgagatataaaaatatcaaaagccgaaatatacgggaactgtcagtgtctgacagtcagagtattttcggctttttgtaaatttacctgaaatcgtaaaagagttatcctgtgtaggttcgtgctgaagatgtggataataagcatttgctgttctatgtgaaacctgcacaaaactatgattttgaacttgttacaatgataggttatgtacataacctatttacacagcctaactttgatgctatagtgtgagcacaaaggttaggtacataaccaaagggaaagagtacagaaggagtgaataccagatgaaacagattctgatcgccacacatggaaaaatggcctccggcattcgttatacagcagagctgatcgttggaaaaatggctgagatcacaaccattgatgcttatgtgacaccggaagacaatgtggagaaaaagtttgaagaatatttcgcacagcatgaaaacgacaggattttcgttttcacagatctgatgggaggaagcgtaaatcagaagcttctgagatacagccagaaagaaaatgtcacactgattacaggaaccaaccttccggtcctgatgcaggtcatgatggcagatgacgatgtgacagaggaggagatccaggagttcatcgatgatgccagagaagagcttcagatggtagaccttggcggtggaaagaaatccacatctgaaaaaaatgctgaagaagatactgcacagggtatcgaaaatactgcgcagatttcagaaggtgctgcatcgtatgcaaaaaaatccgcaccgaaaaaagctctggctccccagtcctatgacaattccacagcaaagatcaccgcacttcgtgtagatgaccgtctgatccacggacaggttgccatgacctggaccaaacagctggctgtacagggaatcgtggtagctaacgacgaggcagctaacgataacacccagaagatggcattgaaaatggccgtaccgggcggaatcaaatcgctgatcaaaccggtggatgaagccattcgtattttaaacaatccgaaggcatccaggatgcgtatcctggttcttacaagaacggtaaaggatgctctgaagataagacagagcgttggtgagattggcttcctcaatgtaggaaatacaggacgttttgacgggatcgatgtttccgagaagcttgtcctgaccccgacgatcatgctgacaaaagcagagcagcaggcattaaaagagctggtagctcttgacccgaaggcatgtatgcagcaggttcccaatgatgagcagaagcttgtgaaggatgtgctggacaaattaaactgatacctatcaaaaagaatgagcgcaacagtgctgaatgtaaaccgtg

SEQ ID NO: 259 - DNA, 3320 bp, Unknown
  gut microbiota DNA sequence
gttaaatgcatttcttgtagcacttgccgtatttatctgtgtcggcggtgcagagctggtcggatttactatgctgaaccgtccaatcgtcatcgggccactggtaggtctgttccttggagatcttcacacaggagttatcatcggagcttcattggaagctgtattcatgggagttgtaaatatcggcggagcttctgcagcagaacccggaattgccacagctgtaggaactgcctttgccatcatgcttggcaaaggctctgaggttgccctgacacttgcacttccaatcggtatccttggtcttcagatcaagaccgttctctacatttttattgtaggtatgtttgcaaaaaccttcgatcgtctggcggcagaaggaaaagaaaaacagatcgttgctcttcactatgggctctgggctgtaaactggtttttatattccttgttcgcatttttcgggatcctgttcggatctgatgcagtcagtgcacttctggatgccatcccggatgttgttatgaatggtctgacagtttgcggcggacttcttccggcagtaggtatggcaatgttgatgaagatgctctgggataacaagatctgtatgttttatttcttgggctttgtccttgcagcatacttaaagcttccactgatcgctcttgccgtgatcggtgtgatcattgccatttccattggtatgaatgattacaagctgaaccagcttgcggcgcagagagtggcagcttcaccggccggtggttctgacgaatatcttgatgaagaagaggaggaatttttctcatgagtaatttaacgaaatccattccagcagatgaaagaaaaatgctgagaaaagcgttctggcgttccttcactctgtatgcggcagtaagcccggcaaaacagggagcttccggtttctgctattccctgatgccatttatcaacaaattttacaaaaacgatgagaaaggcaaaaaagctgccctcacaagaagtatgtcctacttcaatacaaccatcacctgttccactttcatcatgggtcttgtagcttccatggagaagaaaaacagcgagcagaaggattttgacgcgagctctatcaatgcagttaaatcctctctgatgggacctctggccggtatcggtgattccattttctggggcgttctccgtgtgatcgcagccgggatcgcagtaggtcttggtgcatccggaaatgttctggcaccgatcgtgttcctgcttcttttcaacattccgtctattcttgtgaaatattatggaacattcctgggctacaagcttggttccgaatatattcagaaggtttatgcaagcggtcttatgaacatcctgacaaaagctgccagcattgtaggtctgatcatggtcggcggcatgactgccagcatggtaacctttaattccacttatgagctcaccatgaagggtgaatctgttctgaacctccagaacatgctggaccagatttttatcggtattgttcctcttggactgactcttctgtgctactatctgctgaaaaagaaaaatatcagcatcacagttctgatcatcggtgttatcatcctgagcatccttctctctcttcttggaattgcataaaccttaaggataaggaataaagatcagaattatgaaaaggcgggccgtatagggtccgcctataaaaaagcctaaaaaaagttatatcgaaataactgaccgcaaaaagggcagttgaagaacacctgaccggatataaataagcagcaaatacggattataaatatctgctcaatgcaaaataaaggagacataagaaatgaaagattggtggaagaattccgttgtatatcagatttatccaagaagctttaaggactccaacggggacggcttcggcgatctcaagggtattattgaaaagctcccttaccttcagaatcttgggatcgatgtgatctggcttagccctgtttttgactccccacaggacgacaacggttacgatatcagtgattaccggaagatctacgcgggcttcggaagtaacgaggacatggatgagctgatcggaaaagctcatgagcatggtatcaagatcattctggatcttgttgtcaaccatacttccgatgagcatgcatggtttgtggaaagccggaagtcaaaagacagcaaatacagtgattattatatctggaaggatccgaaagcagacggcagtgagccgaacaactggggttccagcttctgcggaagtgcctgggaatatgacgaagagcgtggccagtattaccttcatttctacagcagaaagcagccggatctcaactgggaaaatgaaactgtccgtaaggaaatctatgatctgatgaagttctggatggataaaggtgctgatggatggcgcatggatgtgatcgcgtctatctccaaggatcagtccttcccggattacccgaagactgatgaccgcaagtattatacaggaaaatatcacagcaacggaccaagacttcatgagtttatccatgagatgaaccgggaggtgctttcaaaatatgactgtatgacggtaggtgaggcgccgggctccacaccggaggttgcaagactgtttacagatccggagcgtgaggaactgaatatgatcttcacatttgagcatatgaacatcgaccgtattccgggctctgtaaaccgcaagtgggaattgaagccttttgatctccgtgatctgaaacgtgttatgagtgagtggcagaacaagctttataacaagggctggaatgctctgtattttgaaaatcatgaccagccacgtgtgatctccagatggggaaatgacactacttaccgcgaggaatgtgcaaaggcttatgctaccgttctccatggtatgcagggaactccttatgtatatcagggagaggagatcggtatgacaaacgtgcagttcccgctggaggagtacgaggatatcgaggttcgtaatgcatatcaggatcttgtcgttaagaacaaaaccatttctgaggatgattttcgcaaggcagtatggaacaagagtcgtgacaatgccagggttccgatgcagtgggatgacagcgaaaatgcaggatttacgaccggtaagccatggttccgcctttctgatcgttaccaggagatcaatgtaaaaaaagctctggaaaaaaatgattccgtgttttattattataaggatctgatctgtcttcgtcatgaggaagagcttctcacagaaggtgactatcagctccttcttccggaagatgaga

SEQ ID NO: 260 - DNA, 286 bp, Unknown
  gut microbiota DNA sequence
caattctcatttggctttcctttgcttaatactttcatatgaattccattttctacatactgcttagatgaaatagaataattggcttctaacaaacgggcttcttctgcattttgtaccgtacaattccaaacacaaccctttgcattttccagcaacccactcacgcttccggaatataaaaaacttccttttttcataatggcaagctgtgtacaggttgctgctaaatcttctactacatgagtggaaaacagcacagttctatcctttgaaaaatcaacca

SEQ ID NO: 261 - DNA, 304 bp, Unknown
  gut microbiota DNA sequence
gggctgttcgcccattaaagcggtacgcgagctgggttcagaacgtcgtgagacagttcggtccctatccggcgtgggcgtaggatatctgagaggagctgtccttagtacgagaggaccgggatggacggaccgctggtggaccggttggcttgccaaagccatggccgggtagccaagtccggaagggataaacgctgaaggcatctaagcgtgaagcccccctcaagatgagatatcccattcttatgaagtaaacccccttgaagacgacgaggtagatagggcagaggtggaagtgtgg

SEQ ID NO: 262 - DNA, 12164 bp, Unknown
  gut microbiota DNA sequence
atttacctgttgaacagattatccacttgtaacaattccaaaagaaaaaatggattatacaatcgaccttcttatcactatggtgacagaagaaatcgcagaagagacgggcaaggacagaaaagaggtattgacagattttctatgttcaaagacaggaaaagcactgtatgatgagaaaacaaagctgtggtgtaatggtccggcatatatagctgaattgtatagggaagaattaaaaaaatccggatatcagatttgagatgaatacatatccggatggtgttgaaaacttccactattggaacacaaagaacgttcccaccggctgatcagtaaaatcgttatctcaggaccgcaggagaaagacggaacagaaaattaccgccgtactcctgaaacggtcacaatggaaattcatctcgagccagtattttctcataaaagacataaaacagttgatatccggttatgagcaagcaacgaagcggatcggatcgcaaatatccgcctgacttagctccgaacttacaattctacgtcaagttgctgttcctcaatatgatggcgctttgcatagccggtgagcatcagtgtcagcgcaccgtcgccggtcacgttgcatgcagttccgaagctgtcctgcagtgcaaagatggtaagcatcagtgcagtgccggagctgtcgaatttcagtattccggtgatgatgccaagggatgccatgacagttcctccgggaacaccgggagctccgatggcaaagatacccagaagaaggcagaacagaaccatggtacccggcgtgggaacggaaccgtacagaatcttcgaaatcgccatacagaagaaaacctctgtcagaacggagccacagagatggatgtttgcaaacagagggatcccgaagctgaccagatccttgcggagtggttttgccttggaggcgcactgcagtgcaacggccagtgtggctgcagatgacatggtccctacggcagtcaggtaggcaggaccataatggcggacaaccttcagaggattttctccggaatagattcctgcaaggatgtaaagaagagccatccagataaaatgcccggccaggaccagtacgatgatcttcagaaaaacaggtagctgtctggtaatggttccctcgtaggcaaggctgcagaaggtagtgccgatgaacagcggaagaatggggatgatgatccgtgcaaccagagaaagaacgatcttctgaaattcatccagaagtcctgtgatcagcttcgcttttgtccaggtggcggcaagtcccagcatcattgcaaacacaagagcactcataacggacatgatctgcgggatctccagctcaaagatcacctccggcagctgcttcagtcctgcagcataggaatggatggacagatgtggaatgatcagaaagccggaggctgtagaaaaaagcgctgcgccaacagaggagccgtaagcgaggacaaccgcaactcccagcatcagcgaagcatttttgccaagccgggtaatggacggagcgataaatcccagcacgatcagcggtacgcagaaggtaatgatctggcccagaatgtacttgatagtaactgtgatattgagaactgccatggagattccgttggtgctgtaccggttcaggataagcccggccatgatccccaggatcacagcaaccagcagcttaaatggcagactgttgaaaaaagatgtttttttcattggaaaaacctcctcggatagtataaaataaagccagagtttattataaaggcatttgataaaaatcacaaggagcagaatgaaatgatttatctggataacgcggctacaagctttcataagccggactgtgtgccgcgtgctgtggtggaagccatgcagcatgcaggaaacagcggaaggggcagcagcggcgaagcaatggcagcctcaaggcttatttttaatacaagatgccagatcgcagagatgtttgacgtatggggaccggaatgtgtggcctttacatccaatgacacggaagcgctcaatatcgctctgcagggaacactccatccagaggagggaactatccatgcgatctgtacggagatggatcacaatagtgtgctccgtccgttgtaccgcctggaaaaaaagggcatgaagcttacgatcctgccggcagaccgcaagggacggatctcccttacggagcttgaagcagccatccgtccggagacgaaggtgatcgtctgtacccacgcttccaatctgacaggaaatctcaatgatatccacgccatcggtgcgatcgcacagaagcaccagaagctttttattgtggatgctgctcagacagcaggattatttccgatttccatgaaaaaagatcatatagatattctttgcttttccggacataagggccttatgggacctcagggcacaggagccatctgtgttcggccgggggtagctgtggagcctctgaaggtaggcggaagcggcgtcctcacctttcagagggagcatccgcaggatatgccggaggcactggaggcaggaaccctgaacagccacgggatcgcaggtcttggtgcagcaatcagctggatcagggaaaccggaacagaacagatccgaaaaagagagcagcagctgatgtggcgtttttatgaccaggtaaaggaaattccgggagtcaccctgtacggagatttttccggagaagaacgctcccctgtggtgactctgaatattgcagggatggactcggcagaagtggccatgatccttgatgaagagtacgggatcagtgtaagagccggcggccactgtgcaccgctgatgcataaagcacttggaaccgaaaaaacaggagccgtccgcttcagcttttcttattttaatacggaagaagaggtggacactgctgccggggcggtaaaggagcttgccgcggaataaacagcgaaggacggacagaaaggacacaaagaatgtatcagacaatatatgatgtggtagaaaaaagagggcgtgtaaaaacaggaatccttctgaacggaaaggatgccgggctgaaatatctttcggaagaaggcagctttttttatccggagggagcagaaagaaataaagaagcagaagaattcctgaaggcttccgtggaagcagctgtggaaaccggcgttgttaaaaacggagacagggagatatttgtggaaacctatgagaagaatcccaggctgatcatactgggtggcggccatgtttctcttccggtagcagagatcggcagaatgctgggctttcatgtaacagtcatggatgaccgggaggaatttgtgacggaggaaagattccccatggcagatgagaggatttttggagattttgataccctgtccgacaggatccctccctatgaaaatgcctactatgtagtggtgacacgaggccatctgggagattccgcctgtgcaagagcgatccttaagagaccctttgcatatttcggaatgatcggaagcaggacaaaggtgcggatcaccagggaaaagctcctgaaagagggctttacggaggaacagctggatcagatccatgcccccatcggacttcccatcggaggacagatgccggctgagatcgccgtgagcatcatggcagagatcgtgcaggaaaagaaccggcatttccgcacctactgtgatgaggaggtggaggcagcagtacgccgcaggacaccgggaaccatggtcacgatcatcgagaagaagggctcctcaccaagaggaaccgggagcaagatgttcgtattccgggacggaagcacggcaggaagcatcggcggcggaaaagtggagtttgaagccggaaaacacgcagtaaatatccgaaatacggaaacaaagatttacgagctggggcagggagcaggagatctgggaatgatctgcggcggaactgtccgggtgctttttgagccggtaaatatgtgaaagaaccggccaggacttgcataatattgcagaatcgtgtatattggacgcagagaattttttaccggcgtataaggaggaatcagataaaatgaagaaaaaatgtattatggctttgataataggcgcggctttccttgcacagggctgtggatatgaggaaggaaccgatgcagtggtaacagtagtagattccacaccgacgccggagcccacagagaagccgaaggcaactgcaacacccacaccggaggcagcggcagcagattccacagcagacggagcagcagcggcggcagactccaccacagccggggcagcagatcccgcagcacagacagcagctacggagcagaccccaagcggcatcaacgtacaggctcaggatgccacctactacgcagtggagggtgtgaatttacgttctgacgccaacgcagaggcagagtttgtggcaggtgtcctttccggagaatccctgaagtgtaccggtgtctgtgacaatggatggatccgtgtggattataatggccagacctgctacgcatccggcgattacgtcagcacaaccccgccggtaggagcagtggcagcagatactaccgcagaagcagcacagtagagcacagactacaggcttttgacctgatcagggaaaacctgatcctgctttaattgcagatatctccttgatataataaaaaacaggcagctgtatccgatgaaatacatcgatacaggcagcctgtttttttgtttcggcatatactccagtccgttcagaacacaaggatcatgccagtggatcgtacccgcagatcattccggataaacaagacggtccggtttgatatcgtagagaacctcgttcaggaatttctttgccagatattttgccatgccaaggttcatatccagataatttccgcagtccttgggagaagctcccgggatctcaccctcaaaatcacggatgaattcaaacatctcgatcatcagcggaacgatatctctggattcataatccccgttaagaagaagataatttccggtacggcagcccataggaccccagtaaatgaccttcgggccaaactccttatggttccgcaggaaggtagccgccagatgctccatggcatgaagctcggctgtgttcataacaggctcctcattgggagaagtcatacggatatcgaaggtggtgatcacctgatctccaaccggatccttacgtgaaacgtatacgccaggctgaagcttgatatggtcaatggtaaaacttgtgatcttttccatgttgattcctcactttcttatatgtacggagcccataataagctccatacatgattttagcagagaaccggaagagatacaaggcaaaacaaagggaatcctgcacgttactgagaacaaaatgaacagtaactcctgcacctggttccgtgcaaagttgactttatgaaaagatgatgttaaactgagaaaagcttacaggggggagagtgaaaagctcacctgaaaatgccggaacaggcgttttcgggatctgataaggaggacttataaatatgaaacgtaaggttttagccgtattatttgcgacagctcttaccgcaggaatgctttccggatgcggaagcacagacagtacttctgacaaagcagaccagaaggaagaatctctggaggaagaaacctcagaaggacagacaggcgtagatgaagagacagcagccaatgcagtatccgaggaggaggctgaggcggcaggcttttcagaccatgaagaaagcgccgatgatcaggaggcttccggtgatgcagaggacacttcacatgaaaccgaagcttctgcagacagctccgcagacagtacagaggatacagacagcgcagacggagaattttccgatggttccgaggatgcacaaatggcagggacaactgtgatcgataccagccagcagctgacaggaacccatcatgctgccatcaccgtaaaggactatggcgagatcgatgtagagctggatgcagacactgcacccatcacagtcacaaattttgtaaagctggtacaggacaatttttatgacggtctgaccttccaccggatcattgacggatttatgatccagggcggagatccaaacggagacggaaccggcggagcagaggacaccatcaagggcgaattttccagcaatggagtgaagaacgatatttcgcatgtaagaggaactatttccatggcccgtagcacagatccggacagcgcaagctcccagttctttatcgtacagtccgattccacacatctggatggcgattatgctgcattcggacacgtgacctccgggatggacattgtagatcagatctgcaaggatgccagtccgacagacggcaacggaaccattgcaaaggaccagcagccggtgatcgagagtatccgtatggttgactgacaggagggagaaggatgctgaaagggaaaacagtgcttcttggcatcacaggaagtattgctgcatacaagatcgcatatctggcaagtgcattacataagcttcatgcagatgtccatgtactgatgacagagaatgcaacgaactttatcaatccgatcacatttgaaacactgaccgggaataaatgcctggtggatacctttgaccggaactttcagttccaggtagagcatgtatctattgccaagaaggcagatgttgtgatgatcgcaccggccagtgcaaacgtgatcggaaagctggccaacggccttgcggacgatatgctcactactacggtaatggcctgcagatgtcagaagatccttgcaccagccatgaataccgccatgtatgagaatcctgtggtgcaggacaatatccggaagctgcaaacctatggatatgaggtgatcacaccggccagtggctacctggcatgcggggacaccggagccggaaaaatgccggagccggaaacccttctggaatatatcctgaaggaagccgccttccagaaagaccttgccggcaaaaagctcctggtaacggcaggacctacccaggaggccatcgacccggtccgctgtctcaccaaccattcatccggaaagatgggatacgccattgcaaaaatggccatgctcagaggtgcggaggttacgctggtaagcggacctactgccattgagccgcccctttttgtgaaggtcgtacctgtgacatccgccagagatatgtttgaggcagtgaccggcttaagtgatgaacaggatatcatcatcaaggctgccgcagtggcagactaccgtccgaagcaggtcagcgaagacaaggttaagaaaaaagacgatcaggcttccatagagcttgagaggacagacgatattctgaaatatctgggccagcacaaaaagcagggccagttcctctgcggattttccatggagaccagagacatgatccgtaattccagagccaagcttgagaagaaaaacctggatatggtggcagccaacaacctgaaggtagaaggcgccggattccagggagataccaatgtcctgactcttatcacacaggacgaagaagtgtcactcccgcttatgagcaaggaggatgcagcgttaaagatcctggataagatccttctgcttaccacaaaggcagaagcatagctacagagctggtcagagagccggttttaacaacgaaaagcggaacaaaaagatcaccgctttccatcaccgtattgtatccgcagaaaacgccgggaaatgctgtatttccggaaatattcacagagcggaacggtaacaaggaggagaagaaatgaaaaacaacagatttacaacagcacagcttacattactgggcctgatggcagcaatccttctgctgatggcctacacaccactgggatatctgaacatcgggccactggccatttcctttaacgtgatcccggtagccatcagtgcagtcgtcctcggacccgtaggaggagccgtggcaggtgcgatcttcggcctgaccagctttctccagtgcataggagtaggcggctccagtgcaatgggagttgtgcttttcggtatcaatccggtatttgcctttatccagcgcttcatcccacgtcttctggacggtatctgccttggatatatttttaaaggcatgcgaaaggtcagcaatacctatgtggcatgtgcagtaaccggattcttttccgcattcctgaataccctgttcttcatgtcagcgcttgtaggactgttcggaaataccgattatgtaaaaaatctgatgggcggtcataacatcatcatcggctgctgtctcatggtagggatcaacgcagtatgcgaaatgatttcctccacagtgatcacaggagcagtgggagctgcactttccaaggcacatctgatcccatccgcacagatcagccgtgagaagacaaaagcataaagacagggaaaataaaattatgatattagcaattgatattggaaataccaacatagtcgtgggctgcatcgatgatcaaaaaacatactttatcgagagacttgctaccgtaagaacaaaaacagaactggaatatgccgtagacctgaaaaccttactggaaatctaccacatcaaaaaggcagacatagaaggctgtatcatttcatctgtagtcccgcagatcaccaacattgccaagctggcagcagaaaagatcctcaaaaaagaagtcatggtcctgggaccaggagtaaaaacaggtctgaacatcatgatggacaaccccggacagctgggcgcggatcttgtggcagacgctgtggcaggattaaatgaatatccggttccgtttattgtgatcgatatgggaaccgccactacagtttcggttgtcaacagcaaaaagcaatacattggcggaatgatccttcctggcatcggaatatccctggatgcactgacagccagagcatcccagctcagcgggatcagcatcgatgccccgaagcatgtgatcgggcgcaataccatcgaatgcatgaaaagtggcgtgctctacagcaacgcagcagctatcgacgggatcattgaccgggtggaagaagagcttggtgagaaagcaaccgtgatcgcaacaggcggtcttgcaaaaaagatcatttctcactgtaagaaagaaatcattctggatgaggatcttctgctcaaaggactccttgtgatttacaaaaaaaataaatgaaaacaaaaaaatcagctgccggtgcaggaaacacctaccggacagctgatttttttactgcgcaaatgctctgcggaaatcctcaggcacaggtgccaggaaacacatcggttccccggtgatggggtgggcaaattccagctggaaggaatgcagggcctggcgtccgatccggtcaaaaaccggatgatacagaaaatccccaggcagcggacagccgatatacttcatatgcacccggatctgatgagtccgccccgtatccagatgcagctccacaagagcatatccattgctgactgcaagacgctcataatgagtcacggcagcctccccacgctcaaaattaacctcccttgtgatcacagaagcatccattcttgcaacaggagcggagatcgtccccctttccggcgggatcccgtcagtaagtgcaagataggtacgccggatctgacgctgcttcatctgagcagagagaagagccccgctcagaggattcttggccagcaccagcaccccggtggtatctctgtccagccggttgatgcagcggtagacaaaagccttcccctgctgcttataataccaggcaacaccgttggcaagcgtattctcgtagttcccagcagagggatgcacaggcatatcagcaggcttgttcagcacaaggatatcctcatcctcatacaggatatccagaggcagcggcaccggaatgatagaaggctccgctccgtccccggtctcttccggaacaaggatccggagaacatccccctccctcaggaccgttctgccaaaagccggctgcccgttcagtaggatcgcctgctccgcccgcttcatagtagtcaatatatgtttggaaaaaccctttttccgaagaaaaccaagaacattttccccggactccccggttaagatcgtataggtaataattctctccatagaaaaaatccttttctgaaatttagcagaccaaaagccagatcacgcagcctgcgagtatagtatagcatttggggagggaaatgtcgaacagacataaaaaaagagctggtacaagaggaaacctccttgaacagctcgtggattacgggaattgtgtcgcttattatcttcattagcgaaaaaagcttataacactgttaaatgctggcttttctggcacagctgaccacgattttgaccactaatcattggaaagaaaaaggaaaaaatacatgaaaagtattgattttacgcggatttgcgcaagaaaaaagtgaccactttttgtgaccactaatgttagatttcgatgattctcagacgatttattcgctttttgatacaagaatgctgcatatccagcttaaaaagcgacattattagcatgctgcatacccttggcacgccttgacaaagggaaatatcaatggtattctttagaatggctgtgaaatatgtctttttaggtctgtgactaatgaagatattaagcgatacctgacagcagaaagagatgccatgaaaacaggatacagtatcaaaacatggaaaatgcggctcttttgtccggaaaagcagatgatcgaaacaacagaagccctgtatcgggaagcagtagccttttactatgagctcctgaaagaaagagaagaactctgggccgaaaatctgctgaccatccagggacatctggaaaaacttaccgttcccggaagagacggaagagaaccgaagtacatcccaccaggcggaaagctccccgtttactttcggagatctgccatgaacaaagctgcaatggcagtaaagaccgcagcaagcgcagaaagcttccccgaaaagatcgatgccaacatcacctttttcaagggaatgtacagagacctgacagacacctccgtagtgctgaagctctggaacggaaagaaatggatctgggtaccctgtggacttacaggacgcccattcccgaaggaagcagcaatcctgtcaccgacactggtccatgaggaaaaatggctcatgttccatgtacctgtcaagcaggaaaactccgatgcccggacagcaaaggaacgaatgcaggaaggcaccagagtatgcagcgtccgctttaccaatacggacagctttgcagtatgcacagttctggatgaaggatccagacagctggctgtaaaaaactgcagaggcggaaatgcataccgacatcattgcagagctttgttgaaaaaagtagaagcatccagggcatttaccgataaagacaacgtcagtcagccaaacaggaaatattacatgcatctcaagcacctgaatgaacattacgcacatcaggtcagcaaggagattatggatttttgcaaagaaaatcagaccgggatactggtactgccggagtatgatgaagatttttccaggatatccatgtacagaagcggcaattattcgccccttcacttaagtatccgcatccggaattatctgaaatacaaagcctgggcagaaggaatcctggtacttgagctgcgcgccgacggaacagaaaagcaatgttccatctgcggagccaccggaaaaaaacaaggtagtgtattcatctgccagaatggccatcaggtcaaccgcttcctgaacggtgcccgaaacctgggccgcaaatgccaggaaagcttccggaaaaacaacaaatcaagttaataagcggcagaaatgcctcttatatataaatgctgagcaatcagcaagagaggaagcgccagtgacgcttcctttccggttgaataccgccaggcggcccaacgcaggcgtcgccgaagaactgtgccttttggtgcggggtgtattcgaagttataagaatgaagagtagttaaaaatatat

SEQ ID NO: 263 - DNA, 446 bp, Unknown
  gut microbiota DNA sequence
cgagtcgggtttgtggagtttcctgtaatggaaacgtcaacgccctctttccacatgatcgcaacaccttccggaacgctgttagcgccgtagcagttaacctttgcacgaagtccctcagaataggatttacggaatacttccttaacctcgttcttatatggatcatactctgtctctacatatgtaaagccgttgatacgggagatgatctgagcagcatcttttccaagaccgttcaggataacacgaagaggttttttacgaaccttgtttgctttctcagcgataccgatcgcaccctcagctgctgcgaaagactcatgtcctgcaaggaaacagaagcagtctgtctcttcctcaaggagcatctttccaaggtttccatgtccaagacctactttacgtgtgtctgcaacggatcccgggatacagaaagcctgaag

SEQ ID NO: 264 - DNA, 26255 bp, Unknown
  gut microbiota DNA sequence
gtacgtcccgtctatttggtgaaacggtacatctttacatcatcttaatagagctttgcacctgctggaatgtggttatcaaccatgatcagatgcagttcttcatcttctgagtctttcagattatttactgctgataataacataccgcaagactcaattcccatcatctttcttggtggaaggtttgtgatggcgatcagtgttttaccaaccagttcttccggctcgtaataagcgtgaataccgcttaaaatcgtacgatctgtgcctgttccatcatcaagagtgaactgaaggagtttctttgactttggtactgcaacacactctttaacctttacagctctgaaatctgacttgctgaatgtatcaaaatcaacttcttcctcaaataaaggctcaatctttacattagagaaatcaattttttccggctctgctttcatttcttcggcagcctgattttttacatcatttttcttatttacatcaccgagtgacttcattgtcgggaacagaagtacgtcacgaattgcctggctgtctgtcaggagcataacgagacggtcgattccgtatccgataccacctgttggcggcataccgatctccagtgcattcaggaagtcttcatctgtgtggttggcttcctcatcacctgcgtctgcaagagcatcctgtgctttgaaacgctctctctgatcgatcgggtcgttgagctcggaatatgcgttacacatttcccatgtattgataaagagctcgaaacgctctactttgttcggatcagaaggtttcttcttggtcagcggagagatctcgatcggatgatccatgataaatgtcggctggatcagctctttctcacagtactcctcgaagaagaggttgatgatatcacccttcttatggcgatcctcatactcgatatgatgctcgtcagcaagcttcttggctgcctcatcatctgctacttcgtcaaagtcgattcctgcatatttcttgatggcatcgttcatggtcagacgtgcgaaaggctttccaagatcgatctcgataccattgtaggaaatctttgtggaaccgcagaccttctctgcaaggtaacggaacatggactctgtcagctccatcattccctcataatcagtatatgcctgataaagctccatcagagtgaactccggattgtggcgggtatcaacaccctcgttacggaatacacggccgatctcgtaaactctctcaagtccgcctacgatcagtctcttaagataaagctccagggaaatacgaagcttaacgtcttcgttcagtgcgttgtaatgtgtctcaaatggtcttgcagctgcaccgcctgcgttggaaaccagcattggtgtctcaacttccatgaagtcacgtcctgcaaggaagttacggatctccttaaggatctgggaacgtttgatgaatacattcttgctgtcctggttcatgataagatccacatatctctgacgataacgggtatctgtatctgtcagtccgtggaatttctcaggaaggatctgtaagctcttggaaagaagagtcatcttctctgcatgaatggaaatctcacctgttcttgttctgaaagcaaatccctccagaccaaaaatatcaccgatatcagatttcttgaaatctgcataggaatcggttccaatggcatctcttgccacataaacctgaatgttaccctgtaaatcctggatattacagaaagaagcttttcccattacacgcttgaacatcatacgtcctgcgatcgatacgtggatcgggcttgcgtccatgatgcttcttctttcttcataatccttcttctgagcctcttttgcctgctcttcatcaagacctgttacatcaagctccttgcgatctttgagaagctctgcctcatgtgcttcatagagattctttacctcaagggaatgatgtgtctgatcaaattttgtgatctgaaacgggtccctgccatttgcctgaaggtctgccagtttgtcacgacgtaccttcagcagctggtttacatcctgcttcttctgctctgccacttgttggcctccttaatctatctgtcgttcaagcggatctctgcgatccgctccgttgtctgctttatacgtttctctgaatctcaagaaccttgtatttcatgattccggacggcatctcaacctcaacgatatcgttggtgtgtgcaccgatcagcgctttacctaccggagactcattggagatctttccctcaaggctgttagcctctgtggaacccacgatcttcagctccatgtcttcctcaaactcataatcatgaaccttaaccttgcagcctacgctgattctgtcaagatcgacttcgtcctctactacaacctctgcgttcttgaggatcttctcaatctcctcgatacgtgcctcgatatctctctgctcatcctttgctgcatcgtactcagcgttctcggaaaggtctccctgctctctggcctctttgatctttcctgctacttcttttctcttaacaactttcagatcgtgcagctcgtcttccagttttctaagtcctgcatatgtgagtaagttcttctttgcttcttccattttgccttacttcctttcaaaaccgcgctgttttttctgaaaaaaatacagcttcggatatttctgttgctaccattcccaagagctcttttttctaaaaaagggcgtaaaaatctcaggatattcacaattcctgtattataccgaaaagccccagtattgtcaagcattccacgtcgaaaaaggatccctgaagtatgtaaaaaagccgcgcgaaatcccagatttcaacacggcttttctgtattatcctgcccggtctgattccttatttcttctccggaaaaaggtctttataacgattagtcaccatctgtgtctgatactcaaaatcctgcttatgctgattgaccagtgtagaaaggatgatcccggaaaaccagcagatgatagctgtcaggatcacaaacccgctgacgatcagtgtcgggatcttttccactgtcccaacctccagaaaatgtaccagcaccggaataaagaatgccattcccaccacaaacagcactgctgcgataagggagaagaactccagcggcttgtaattcttgaacattttcacaatagtcttcagaaccttaaatccatctgcataagtattcagcttggactcacttccctccggtctgtcacgatattcaatgactacattctcaacctgcatgttcttatcgatggcgtggatcgtcatctctgtctcgatctcaaaattcctggaaagtacagggaatgtttttacaaagcggtaactcatggcacggtaacctgtcatgatatccttgatgttgcttttgaaaagacggttaatggaacctcttacgatgctgtttccaaagttgtggaaaggtctcttgttctctgtaaaatatgtagaagaaaggcgatcaccaactaccatgtctgtgcctttctccagaaccttgctgcacatttcagctgcaaactctgccggataagtatcgtcaccatctaccataagataacactgcgcatcgatatcccgaaacatactgcggatcacgtttccttttccttgctgatgctcataacggacaactgccccttcttttctggcgatctcgtctgttccatctgtagagttattatcatatacgtagatcacagcttccggaagtgcttttttcatatcgcggataacctttgctaccgtcttgctttcgttgtagcaaggaattaaaactgctattttatctgccattatttttctcctgtaaaacaaaaaactttctgcggattcccgctaattgactgtagcacgcgccccgttccttgtcaatagaacgttttgttttctccgacatacttttctcttttatcgccccagtaccatgtctgtaagctttttcagctcttcatagcttgaaatattattagattctctccggattcccgcactgtggcgcataccggctgtataccatgctacatgtttccgcatttcacggattccggtatactcacccttgatcgcgatctgatcttcggcatggcgcaggatcatctcgcatacttcctctgcggttggcctgggaagcttttccccggtgcggaaatagtggttcagttcccggaagatccacgggttcccacgtactgcacgaccgatcatcacagcgtcacagccagtttctttaaacatggcttctgcagtttccggagaaacgatatctccgtttcctatcaccggaatagtcaccgcttccttcaccctgcggatagcatcccagtccgcctgaccggaataatactgctgtctggtccttccatgcacagcaatagctgctgcgcctgcatcctccgcccgttttgcgatctccaccacatccaccggtgtgttttcatcaaatccgatgcgtacttttaccgttaccggcttggaaaccgccccggaaacgctccgtacgatctcttcgatcagcttcggatttttcagaagcgcggaaccctcgccgttatttaccaccttgggaaccggacatcccatattgatatcgagaatgtcaaaaggacgctcctcgatgctttttgccacctctgccataagatccggctcgctgccgaaaagctgcatggacaccggatgctccccgggatcgatctccatcagcgcctcagtattcttattatgaaaagagatcgccttggcactgaccatctccatacagatcaggcctgccccctgctccttgcaaagtcttcgaaatgccagatccgtaacacctgccatcggggcaagcacaaaggggttcggtatctccacatttccgatcttccactgcatcttcatggatcagtcctcaacggcatctgcttttttctgcagttcctcatccgggatatctcccaggaaaaataccttgtaatacatttccagagattccagaagctctcttttgtcccgctggagttccttgatcttcagtgcacttccgatctcgtcaaaacgggcatctgcctccagggcctcagtcttaaactgcagactgccatcctcatcaaattccagtgtcaggattcctcctacatcctctgtgaaaagcacacacatgatctgcagctcctgctttaccgtctcaggaagagacgcaaaatcctggttaaaataatatttctgctcataagaacttgctccgcagagcacaatgttatcctgatacataaaatctcctttatttataacttgacactccccacagctaaagcagggagattcttgttttttccactactgtaataaaacatcaacggaaaatcgctgccggaaattttatccgatctgtgctgcatgttttacacataactgtataaaccacgtacagaaacctctccggaatttacttcctcgactgtaccgtctgcacgctctaccagaagctctccgccggcattgatccctcttgcgatcccctcatatggatcattctgatccagtacacgtaccggctggttcagattcgccagcattttctcataatccggcttcaggccgctgagatcctctgtctgtacaaatctctcataattttcctcaaaatgcttcatcacaagcccgactacctgtgccctgtcaaagggatgtccgctttccagatacagagaggtggccttgtctgccatttcttccggaaagcttttcatatttacgttaattcccactccgataactgcacagccgatcttatcctgcttcatggtcatttcggttaagataccgcagatctttttgcgggaaacaactacatcgttaggccatttgatccctacatcgagtccgatctctgctactgcctgtgcaactgaaagtcccataacaagtgtcagcatcggcgccttctgcggggaaaatttcgggcagataaggatactcatagtaatggcactgtccggcggcgcactccatcgtcttgtaaaacgtccgcgtcctgcggactgatattctgccacaaacagctctccgtgtcctgcgccttcttccctccaggcacgttttccccagaggttggtggaatctgtttctcttgcaaaatggacggttttgcccgcccattttgtatgtgttgcctgtgaaattatttcttcattaaataaatctgacattatttctccggctctcctaatgttgcaacgatcacagccttaatggtgtgcatacggttctcagcttcgtcgaataccttggactgcggagactcgaatacctcgtctgtaacctccatatctgtaaggttgaaacgctcgcccatctcttttccgatctttgtcttaaggtcatgaaatgccggcagacagtgaaggaagatcgccttttcaccggcgttctccattacatgtctggtaaccttgtatggtgtcaggtcgtggatacgctctgtccatacttcgtcaggttcgcccatggatacccatacatctgtgtagatgatatccgcatcttttgttcctgcctccacatcctctgtgagagtgatggtggaacctgcctcttctgcccactgctgacactgtgctacaagctcatcattcgggaaatatttcttattggtgcaggctacgaaatcaagaccaagcttggagcatacaaccatcagggagttacccatgttgtaacgggcatcacccatgtatacaagcttcagacctttcagtctgccgaaatgctcacgtactgtcagcatatctgcaagcatctgtgtcggatgatactcgtttgtcagaccattccataccggtacacctgcatgcttcgcaagctcctcaacaatatcctgaccgaagccacggtactcgattccctcatacattcttccgagaactcttgcagtatctgcaatgctctccttctttccgatctgggagcctgtgggatccagataggtagaacccattcccagatcatgagctgccacttcgaaggaacagcgtgttcttgtgcttgttttttcaaagatcagagcaatattcttgcctctgtagtactcatgaagctctcctacttttttcttggccttcagatctgctgcaaggtcgatcatgtaagtaatctcttccggtgtaaagtctttcaatgtcaggaaatttcttcctttaagattcataatatgtcctcctcacggctgcagatctatttctgctctgccgttttatctgtcatgacttccttcagggatgttgccagccctgcgatgccctgtatctcggacggaatgatgatcttcgttgccttgccgtcagcaacctttgtaagagcctccaggctcttcagcgtaagaacagattcatctgctcctgcttccttgatcatacgaagtccttctgcagttgcctgctgtaccttaagaactgcctgtgcctgtccttcagcctctttgatcatacgctccttctgagcctcagcatgaaggatcgccgcctgcttctcagcctcagcatccaggatagcggactgttttttaccctctgcaacaaggattgtggaacgtttctctccttctgctttcagaatagcttctcgtctctcacgctcggccttcatctgtttctccatggcatcctgaatggctgccggaggaatgatgttcttaagctccacacggttaaccttgattccccatggatctgtagccacatcaagggacgcacgcatcttggtattgataacctctcgggatgtcagtgtctcatccagctccatatcaccgatgatgttacgaagtgttgtagcagaaagattctcgatagccatgatcggattctcaacgccatatgcgtaaagcttcggatctgtgatctggaaaaatacaaccgtatcgatctgcatggttacattatctttggtaattaccggctgcggtggaaaatccacaacctgttctttcaggtttactcttcttgcaacacgctcaatgaacggaaccttgaaatggattcctgtactccaggtagccttgtaagcaccaagacgttccagtaccactgcataggcctgtggtacaatgcggatgcaggatgcaagcacccacagcacaagaacaatgactacaagcaaaacaacaactccacccataatttagccctccttgctaagttcttttacgatcagcttcactccgcggatctcttcgatctcaaccactgcacctgttggaatttcttccccgtcatctacggtccgtgcagtccactcgatgtcattgatcctcacctgcccggtctgggccaggttgttgaccgtctgtatcactacggctctttttcccagaagactctctgcattggtcttttccacgcccttgttcatgtagcggaccgccagaggtctggtaaagatcagaagcaccacggaaactccgaaaaataaaaggagctgtacaacaattccccctccaagccacgaggcaatgcacgccacaaatgcaccgcctgcaaaccagacagtggtaagtcctaccgtgatcgcttcaattaccagtaaaattgccagtattccaagccaggccaaaggtgtcataaaacccctcctctcttattctcttctctgtcttgcagcttcgtacatcagaattcctgatgccatggcagcattcagcgattctacctttccgcacatgggaatgcggatcagacagtctgctgcctccgccgcctgatcagtcaggccctttccctcgtttccaatgaaaaatgcggtaccgcccttataggattcctgatcataggaattctcgcccttcagatgagctgcaaaactgcggatttccttttctttcagcttcttctctaatgataccacatcttccacatatagaaaaggcattctgtaaatggagcccatggtagaacggatcaccttgggatttgtgatatccacgcaggtttttgtgaggaaaactccgcttacgccggcgccctcaccggtcctgagaatggttcccgcatttcccggatcctgaagatcctccaaaaccatgaccagaggattttctcctgccagtacctcctcctcgctccaggaaggcagcttcagaactgtcaggattccctggggagttttggtatcacacatctgacggaatacagaatccttcacgatctcacagggatatttttctgcctgagacatcagctctccatcccgggaaactgtctcggagacaaacacctgggaaacccagctttccggtgcttccagaaacattttccggccctctgccacaaaaagtccctgctctcttctggcttttgccttctggttcagctgcatgacattttttatttttgcatttgatacactggttatcatacttttatttctctccttccggcaatccgtattcggttaacgtaattcctcacgacttgcattcagatctttgttttttccgatggcgattatggaacagttgtccggaagcggttcggaaggatccagatctaccgtgacattttcaccttgcttgatgccaatgatattaatgtgaaaacgctcccgtatattcagatctaccagattttttccgatccaggataccggcatggaaaactccgccatactgaactccgccgaaagctcaaacacatccagatacccgccggacataagatttctggcaactctcagtcccatggactgttccggataaatgatcttatctgcaccaattttgtcgagtatacgtccatgaagagaattcatactttttgcaactacaaaggacactcccagatccttagcctgcatggttgcggaaatactggcttccagattttcggcaactgcgataatggctacatccacattctgaactcccagagccttcaggattcccggttcacggacatctgcttttaccgcataggttactttttcggaaatctcttcgatattttcttctttgtcatcaatggcaaggacatcacagtctgactctgccagcgtcaccgccagagtcattccaaactgtccaagcccgatcacggcaaaagatttatttttcattctattctcctgtttaaccgatcatgatatcttcttcaccgagatgcgtggtgcttcccggcctgttgcgtacacgcatcacaactgctgttccaagtgtcagcggtccgatacgtcccagatacatggtaaggatcacgatccacttgcctgccacattcagctgaggtgtcagtcctctggaaagtcctactgtagcccccgcagaagtgatctcatataaaacatctgccagatccactcccggcattgctgcggacagaagcaccgtcatggtaaaaaggatcagtacactggttcctgcaacaaccatggccgaacggagatagctctcacggatcctgcggccgtatacctctacatccttttttccctgaagatatgctgcaatggaaaggatcagaaccgcaatggtagtagtcttcacaccaccggcagtgcccatgggtgatcctccgataaacatccacagcagggaaatgatcactgtaggtgtggacaaaagcgcctgatccatggtataaaagcccgccgtacgtgttgtcactgactggaaaaaggatgccatgatctttgttcccagtggtgcccccttcagcgtggcagggtttccggattcaaaaataaataccagaaatgcccctgaaaataccaggatcccggtcatcgtaaggaccagcttgctctgaagccgcaatacacgaaaaactctggatggggaaagctcttttctcagaaccttgcggaatttatcccacagatcccaccagacgataaatccaagacctgacacaatgatcaggccaatcgtagtgatattgaccagcggattgctcacatataccgaaaggcttgtttccccgaaaagatcgatccctgcgttgcagaatgcagataccgccagaaatatggcatgcaccagacctttttttattccaaattccggtacaaagcaaaacgcatacaggagcgcaccgattccttctgcaagaaacacgcatttcaccacactgcggactacagacacgactccacccatttcatccaggttataggattccttgatgatccgccggtttttcagggagattttccgccggaggctgatgaatatcatatttgccagtgcgatcagtccaatcccgccgatctgtatcaggcacaggataaccgcttttccaatggggctccactgaactgccatgacaactgtggaaagtcctgtcacgcatacgctggtcgccgctgtaaaaacagcatccgggaaggtaacagcctgcccgggtgcgctgcagaacggcagccataaaataagtccacctacaaaaatcacccccgcaaagccgagggcaattatttgtgacgtattcagtttatgcaatccgtctgaaactttttttaagttcataaatatttttattttctgtaattatgagaaagagaattgcagacctcccacatgtaggaatctacattcttctgcattgcaagagcctcattgatgtcgaaatcaacaaactcaccatgacggtatccaaccacacggctgcgttttccggcaacaagaagatctactgcgagagcacccatcatggacgcatatacacggtccttacatgtagggcttccaccgcgctgcatgtgaccaaggatagttgcacgtgtctcgatgcctgtcgcagcctcgatacgtttcgccatagcctctgaatggccgatgccctcagcatttacgatgatatggtgtttcttgcctttcttacgactctctacgatattgtcaataagcttctgctcgtcataatcatatttctccgggatcaggatatcctcagcaccgtttgcgataccgcaccatactgcaaggtatccggcgttacgtcccataacctcgatgatactgcatctctcatgggatgtggatgtatcacgtaccttgtcaatagcttccatagctgtatttacagcagtatcaaaaccgatggtgtactcggtacatgcgatatcaaggtcaatagttcccggcaggccaatggtgttgattccaaggttcgcaagcttctgagcacctgcgaaggaaccgtctccaccgataacaacaaggccgtcgatcccatgctttctgcagatctctgcagcctgctgctgtccttcctctgttctcatctctgcacatctggcagtataaagaattgttccgcctcgctcaatcgtatcggaaacatcctttgctgtcatatctctgatctcttcatttaagagaccgctgtatcctttatagattccctttacgttcagtccgctgcttaatcctcttctgacaacagcacggattgcagcattcattccaggtgcgtcaccgccactggtcaaaacgccgatcgttttgattttgttctctgccatattgttatcctccatcttatgaaacaacctattgtaatacacatattcgggtatagtttatagcatttttataagtttttcaatactctctccacaattttaacattggaacttccatatttttcacacatgcgttccagccaggaatcctcgatatggacctgataagcaggaggaagtttcttcattgccttgacatctttgagataaataaccaccgtgctgtttcctctggattccatcagatcgtctaccagaccggtttcggcttttgcgtactcttcccggctttcaaactggagccacagttctcttggcatatcatcaaaaagacggaccttttccaggatcagcttactggctttgtcgtcttctgcggatactcttccctgaataaagagccgggcatcttcattcaggaacatctggcatttttcgtaatcacgtggaaataccacaacttccacggtgcctaccagatcctccactgtaaggaacgccattaccttattattctttgtatattttatggttttatccgtgatcattccgcccacgatcactttctgattatcgtaaacctccggtatccctgtttcatcatccggctgaaaatcagaagtttttgcagagatcattttttccatcatattccggtaacgctccagcggatgaccgctgagatagatgccgagaacttccttctcaaaggtcagtatcgtctccttcggatattctgctgcctgcggcatacggatctcaaattcgtttttatcttcttcaggcgcaatatcaaaaagactcagctgtcccgccatggtatgcttcttatcctggttgatactgtctatgatctgcgtataaaccgtcattttctgattccggtttccctccaggcaatccagcgctccggccttgatcagattttccacaaccctcttgttgatctggtcgatatttcgctcaataaatgttttcagagaggtatattctccgtgctcctcacgctcccgcacgatcccctcgattaccggacggccgatgctcttgatggcagaaagtgcataacgaatggcaccattgtcaacagaaaagccataaacaccatgattgatatccggcggaaggatccggatccccatctggcggcatacagaaatatactcggcaaccttgtttggcatttccacaacggatgtcatcagtgcagccataaactctaccggatagtaatatttgagatatgccgtctgataggagaccaccgcataagcggcagcgtgagacttattgaaggcatactttgcaaaatctgtcatctcatcgtagatcttgtttgcgatctcctcggaaataccgttggcgatacatcccggtactccctcttcggcatttccgtaaacgaaattctggcgttcttttgccataacagaagcttttttcttggacatggcacggcgtaccaggtcacttcgtccaagggtatagcctgcaagctcacggacgatctgcataacctgctcctggtatacgatacagccataggtcggcttcaggatcggctccatctgtggacaatcataacggatggtatccggacggttttttccgcggatgtactgcggaatgaaatccatggggcccggacggtaaagcgaaattcctgcgatcacgtcctcaagactctgcggcttcagttccttcatgaagcttttcattccggcgctctccagctggaacacgccgtcagtacgtcctgttccgagagaatccagtacctttttatcgttgtagtcgatctcttgcatatccagaagcataccggtgcttttttccaccattttcacagcattctgaataaccgtcagggtacggaggcccaggaaatccattttcagaagtcccagctcttccagtgttgtcatggtaaactgcgtgacaatggaaccatcctgtgctctggaaaggggtacgtattccgatacatccttctggctgatcacaacacctgccgcatgcatggaggtatgcctcggaagcccctccagacgttttgccagatcgatcagacgatggatatcgtcctgttcctcgtaagccttgcgaagctccggattcattcccagtgccttgtcaatggtgatattcagctcctgtgggatcatcttggcaatagtgtccacctgggcataaggcatatccagaacacggcccacatcacggatgacaccgcgggctgccagcgtaccgaaggtaacgatctgaaccacgcagtcatcaccatattttcttcttacataatcaataacctcctgtctccgttcgaagcagaaatccacatcgatatccggcatggatactcgctccggattcaggaaacgttcaaagagcagatcataccggatcgggtccagctgggtgatcccaagtgtataggcaaccaggcttcctgcggcagaacctcgtcccggaccaaccatgatatcgttgtccctggcatatttgataaaatcccatacgatgagaaagtaatctacatatcccatatttttgatagtagacagctcataatccaggcgctttttcagctcctctgttaccggatgataacgctgctcaagtccctcatagcaaagcttgttcagatattcccatgaggtaagtccgtccggcacatcatatttcggcagcttggtcacaccaaattcaatctccacatgacatctctccgcgatcttatgcgtgttttccagcgcttccagcgcatatggaaaaagcctcgccatctcttccggcgatttcacataatactggccgccctcatagcgcattctgttctcatcgctgagctttttctgagtctgcagacaaagaagaacatcatgtggttccgcatcctctgccatagtgtaatgcacatcattggtggcaaccagatcgatccccgtctctctgtgcatacggagaagctgctgatttactgtctgctgctccggaatcccatgatcctgaagctccagaaagaaatttccttttccgaaaatatcctgataacgtaatgccacgatcttggcatcctcatacattccacgtgcaagatatctggcgacctctcctgccaggcaggcacttaaggcaatgataccctcgtgatatttttccagaagctccagatccacacgtggcttgtaataaaacccttccacaaatgccttggatacaattttcatcaggttgctgtatccctgattattctcagccagcaggaccagatgataataacggtcatccccacttcccacttctctgtcaaaacgggagcccggagccacataaacctcacatccgaggatcggattgatcccggcttctcttgcagccctgtaaaaatcaatgacaccatacataacgccatgatcggtgatcgccgcactgtccatacccagttcttttactctggctacatattctttgatcttattggagccatccagaaggctgtattctgtatggacatgtaaatgtgtaaactccaaatttattctccttatcgtaaaaaacagggctccggatcctccccgctctgcacttttctctgaacgtgccggagcgtgtctgatccggagccggtcaacaccttgttattttttaatgtagattctcttgtcacggatctctacttttccttccttcatcagatgaccgactgcacgcttgaatgcgttcttactgaggccaaactctctcttgatgacttccggtgaggcatgatcatcaaatggcagcacccctgcaaattcctcgatcacgctgaatacgctctctgcatcctcattgatctggatgtaagccttctggcggtcactgacattcatcttgccatcctctttcacctctgtgacacgaagatcaagaatagctcccggtctgtacttgcctgttgcctcccgtgccgggatcagagcggaatatttatcatctaccgcaacaaaaacgccaaaattcccgctgatctcatagacacgcccctttaccaaatctcccggtacataaggagttctggtggaaagataatgatacaccttcatggttgcacagagtctgctgctcttatccacataaagagctaccagacactcctcgccttcacggacccggttggtctgctcatgatacggaagaagaagatccttctccagtccccagtcaagaaaagcaccgatcctggtgacctgttttaccttaaggactgctgtctgtcccacctgaagcatcggctcacgggtcgttgcgatcagtctgtcctgggaatccttatagatgaatacttcgatctcatcacctgctttggttccttccggtacctgtttggacggaagaagcacacgctcggtctgaggtgcgtttcggtcctctccaagatatattccgaaatccacggtttttacaaccagtaatttctgttttttacctaattctatcattcttactcctgttccttaaaactatatatgatcatttactatttgctgtctgtcctgcattataacataagagaattattatagaaagcacaaaaaaggcagcttcggaaatttctttccgtcactgccttttatttgcgattcatgggggaacctgcccccacattgggttagtctgttattctgttggcttctcaaccggcatcggattcatcattttaatgacaaaaagtacgatcagcatcagcacgattcccaccggaagagcgatccatgctgtttttacaaaacctgcaacaatataagttacaaaggatactgccgcagccaggatcgcatacggaagctgtgtggaaacgtgagtcacatgatcacactgtgctcctgcggaagccatgatcgttgtatcggagatcggtgagcagtggtctccgcaaactgcacctgccatgcaggcagacatggaaatgatcatcatctcaggactggatttctcaaataccgcaacaacgatcgggatcaggataccaaaggttccccaggaagtacctgtagcaaatgcaagtccacatccaaccaggaaaataatggccggaaggataacttcaataccaccggcaacagaacgcattgcttcttctacgaataccgctgcaccaagtgagtctgtcatagccttcagtgtccatgcaaaggtcaggatcatgatcgccggtaccatagccttgaagccttccgggatgcatcccatacagtctctgaaattgatcacacggcggatcatatagaaaataatggcaaataccagaccaaaagcacttcccattgcaaggcctgtagaggcatcactctgtgaaaatgcggtaacaaaatctgttccgctgaaaaatcctcctgtgtagatcatactgatgacacagcagataacaagcacaacgatcgggatcacaagatcgatcacctttcctctcggattcggtgtctcatcatccgttgcattctcatacggtcttgcagatgttgtataaagatctccgttcagcgcattgatctcatgtgttctcatggcaccaaactcggttttcatcagtaccatgccaaccatcattacaatagtaaggatcgcgtaaaagttatacgggatggttcttacaaaaatcgcaagtccatcctgtccctctacgaatccgctgactgctgccgcccaggatgagattggtgcgatgatacataccggagcggctgtcgcatcgatcagatatgcaaattttgctctggatacgtgatgtctgtctgttaccggacgcataacgcttcctactgtcaggcagttaaaataatcgtcaataaagatcaggactccaaggatgatcgccgcaagctctgcacccacacgtgtgtggatctttttgctggcccatcgtccgaatgcggcggagccgccggccttgttcatcatacataccacagatcccaggataacaaggaaaatcaggattcctacgttatagctgtcagaaagaaccttgatgattcctccctcaaaaatctgtgttacggttccctcgaatttaaaaccggaataaagcagtgctcctactacaattcccacaaacagagaactgtatacttctttcgtgatcagcgcaaggatgatcgctacaagaggtggaagcagtgcccagatcgttgcatacagagcaggctggtaagtctcctccgcatccgcagccagcacagtcagaggacttgccagtgcgcccatgaatatcattgccataacagacaatgctgttcctgcttttttactcatttttctcctccctttttcggggacaaaaaaacggaggctgtctcttcttaagaacacctccggttaaataatccttatttaacttatagcctgtcagaaaatctccattcagcatattaaatgcagatttcccgaagtgctaccgatagcgctccacatccgtgacagtacaacgcatattctacgttatcccagcaccctgtcatctggccttccagagcacttcggcagattttcctttctttatgaacagcctgccagggccttgcatccataaatactgataaaatccgcgcctctatcttcttatccgtgaccgtttgccctccacagggcttcccggccgtctttttttctttatactgtagcagtttccgacataaatatcaagtagtttacacagattcctgccagtcagaccaatattgtgctacttttcactccgttctcagcggaatattaccagtgaactataatccaatattgccttatttactgctcgttcagaagccacttcacatccactcccagtaccttggcaaacacccgcagttcataatctgctacaaaacgttctcctccttcgatccggctgatactgtcacgctccagcatcactccttccacctgcatttttgcggccaacgcagattgcgacatccgtttcatattcctcatctggcgtattttttctccggaaacattcttttttccttgataagcgtatattttcatcctgccacctattttaataaatgtgttaatgttctgcatttttcttgacattagcacatatttcggcggcatctgtgttaaaggtcagcaaatctgacattttctgcatttttcgacaaaaaatgccgcggtactgttccgcggcatttccactcaggcggatattgacgatccaccatcgggtcaaactgttttttcttctgatcagtcttccaggtctacctgaccataatatgcatttgcaccatgttttctgtagtaatgcttatcctgaagctcctgcggtgccggttttacatccggattgatcagctcgcagcgagatgccatcttggcaacctcctcaagaacaactgcgttatgaactgcctcatgagcatccttaccccaggtaaaaggtccgtggttcttgcacagcacggccggtactgcttcataatctttgtttttaaaataatcagcaataagaactcctgtgttcttctcatatgcctcttcgatctctcttttggtcagattacgcacacatggtacttctccgtaaatgtaatctgcatgtgtggttccataacacgggatcgatctgcctgcctgcgcccagcttgttgcccaggatgagtgggtatgtacgataccgccgatattcggaaacgctctgtaaagaactgcatgtgtcggtgtatcagaggatggattgtatcttccttctactttatttccatcaatatctaccactaccatgtcttccggtgtcagcttgtcataatccacaccacttggcttgatcacaaaaaggccctgctccctgtcgatcccactgacatttccccatgtaaaagtaacaagaccatattttggcagatccatatttgctctgtaaacttcttcttttaatttttcaagcatagcgcgcctccttttacggtatagtactaatagtctctaccgcttgtatttattttgtaaactcaactactgcgtaaggttctttatcctctgcgttgagaactacagtttctttattttctgtcatatatacttccggaatgataacattatccagtactgcctgacgtttatattcagcacgaagctgaccgactttaaaatcctcaggcagatgatccgctgccatccggatatactgacagttgttcacatgatgattggtgtccagatgatgcttctgtacggaaaaagcattctgcacttcccgttccttcggaagcgcaatctttcttggtgcataatccatctctattttttcgcccagatcatagggatctgtatctattggtgtcagcttttccggaagaccggtttctgtattgataaaggaccagtaggaattggcccatgccagcttctcaccatccattgtctcaagaataaaattacgcattccgataaatccacggaatccataaggaattgttgttacttttatattttcaccaagctttggataccgcttcgtgattacctgccatgcagaaagtacccaggctcttttctgttcctttaatacttccataccgactcctgtctgctcggattcaaaggtacagcaatcctgaaaataatccagaactcccggcaacgtcaggcagccatcttctccgatctcactgaatcttactcgactctcaaaactgtaactcattcatgcctcctgttatactgtctatactttattgtaacacttggcagaaagaaacgcacttgtttttttggcgcagcggattgcgaatattctcagtgaacagcaacttgcaaatatcttcttatttttgagcacaaaaaaagtacctctcaaccgaggtacttaagaagcagggctacaaggattcgaaccttgaactgacggagtcagagtccgttgccttaccgtttggcgatagccctatgtgttttgtttttcgcttgccttatcgcttgcgacggatgttattatataacagcttttttgaaattgcaacccctttttttaattttttttatttttttcaaaatttctcaaactgctgttaaaactccctattatatgcgggtttacgcagtaaaaaaaattttacaatccactcctttgtgttataataagccgtataataaaaagagcggaaacaaccgtgtatttccctccggtcacaatatccggaggcatccaaaggagaacgctatgcgagcaaataaccttactctgctcacggacctctatgagcttaccatgatgcagggatatttcaaaaaccctaccaaccagaccgttgtctttgatatgttctaccgcaacaatccatgcgatggcggttttgccatctgtgcaggactggagcagatgatcgaatacatcgaaaatctccgtttctcagaagaagacattacctatctgagaagtcttggcatctttgaggatgatttccttgagtatttgagcaacttcagattcaccggtgatatctacgcaattccggaggggaccgtgatcttcccaagagagccgatggtcaaggttatcgcaccgatcatggaagctcagcttgtagagaccgccatcctgaacattatgaaccatcagagtcttattgccactaaggcagcacgtgtatgccacgcagccaagggcgatcccatcatggaattcggtcttcgccgtgcccagggtccggacgccggaatctttggtgccagagcggcagtgatcggcgggtgtgccggtacttccaacgtactgaccggccaaatgtttaacgttccggttctcggaacacatgctcattcctggatcatgagtttcccggatgagtacactgcctttaagacctatgcgagactttacccgaattcctgtactcttctggttgacacctacgatgtcctgaaatccggtgttcccaatgcgatccgtgtatttgaggagatgcgtgaggaaggtatccagctgaagaactatggaatccgtatcgacagcggtgatcttgcatatctttccaaaaaagcttacaagatgctggctgctgccggtttcgatgatgctaccatctctgcctccagcgatcttgatgaatatcttatcgaaagcctgaaggcccaggatgccaagatcaattcctggggcgtcggaaccaaactgatcacagccgataacaatccggcattcggcggcgtatacaaacttgccgctgtaaaggacgctgacagcgataccttccagccgaagatcaagctttccgaaaacacagaaaaggttaccaacccgggcaacaagactgtataccgtatctacagcaaaaagaccggcaagatcaaggccgatctgatctgccttgcagatgagaaattcgatccggaagaaactatggtgatcttcgacccggttgacacctggaaaaagaccaaggttcttggcggaacctacgaactccgcgagctccttgttccggtaattaaaggtggtaagagcgtttacaagtctccatctgtcatggaactccgcgactactgcaaacaggagcaaaacacactgtgggatgaatccagacgttttgtaaatccgcagaaggtttatgtagatctctcccagtcactctatgacatgaagaaggctctcctggaagaaatgagtgaaaaagagctctgataaacagaaataagcattcataaaccctcctttcttatcataagcttatggataaggaaaggggggtttttattgcacagagaattttatacccggctgatcagcagggagcatcctctgccggaagcctttgtgccggaacatctcatcgatatcggacttccatttgaagcagcaccgggagatccgaagcggcttctggagtatcaggctgcaaaagccgcttcccagcttttccatgcctgtcacagatgcggtctgaacctgtgggcagtttccggatatcgctcctaccagcgacagaaggagctttttacgggaagtcctttcgttgcagagccaggaacaagtgagcaccagagcggacttgctctggatgtatcctgcccttccatccatatggagctctccgaaaggttttccgcaacaggtgaaggtcgctggctgaaaaagaacgctccgctctatggctttatcctccggtaccccaaaaacagagaggagatcaccggtttcccttacgagccatggcacatccgctatgtgaccaaacctctggcttcctggctcactatcacaaatctgactctggaagaataccactgctttccttcacggtgtccgcaccctccctgatctgctgcttccggtatctgatatttatatacagctctgcagatatttttcctgttttctatgcacgccctactgctccatctgtctgccaagaaaaccggctgctgtgcggacaagtgcacgctccgtgtcacccattcccgctttttcgcttctggccagaaggatcacagccccgatcgcgtcgctggcacacaggacaggctgtatcatttttcgttcaaaagaatcactgtcatcgacaatgatggggatattttccctgctgctccgactgaccagtctgcattctctgccggcaatgactgcatccagatcagaactgatctctttgccttccagttcccggcttccgctgccgcatgccgccacgacctgatcacgatctgtaatacaggcagtcagtccggtggtctgcaccaatgcttccgcatattccgcagcaaacgtattcagctctccaatgggcgaatattttttcagaatgatctgtccttccctgtctgtaaaaatctccagtggcgttccttctttgatccgcagtgtctttcgtatctcttttggaatcacaaccctgcccagatcatcgatcctgcgaacaattcccgttgctttcatcttcctgaattcctcctgtattttctgttcattgtacatcaatgttatgttaactatttgtttttcatatggttattatgcgaaaaactgggagaaatatgcataaaaatctcttatttatctgtcgcaggagccgcattgtcgtatgcctgctgcagaaataaatcctgataaagtttttttgaaaataggggttgcatttttgaataatagtggtatagtattcgtatacttgatatgtagttttgaatactacatgttattttatcaatttctacgttgttgtgtcataaactgtcacaataatccatcattggtgaaccgatcatgaagttgtcaatatgatataaacagtagattttttgcaggaggtgtttttatatgaaatttaaattaaaagatccgggaagcgccataacccacggaatcggcatgcttcttgccgtggccggagccactccgctgatcgtgaaggcggccagaagcacagatgttctccatgtttttgcagtaagtgtttttatccttaccatgattcttctttacctggcaagcacactttaccattccgtaaactccacagccaaggtgaaccgccgtctgaaaaaaatggatcacatgatgatcttcgtgatgattgccggcagctacactcctgtatgcctgatcgttctccacggacgcaccggctatatcctctgtgccctcgtatggactgttgccatcatcggaatgatcctcaagggctgctggatcaactgcccgaaatggctttcctctgtgatctacattggaatgggctggctgtgtgtacttgcttttgttccgatcttccatagtctgccccgcgcaggcttcggatggctccttgccggcggcatcatctataccatcggcggtgtgatctatgccctgaaacttccgatcttcaatgcgaagcataagaatttcggctcccacgaagtatttcatgtttttgtgatgctgggaagtgtgtgccattttgttgtaatgtatttctttgtagccggtatggcgatccactgagttgctctgtaatcagatagataacaatctcaccttttggataccaaaaaaacttaaagccccagaacacggacagacctcaggaagtcgaaattatgacttctctgaagctgcctcgtgttccggggcttcttattatgtctgatccagcctgtaatcccgatgatctcagccgatggtcagtgtggaaagaccactgcagttaaaatatgcaaatgctcctatagtctgaacactgtccgcaatgtcaagctttacaagcttttcgcagtctgcaaatgcataggctccgatgctggtaatgccctccttgatccggacctctattatctggtcacggtatccgttccaggggacttcttccgcattttgccattcattcatggctccctgtcctgcgatctcgagaactccgctttcatcaaggctccaggatatggtattctcctccgctccgcaaaaaccgctcttttcttctgcctgatcggtttctgtttccatatcttccgatgctgcgttctcctcaaatgctgcttccggctgatcttcttgatcatccgggagcatttcctgcggaatatccgcttcttcattttccggaagctctgtttcttccggtatttctgatgtaccttgtgtttccggatcatccggtgctgccagctcatctgacatgtctggtgcctctgagatctcagatttattttccggttctgcttcggaaat

SEQ ID NO: 265 - DNA, 1985 bp, Unknown
  gut microbiota DNA sequence
cagaactgaaaaaaatcccggagtagaaatactttgggatttttttgaaaggttgacttttacacggtaaagtgtaatacttattgtaagtgacgaatgtgaggagtgttttttatgccggatgataaagtactgcaggtagcgatacttatatggggatgtgcattttgtgccatagctgcattatgtatgtttctgagcagtaattatgacagggaaaagcgtcggtatcttatcctgatggagagttttgcttccctgttattgctgatggatgccatggcgcatattttcagcggatatcccggagtttcgggcagtgtgatggtccgtatttcgaattttctcgtattccttttaagtgacgtattcctgctgtgttttcacatttatgtgtgtatttatttgttttcggagaaagagcggagaacattaaaaagagtaaaagccggatatgttattgctgccgcagaggctgcttttgtggtgatctcacagtttactcactggtattattacatagatggggataattattaccatcgggcaccgttatatattatgtcaattcttcttacggtagcaggtatgttcattgatcttacacttttgcttcagtacaaaaagagagtcagcaggaagctcctgttctctatgctgtcatgcattgtacttccggcagtggcggcagctgtgcaggcattccggtatggaatgtcgctgatcgatttttctgttggtatttccatgatcattatgtttattgtgacgatgacggagctgaatcaggaaatgtatcagctgataagcagagagggaaaaataaaggaaagacttgagatcgcaacgatactgaataaatgtattgcagagctgatatcaggagaagatgaagatgcggcgatccccaatctgctgcgcattatcagcgggtattttgacggagatcgcagttatattgttcagatcgatgaaaagaggaatgtctgtgtaaatacctatgagtatgccatgaacggagtgactgccgagaaggataatcttcaggaggttcccatggaaatgctggatatctggatggacagctttcggaaaaatggcctgtattatattccggatattgaggaggagcaggggcagccgtattatgagactctgaagatgcaggacattaccaggctgctggccgttcctttaaacagtgacggaaagatcataggatttctcggggtagataatccgagactgcattatgaggatcatacgctgctgtcatccatacagtactttttaacggacagcctgaaagccaaggagcgtaaggcgcgtctgcagtacatgagctaccgtgatatgctgacgaccttgtataacaggaacaggtatattcaggttctggaaggcatgcaggcaaaaacagtgataaaaacaggagtagcatatattgatatcaatggtctgaaacgggtgaatgatctttacggacatgaggccggagacaggctgatcataaatacagcgcgttccatgcttgcgattctgccggagaatgcttaccgggtaggtggcgatgaatttgtactcatctgttttgacatggatgagaagatttttcggagtaaggtcagggatatctgtgacagcattgctgctaaaaggatcagtgtttctgttggcgctgtctgggaggaaagctcttcggagcttgagaccatgctgagaagagcagatgatcttatgtatgaggaaaagaagaaatattatgaggaacatggagttgtttgaccggctggcacagtcgaaattccgcagcggtttttatctgaaagaaaaagataaggcttatgcagcagacaaaggcagagaaaaaatagaaaagcatgcacaggatttcatccgtatgcgtctggcgcctgcagtgatccccaatgacgggaaacagacgccgatgaaaggccatcctgtatttctggcccagcatgcct

SEQ ID NO: 266 - DNA, 16115 bp, Unknown
  gut microbiota DNA sequence
tagctgaagcaatgggttttacgacgcattggataagatccaaaagtcttaaaatcctatattcatttacagcaattcctgtacttttcgatatacaacctctgcaaatttcttatgtcctgctgcattcagatgttcctgatctgcgtcacagcaatgtacataggatgctgccggaaggaaactgatatgacgttcagctgcgattttttcataaacaggctgcagatttctggaaacgatcacagactctctggaaaactcctggtcatatccttcctgccatactttttctcccaggtagatcggagccatgagaaggactttcgcttttggcgcatattcctggacctgatccagcaatcttatgattccctttccgattacatctgcggatgctccgaaaacagttttacagtcattggttcccagcatcagcgtgatcacatccacctgggcatgtgtttccagaagtgtgggaaaaagtgcagttccttttcttccgtcgcggagcggatcttcgaaaactgttgttcttccgcacagtccctcctcgatcacacgatattcttctttattcagtttttcctggagaagacttgtccagcgtactccccacggaagtctccctctgctctctccgtcatatccccatgtattggaatctccaaagcataatatctgtttcatttcaccatatccctatctaattagtatgtttatttgttaggtgaatcatatcatgctattctcatttggtcaaatacacaaaaaaaatagcctgctatagtttgactctataacaggccatcttacatactcttttatatactttttatcagagattctttttacagtccgataaatcctgtaacatctccgttaatcacataatgtgcaccattatcttcgggtttaatgtagattttgagatctttcagttcagaagcttttttgcccatatcctctgtccagatctttttgatcctgtcagcaacttctgaagtatgtatctctttgccccagtactgaacatatacttctgtcactggctcagctttcttagatgctgtctttcttgttgttttagctgctgttgtcttagcagccgccttggttgttgttttcttagcagcagttgtttttcgtgttgttgtcttcttggcggctgttttcttagccggctcttctgattttacagctgttgttttctcttcatcagattttacttctgctgttttttcttctattggtttcgcagcagcaggttttacctctgctgtcttctcagctgcttttgtctctacagaagcttttgcatcgtctgtctttggtgtctcagccttaacggctttctcttcggatgcggttactacagattttgcaggagtctcgcttactgaagccgtttttacagttgtcttggttgcagctttctttgttctagccatgtttatagcctccttacaagggatttgttaatcttttctcgaattttaggatatcactttttgtgaaagaacgcaaggttagatccccagattttccagttcttcactcatataccccttgagatgctcctttaaagccttatgctgaggaaggataagatcaaaatccagtgccaggatctcaccagctgcttcacttgcattcttcaggattcccgcatcattgtagatatcaccaatcttaaattccatcagtccgctctggcggataccgaaaagatctcctgggccccgaagtttcagatcttctccggctatataaaatccatcattggattcattgaggatcttcagacgtttagaagtattttcttcattatttccctggataaaaatgcagtaagactgatgctctccacgccctacacggccgcgaagctgatgaagctgggcaagcccgaaacgttctgcattttccaccatcataacggtagcatttggcacattcactccaacctccacaactgtggtagataccagcacctgaatctcgccggaagcaaaagcctccatgatcctgtttttctcttttggcttcatctttccgtgaagaatctctatgctgatctctctcggcaggacctcctgaagctttcttgcataatctgtaacattctctgcctccaggccttcgctctcttccaccataggacagatcacataagcctgccttcccatctgcacctgcttttcaataaaagaatacgccttgggacggtaggaagttcctactacgcaattcttgatcggaagtctttttgcaggaagctcgtcaatgatcgaaatatccaggtctccgtataaaatgatcgccagtgtccggggaatgggggttgcgctcataacaagtacatgaggcggatttcctctggtcgtcagcgcttccctctggcgaacgccgaatctgtgctgctcatctgtgatcacaagccccagattcttatattccaccttttcctggatcagggcatgagttccgatgatcacattcacttcaccgtctgcaatcttctgatagatctcacgcttctgtctggctgtggtagatcctgtcagaagcaccggatggcaggaagcgatattctgttcttccatcagcctcagaaagccttcgtaatgctgatttgccagaacctctgtcggtaccatcagagcactctgaaatccattctctgctgaaagtaccatagctaaaaatgcgatcacggtcttgccgctaccaacatccccctgtacaagcctagacatcagcttatgaccgctcagatcccgttcgatctcatgccagacattcttctgggctccggtcaggtcatagggaagcccttctatgatctcctcggttgtccatactggtttcattggaaaagtgtttggagcctcttctgttttctccttcaagagctgtattgccagcacaaaaagcagaaattcatcgaataccagacgtttcctggctgtgagaagctcctgcatatttttcggaaaatggatagtccggatcgcataattggcatctgcgagctgatagcgttcccgtatctcctccggcagatattccccatggagaggccttgtatccaaaatctgatggaccaacttcgtgatcatcttgttggaaagtcctttcgtcagaccatatacaggctgcatactgtgaatgatctcctcataagctgccggggtaaaaatctccggatgttccatctgcggacggcctttttttctgatgatctttcctctgaggataaacacactgccctttttgagtgttcccctcaaataaggcgcattgaaccaggcaaccggcaatcggccgcttgcatctgccacagttgttgtcagaacctggagattgcgtatctggttaatataaatacttgttgctatagtggcacggatagagactgttttgtcctcctctgctgatgcaatctccacaggctcctcatatatatcgtaagtccgcggataataacggagaagctcttccgcagtcgtgatcccgatcttctggaaaagcttctctgttttctcacccacgccttttaattcacgtaaaggtgtcttatcattcattttttgtgctctttattctacagaaatcagatagtagtaaattggctgtccaccctggttcagctcaacctcgcactccggatatttctcggtaagagaatcagaaagtgcctctgcatcttcctcagatacatcttcaccatagtaaacactgatgatctcagaatcctcgtcaaccatctctgctaccatctcctccgctacctgaagtcgatctctgcctactgcaaggatacctgcatcaccgattcccatgatatctccctcatggatttccttgtcatcaatgcgtgtatcacggactgcataagtaatctgtccggtcttcactctggaaatcgcatcggtcatggaagcaaggttctcctcgccgcccttctccggaacaaagctgatcattgcggaaattccctgtgggattgtcttggttggtactacaatgatctctttgtcctcagtcagatctcttgcctggttagctgcaaggataatattcttgttattcgggaaaatataaattgtttttgcatttactttctcaatagcattgagcatatcttcggtacttggattcatagtctggccgccttcgatcagataatctacgccaagctcacggaagatctgagaaagtccctcacctacggatacggaaataaatccatgatcctttggaggttctttgttttctgcctgttcttttgcaagtttttccgcatctttgatcagtttttcctgatgttcttctctcatattgtcaatcttcatgcgggaaagctgaccatacgtgagtgcgcgttcaaaagcctgtcccggatgattggtgtgcacgtgtaccttgacaatctcatcatcagccaccaaaacaatggaatcaccgatggaatccagaaattcacggaaacggtcgatctcatcctgtggaagcggtttttcaagaaggataataaattctgtacaatatccaaatttgatatctgcctctgcctgaggagaaatctttgtgatcttaggagctgctgattcaaactgggaataatccacttcttttccatgatatccgtcgatggcaccacggaaaacttccagaagtccctgtccgccagaatccacaacacctgcttctttcaggactggaagcatctccggtgttctggcaagagtttcctctgcatgctgaaagatcccgtcgaaaaaagcatccagatcttctgctgcatcagcaagctctgcggctctgtctgctgcagctctggctacagtaagaatggttccctcttttggtttcataactgccttgtatgcagtttcaacgcctcgctccatagctgcggcaatggcaggtgcatccagatctgtaagtttacgcacacctctggtaaatccacgcagaagctgtgacaggataacaccggaattacctctggctccacggagggaaccggaagaaattgcctttgccagggattccatatccggatctgtaagagcacctacttcagaagcagcagacatgatggtaagcgtcatattggttcccgtatctccatcaggtacaggaaacacattcagttcattgatccactctttcttcgcttccagattctttgctccggacagaaacattctggaaagtattttagcatctatggttttgttattcaccacaagttcctcctctaaaactaatctattgcacgcacgccctcaaccataatgttgatcttttcaatctccattcctgtaaaggcttcgactttatattttacattgttgacaagattgtccgcaatagtactgatattcacgccatatgctacgatgacatgaaaattcagccggatcttattatcatccgtgatcttaacactgataccatgtttcaggctgtcaatacgcaaaagcttgaccaggccatccttcatactgatagctgccattccgatgataccaaaacactctaccgccacactgccggcataagtcgcaatgacatctgtatcaattacgatctgacccaatccggaatctatacgtccattcatatggttacctccattgtttcattcagattaaattatataaaaccattataaccttttttttataattacgcaatgatagagttcaacttgttttatcttatagaaaattaagctcatccactctattgaaggggaatccaggattgtgatggagcatgccaaccgatactatgaagccggtttttctttttcgtttatctacttataatccttttacaaactcaactgcattttttatatcttcttcatctggatgcccttttgcaattccaccaaccagtttaaatggaccaaatgtgtcataacccttgcacccgaattttcctattactttggaacgtttcttgtccaaaatctgctcaatggatttataattcgcacttccaccataagtacagatcagaaatacctttttgtcgtccggtagattcttctctgcaaatcccaataatgactgatgaaattttgaaaaatagattcctgatgcaaacccaatcatatcataactgctcacatctgcattgggttgttttacagcatcgatcaaatcgatctggcacgcttctgctacactttttactaatttttctgtatttccatgatgtacagatgcatatacgattgcttttctcatttgttttcctttctgcctacgccatcaatcaggtcataactcatgtccaaaaagtccagtatctttgctttactgaccgaaccatccagtaaaatcgtgatccagtgctgcttgttcatatggtatccaggtaaaaatccatgcgtctgaataatcaaattcgtcatgtccggatcccactttacatccatgatatcaaccgactcttttccttctaatcccagtttcgatttttcgacagtcatgatcactgcataccattttccgtttttatgtcggagtactgcactgtctggcgatttactccataaatattccgggactgttccgtactgtttctgcacatatttaaaaatttcttctttcttcacaagctattcaactcctgacgtttctgatatcctacctataatcataccacattttcggattccgaactacctgccaaattcttttgcattttcccgtttttcctatcctcatatgccagttcaacaagaatatgttctattccgattcaggaaagagaccaggccaaagaaaaaacgataaattaatttgcactgggtaattttctatgtttcaaattgatctaaaccatacacacaacgcttaattccaccatgatccgccctgttcccggaggtatggaatactttccttaaaactctttgcagaatttttgataaatttcctttttttgcttgcaaaagagcaattcatctgttaaaatggtgactgttgataaaaggaggtgctattcatggctaaatgtgcaatctgcgataaaggagctcatttcggaaacaatgtgagtcattcccatagaagatccaacaaaatgtggaaatctaacgttaaatccgtcagagtaaaaacaactgccggcggagcaaagaaaatgtatgtatgtacttcttgtttaagatccggaaaagttgaaagagcgtaagtaatatcgtatgcccccgtagaatgcgggggctgtttttttatctttaagacagataaatcacaagcgggaagtatgccaggtgcacacttcccgcttatctgcaaaacatatgatatccgcatagcagacatatgactgccattgcgatcacaataaaattctctgtaataaggataccaagaaccatgcccacaccaataaaaaacagcataaaaccagttagctttcccactcctgtctgctcatttcctgttttttattacagtatatgcatgaaatctaaatggaatactactcttctttcccgtctgtatcctcagcattgcctgcacctggcgcaaaacggttcacaaaatccggcaccatatccagaaccttggtaaggccatcctgattttttacgtttacaagtttggtgcttccattctggatcacaagtactgcacagggagacatctttccggcaagacctccgccgccgttattctttttatctccttcaaaagctccggctcccacgccgaaggatacatcgaccagaggaaggataatggtatcacctacatgaatggcatcgccaaccactgttttggccgatacaaagccatccattcctttaaataatgaattcacggtatctttgaaattattctctttctccatgttttacctccttatgtctccatcggtggatgacgtattttatatttttattgaaataaagctctgctgctgttttgagaactacaattccataaatccttccttttaacaggatctctccctcaagaacattttcatcatcaaaaaggggcgctacttcaatcttgtttttatgaaaaggaatcgtcattcctaatacagccaataccatacctgtaactgccggatcttcattgccaaataagatttttccggtgattcttgtcggaagcacatgataaatcagtttttttgcatttttccacagaaaggaaagagcctctctggttcggggatggtctaaaaattccttccaccagtttatcttatcacagaaattccggattgttaatgcaagactttgaatttttttcagaatccttttggggattccaagaaaattctgtatgattcggatcagctttccaactgccgtttttatttttcccactatatttgaaattaaatctgaaatctttgtccgaagcttcttttcatcttccgatatttcttcggaaatcgatatcggctccattattaccttttccgaaatttcatttatatcttcaacagtatcttcctgaggctcagacatttgtaactctgctgcatcgttctgctgttcgctttttgatatcttttcatgacttcgggaagcctctgtctgtttttttgcattttgatttccggagttggaaagagatctaggtttcttttttttacgaaacagatttttaaatttttccaaaggaatccctaaaaaacataattttgtttttagaacgccctgctcccagaatacctgtgcagaaattatatgaagcagccagctcacttcaccggtagcatgtatttcacgaagactatccgtacggtctttttttaatttccctctgtatctgatcggacagaataaaagaagcagcaggatcagaaagatcagcccgatcagaatccccagaaggatcaatatccattttattatcagccataatatatgcagcattggttcacctgtttttcagatattcttttattttaaaatttccagtttcggtataaacctgttcgatcatatcctgtaccatctgtatagcaccggattttcctctggccattccaacgatcaaagaacaggtggctctggcgcttcgctgtacaagcatgcctgcaggaagaatttccaaaatatttccgggattatcagacaaagtaacaacgtagatatccggcacgaatttgccagcagtgatcctggttcttattctagtaggattttttacatcatttcctatgtaatagtttttcatccatttcagcaatctgccctcacctccgttataatgccaaacagggctgcgtatgtacacagccctgtcctgttgttaaaaatacttctgctgtttcgcccagacgccctcacttcgcatttccagatactcctgataggcctgttccacgatatgcttctcgttggaaaaacggagaagatgatagatctcatgaaacttatagtatccggaatctacaaaatattcctctcgctggggtttgctatgataattatcagctatcatgagataccagtgtacctctttcattaccacgtcctccggaacggtgaaattatactggctcttaccgatatatttcacgatagaggcccgaacacctgcttcttccattacttcacgtaaagcagtctgttcaaaagtctctcctttttctacagttcctttgggaagcacccatccttcataacggttcctgtaggatttatacaatgccaggatcttaccccgatgaattaccacaccgccacagcttgttgcttctatcatattgcaatcctcctgtaatgcgtgtgtcttttgcactggctatagtatacctctttttcaccttataggcaaggggcaagaagcagatactgttctcaatttaatcgaaataatatgcatcaaaaacatcggccgcaatgggaactgccgcttcacttccggttccgccgttttccacgatcactgcaatggcgatatccggatcatctacattagaataacccacaaaccaggaatgactggagccattttcatcaaactccgcagaaccggtctttccggcaacagtatatcctcgtccgttcaatgcggaagccgtaccgttttcaactacatttttcattagttttccaaggatattggcttcatttcttgtcatcagacgtttgtattctgttttttctgtttccctgaccgtatcaccggaattattcacgatcttatcgatcatggttggcttcatcagtacaccatcattggcgatggcacttgtgatcaatgccatatgcatcggagaaacaagagtattaccctggccgatcgaggtctgcatcacaagtgcattcggagaatctttatcaagggtaaagcgactggttttataggaattcagcggaagcgccctattaaagagcagatcctctgcagtacttttcagagtatctcctcccagaccaagtcccatatctgcaaatgcacagttacaggaatgtgcaaatgcggaataaaaatcctcctgtccatgcactgccccattgtaacactggatcgtgtggtcatccactgtgatacttccctgacacagataggaatatccctccagtgatcccttttgtctgaaataatccagtgccgtgacgatcttaaatgttgatcccggaggataagctccattggttgcacggtttaaaaggctactgttactttcatcattaacaagggtatcccagttctgtgcgatcgtgttcggatcaaaatccggtttgctcaccatagccaggatacgtccggtggatggctccagtacaactaccgctcctctgcggtctcccagagaattgtatgcagttgtctgaagatctgcattcagactggagatcacggtatcaccctgattcttttttcccaggaattcatttttcatctgttccagaaaaaatgaatgggaggtgagaagctggaaatttgcttccgattccaaaccgctcttaccattggtatcatatcctactgcatgtgcaaaaatattggaaaacggatacgttctctcttctgttccatcttcatacacattggtctgtgccagaacctcaccatccgaagactggatacttccacgtactacccggtccgaaaatgtatcctgacgggtgttgtacgggctgttgataaaatcttcgctttttatggcgtcaaaatagaccagatatccgatcagactgacaaagatcaatataaagaaggccgatacaaaagttaaaggccggttcttttttctacggagtctggcgatttctctttctctcaggcgttgctctctttcctcttctttcaatcgtttcttttcgctgcgtttcaatttgttcgtcctcatcttccctcagaatatacagtccctgaatgatcgcaagcatcaggatggtacacatgacagaactgcctccgtaactcaccagtggaagtgtaactcctgtcattggaataaacttggttgcaccgccaatggtcagaaatacctgaaaagcatattctgttccgagccccagtgcgatcagtttataaaacggattcctgatctttagtgcaatagtaacgatcatcagaaaaaagcttgtgcatacaagaatcaggcagatggcaaaaatgccacccagttcctcgcaaatagcactgaagataaaatcattttttacgaccggaatcttctccggagagccctggcaaagtcccattccaaaccagcctccggttccgattgcaaacagagactgcacgatctgataaccttcattttgatagacagccatcggatccttccaggcactgactcgctgacggacatgtccaaaaagatgatatgcgatcaccgaaccaacgcatcctccgccaagtcccagaaataaatagctcggatttctggttgccacatagatcagtacaaggtaggtgacaaaaaagattactgcactacccagatccctggaaagaaccaggatccctacatggatcactgcaacgatcgtagccagtactactttgcgaaaatccaccttggtacacagaagtgatgccataaaaaatacgaaggttatcttgatcacctcggaaggctggattcccataagagaaagctttgcaccgtagcttgtgcttgccagaacaagaactgccgccagaagtacaataccaattccggcataagcccatgtaagatcctttaaaaatttcatttttcgtatcattaccggtatcaccagtgatactgcactacctgcggccacgatcagaagctgcttagttgcagacggaagtgaaagccggcagagcatgataaatcctacgctcaggagcatacacatattatttaaaagaagcagcgatgcattctgataaataattcgataaaggatctggatcgctgcaaaaaagatcatcatttcgatatagaacaggatgaccctgaaatccatgctttttaaatagatcacaagaaatgctgtaaaatcaataaaaaagatcatggtcagctgctgatggagcagttctctcttttcttcctcatcctgccgccacaccatataaaaacaatgaaaggtatagacgatcatcaatgtgaggatcacatacttagataattctgtaattacattaatcatacacttttactcggctcctcttttaaaatgaccttttgtatacctgcgtccggaaagttttccgttttcctgataaaccgtccggaattctttcaggatcgcttttgctttctctggctcttcgatcgtaaatgccagtcgcaaagagtgaaggttcagtttttttacctgatctttttcacccggaagtccgtaaggaatgctattataaatgatattataacagtattttgctttttcggagatgttttttccccatggatcacaactgcattttaccggaaattcactgttatagcggtctttcagataagccgtctcatattttcctgtacatccgaaaagattcttccttacacactgcgcggaaagcatcagtgggatataaccatataaaagcagctccgaagaagtattatctctgtgtttcagttcaccctcattcaactcaagggggactgtatttcgaagaactccctcttcccgccagaaatcaacactctgatcattccaggtatacatggatgcatccaggatacatttttcgccatatcccatttttttcagtacggcgtaagattccaggtttcttaccagaaagcccttcataccctgctccaaccatttttgagctgatcgaagccacttttcggggatttctccgcgatggatatgtggagtagaaagatataattcactgcttgcagcaagttccggtgaaaaatatttttccatagtatcaaaaggaaaataaaaacctgtaatccccggttcgttcaaaagtacttccgcagtatccgaacgttcacaggatacatacacaggcaggctgtctgttacccttctgtgacaggcagcctgatccttagatttcgtcggctgcttcgtaacctgtgctctcttctgacatccgatcagtgcttcccgcagctgactcagagcatctcttcgtacttcattgagaactttaaccggaacaaaaatccttccatttatttcaatgttcagatcctcccactgaaaatctgtatttcccagtttctccatctgctgacggatcctctgttcttccattggctgatttttagcaaactgtacctcaccgcccatagcagttactgtctggcccttgcaggttatttccagtataacaggactttcaggagaaagtattaaattcccatgaattttttcttttatttttctgatctccggctggatattaccggattttttttcattggcaaaagccatcatttccggcccgcgatacatatcatagtatcctttgcaggatcctccccgactgaaaagctcaagaagatacttccggtctttttcctgaacgtgatattcttttccacttaaatacatatccagatattttcgatatactgccgtgacgcccgctgtgtacgccggctgtttcatacgcccctcgatcttcagagacataacacccgcctccaggatatccggaagaatatccaaagtgcagatatctttcaggcttaatgcacaaaaatccttgtctcctttatattttctgtgatccatggttacactgtaaggaagcctgcatggctgtgcacagcggccacggtttccgcttcttccaccgaaaatactgctcatcagacactggccggaatagctgtaacagagagctccatggataaaagtctctatttccagaggacttgccttatgcatggcagatatctcttccagggaaagctctctggctggaaccacacgagttgctcccttttcctccagaaaccgcattccctccggtccagttactgtcatctgtgtgcttgcgtgaatatccagatccggaaaattccggcgtataaaagaaaatactcccagatcctgtacgatcaccgcatccagccctgcctcataatacggaagcagatattcaaacagctgatcatccagttcacggttcttcaaaagtgtattcacagtaagatataatttacggttatggatatgtgcggtctcaatggcagtgatcagctcttcctgggtgaagttctgcgcataagctcttgctccaaaagccggtccccctacatataccgcatcagccccggcaccaatagctgcctcaaagctttcataagaacctgccggcgagagcagttctgttatcatatttttcaaagtattccctcatctcccatctgttaatcaatccgatgaccataaaacaaaagaggattaccgaagcaatcccccatccttatttaagcagttcatcaagttctttctccagttccttcaccttaccgtccagaagattcttctgttcctgagcttcctgttctgccttcttcgcctcttcaatctgcattttcaaagagatcagttcatgtttcagatcatacatctcctggtctttctgctgcagatcctgttcaaaaatctccgcctgcttctttgccttaaaataatcatctgtaatattcagactgagcaatgtatgcttggtctccatggcctgtctggagtatcccggcatctgactcagctcactgatcttattattcatataggctgcaaccttctgaaaatattcctcggactcatacccgcccagagtaatgatctttccatcgataacaacctgtgctgtattctttaccgccattcgtaaagcctcctgaatttatctgttactggtaattttctcaataacattcctctgcattgccggtcttacaacccacaatttcttttattataactgattcccgcaaaaatgtatagaagtttttctattattttgtcgattacaatattttccttaaaaatgcaaatgtttttctcaattatgagtgttgactttcatgtgttcgatcacccttttccaggaatcaataccgcaggttccacttacctttacgcctatgtttttctggaaaactttcagagatgcttctgtatcgtctccgaaatggccatccacagtaacaccaagtacagactgcagcacggaaactgcaacgccggaattccctttccggatgatcggaagctgggtctcaaactttcctgtcagaactactgacttttctgaagtctgtacaggatacactgcttttccgttccagtcatagatggtgtagccctgtttccactctttctttgcattctcaaggctcttgtatgctccaatctggctcttgctgtcagcccaggactttcttgtgcgataatacttatctaccgttggcgtggtggtctcagctccgatcagctgcttgaaacggttccagtcaccttttgcacggattgctgacgggcagttctttgcacatacatcataatgctgcacaactctgtctgccgggattcccagctgtttcataagctgtttgcacacctggactgtattctggaaagctttctcatagttatagcccgcctggacgcacatctcgattcctactgaatttct

SEQ ID NO: 267 - DNA, 1875 bp, Unknown
  gut microbiota DNA sequence
tactgggagaatggacactgggtggaaattcctccgatggcgatcaagcgggaatatgattttgatcaggtcggcgataaagatatgtatcttctgcatcacgaggagatcgagtcccttgcccagacaattccgggagtaaagagaatccgtttctttatgaccttcggacagagctatctggatcacatgcgctgtctggaggatgtgggaatgctttctactactccgatcaactataatggacaggaaatcgttcctatccagtttttgaaggctcttctcccggatccggccagcctgggtccacgtactaagggaaaaactaatattggctgcattttcaccggggtaaaggatggaaaagagaaaacctattatatttacaatgtttgtgaccaccaggaatgttataaagaggttggaagtcaggcaatcagctatacgacaggcgttccggctatgtgcggagcattaatgatgcttaccggaaaatggatccgcccgggagtgtacacagtagaagaatttgacccggatccgttcctggaagcacttgacaaatatggacttccacgcagcgaaaatcatgatccggagctggtggattaatggaaagaacagatacaagaccaccctttgcagcgtccggcggaattattccgccggagctgcggaagatcaaaacaccttgttatgttctcgacgaagcggcgcttataaaaaatgcagaattaatggggaatattgccaagagaacaggctgcaaaatgctcctggcacagaaggctttcagtaattatgactgctatcatcttttggaaccatatttgacaggaacagaagcaagcggactgtacgaagccaggcttggtgcccaggagatgcccggaaaagaggtacatgtattttgcgccggatatcgtgaggatgaatttgaggagctgcttagctttgcagatcatatagtgtttaactctccttctcagcttcttcgctttggaaaaagagtgaaggaggccgggaaaagtgcagggcttcggatcaatccggaatgctctacccaggagggacatgctatttatgatccctgtgcctcaggcagccgcatgggtaccacaagagcgcagtgggagactgctgtgagaaagcatccggagctgatcggattattggatggtattcattttcacaccctttgtgagcaggactcttctgatctggaaactactcttacagcagtaaagacgaaattcggagatctgatttctcagatgaaatggctgaatttgggaggaggacatcatattacaagaccaggctatgatattgcacggcttgagaagtgcattagagcagcaaaggaagaatggaaggtagatgtttatctggagcccggagaggcatgggccttaaatgcaggattctttttgacaactgttctggatgtgctgcaaaatggtgatacccggcttgcaattttggatggaagtgctgcgtgtcatatgccggatgttctggaaatgccttatcgtcctcctcttcttggagcagatgaaccgggaaaaaatgcagtcacaatccggctcggaggaccaacctgcctgtcaggagatatcataggagattacagcttttcagagccgttgaagtacggagatatcctcatgtttggtgatatggccatttatacaacctgcaaaaacaatacttttaatggaatgcctttgcctgatatatggctgagacatgacgataaaaccatggaacgtcttactgattttgggtatgaagattttaaaggcagacttggacgctgcaggaaataagagcagtttttttgaaaaataatgctggacataatatccaacacca

SEQ ID NO: 268 - DNA, 4364 bp, Unknown
  gut microbiota DNA sequence
tccaatgatcataatctgacatggtgtagctattggtgtcataaatacaggaaatactgggattatttcatgtttcaaaaaggtgtggatctgcatttggttaagataatttgacaggttcttataaaacaaataaatttgataaaatatgtaaagttttagttggattttaagtattttatggtacactaatatagtatatcaaaaatgggagggagattcaaaaatgagcaaaaacgaaggaaaagggttaaagtcttttaacaagggattccaagtgcctgatacctacattatcatcttttttgtagttgttttcgcagcacttatgacatttcttgtaccaaagggattttacgaaacacaggatatttcatatatgatcaatggtgttgagaaaacccgtacagtaatcaaagacggaagtttccagtatctgacagatgatacaggaaatgtagtaacagaaggagtagcactctttagtggagatggtggaacaggatttttcaactatatgtataacggaatcgtaaatagttctgcaatcgagattatcgcatttcttatggtggtaggtggtgcattcggtatcatgatccgtacaggtgcgattgaatccggattgatcggattgatccgtaaggcagagggagcagaaaaactactgattccgatacttttcgtactgttttctcttggtggagcagttttcgggatgggagaagaagcgcttccgtttactatgattctttgtccgttgtttgtagcagttggatatgattcagttatcgcagttcttgttacttatgttgcaacacagattggttttggttcatcttggatgaatccattctctgtaggtattgcacagggtattgcaggtattgacgtattctccggagcaggattccgtatggtaatgtgggtagtatttacagcactcggctgtggaatgactatgttctatgcatcaaagatcaaaaagactccgacaatctcaatcgcatataagactgattcatatttccgtgagcagaatgaaaaaacaggaattgacgaaggacattcatttggtcttggacacattttagttcttttgacactggctgctacagtagtatgggtaatttggggagttatgactcaaggatactacatgccggagattgctacacagttctttattatgggaattgtttccggtgtgatcggagttatctttaaactgaacgatatgaaactgaatgatattgcaatatcattcaaagatggagcaaaagatctgattggtgctgcacttgttgttgctatggcacagggtatcatgcaggttcttggtggatctgatccgaccacacctacagttatcaatacaattatgtataatatttcaaatgcattgtctggagtttccggagcggttgcagcagtacttatgtatctgttccagtccgtatttaacttctttgttgtatccggaacaggacaggctgcgatcacaatgccgatcatggctccactgtcagacctgttaggtgtttcacgacagacagctgtagttgcattccagcttggtgatgcatttacaaatctgattgttcctacatccggatgtctgatcggatctcttgcaattgcaaagatcgagtggtctaactggattaaattcatgtggaaattccttggcgtcttaatgattggtgcaatcattacagttcttattgcagttggaattggattctaaaacatgcattggataattgggagtgatttatgatgaaattaattcagaatattgatgtttatgctccacagcatctggggaaaaaagatgtacttatgatcaatgataagattgttaagattaaagatgcaggttctatatccgcagacggatttctttctgaggcagaaatgatcaatggagaggggttacttttaactccgggattcattgatagtcatgttcatgtactaggaggcggtggcgaaggtggattcgccaatcgtactccggaagcaactatggaaggacttacgaagtttggagtaacaacagttgttggctgccttggaacagatggaatcggtcgtgatatatgcgcactggttgcaaagacaaaaggattgaatgagcagggaatgtctgcatactgttatacaggcagttatcagattccggttcgtacgttgactgacagtattgtgaaagatattatgatgattcaggaaatcattggaactggagaaatcgcgatctctgatcatcggtcttcacagccgacttttgaggaatttgtacgtgtcgttgcggatacaagacttggtggtgttctttccgggaaagctggtattgtaaatgttcatcttggtgacagtccgagatgcttagatcttattgaacgggtggtagatgagacagagataccgacttctcaaatactgccaacacatatcaatcgaaatgagctgcttttctgcaagtcaatggaatatgcgctgaaaggcggagcagtagattttaccggaaatgaagatattgactattgggaaactatctgtgatgaggtacgagtatgtaatggtatcaaacggatgttagatgcaggagtaaatcctaaccgcatgacaatttcttctgatggacagggaagccttccgatgtacagtagtgatggcgaattccttggaatgggcgttggacagtccagctgccttctgaaggaagttaaagagtgtgtgtttaaagcggatatcccgttggaaattgcactttcaacaataacatccaatccggcagaaatccttcgccttaatggaaaaggaaagattgaagagggctatgatgcggatctttgtatcctggatcaggacctgcagcttgttgaggtaatagcaagaggtaaaacagtgtatacaaaatagaatcagaaatatccggtataagaacagatgtgttccgtaccggatattttactagcatacattctaatagatgggggcaaaataatgctgacttatacatatgtttcaaagggaaaatttgagctaatggaaaaaccgaaaccagtgctcatgcatgaacgagatgctattgtaaaggtgacactggccagcatctgttccagtgacctgcatattaaacacggaagtgttccgcgtgcagtcccgggaattacagttggccatgagatggtaggtattgttgaggcagtcggttctaaggtgacgcatgtaaaaccgggagaccgggtgactgtaaatgtagaaaccttttgcggagagtgttttttctgtaagaaaggatatgtaaacaattgtaccgacaagaatggtggctgggcacttggctgtcgtatcgatgggggacaggcagaatatgtccgggttccttttgcagatcagggattgaataaaatcccggaaggtgttacggacagacaggctttactggtaggagatgttcttgctactggttattgggcagcacgtatttctgaaatcacagaggaagatactgtactgattattggagccggtccaacaggaatatgtactttacttagtgttatgctgaaaaatccagcgaagatcattatatgtgaaaaggacgagacacgtattcgctttattaatgagcattatccggagattcttactgtttcaccggaagactgtaaagagtttgttaagactaatagtgagcatggtggagctgatgcagtccttgaagttgccggagcagaatcgacatttaaactggcgtgggaatgtgcccgaccaaatgcaatcgtgacagtggttgcgctttacgataaagcgcagatgttaccactcccagatatgtatggtaaaaatctcacttttaaaacaggtggagtggatggctgcgattgcgaagaaattctgaagctgatatcagaaggtaagatcaacacggaaccgctgattacgcatacctatccgttaaacaggattgaagaggcatatgaattgttcgaaaataagagagatggtgtgattaaagtagcagtggaatgctgagaaacaggtacgggaggctgaacaatagtaagtttattacaagtaattttacccgtgatcataatgcttattattgggataatctgcagagagaaaaaactgatccgcccagagggaattgaaggacttcaggcattggttatgaattttacacttccaatatcattgttttatactttttatcgggcaagtattaaagcagatactgtgatatttccggttaccttcttcatagtgaccgcaggtgggagttttgcaggaaggctgctatgtaaacttgtaaaagaaaagattgcagaaaagtacaacacaacacc

SEQ ID NO: 269 - DNA, 62815 bp, Unknown
  gut microbiota DNA sequence
gctacaagatcatcgatctgtccttcgatcggacgcacctccaccttcggatcaagaagccctgtaggacggatgatctgctctgtgcggagaagctcatggtcatattcatattctcccggtgtcgcagatacaaacattacctggtcaagcttgttctcgaattcatcaaagctcaatggacggttatccttagcagacggaagtcggaagccgtaatccaccagtgtctgtttacggctctgatcaccggcatacataccgccaacctggggaactgtcttatgggactcatctataataagtaaaaaatcatctccgaagtaatccatcagggtatacggtggctgccccggtgcaagccctgtcaggtgcctggagtagttctcgatcccggagcagaatcccgtttccttcatcatttccacatcaaagttggtacgctccgcaattctctgagcctcgatcagcttatcctcacttttaaagtattccacctgctgcttcatctcttccaggatggcatccgcagcacggcggatctgctcctgaggcacaacataatgggacgccgggaaaatggccgcatggctttccacacttttgatttcgccggtaagcacatcgatatctgtgatccgctcgatctcatctccaaaaaattccacacgcaccgcccggtctgtagagttagccggaaagatttccagtacatctccccggacgcgaaaggttcctctgtggaaatccatctcatttcttgtatactgaatgtcgatcagctgtttgataacctcgtcacgatccttctccatacctggacgcagggagatcatcatatcaaaaaattcctgaggtgcgcccagaccatagatacaggatacggaagaaaccacgatcacatcctttcgctcgcataaggctgccgtggcagaaagacgaagcttatcgatctcgtcgttggtggaagcatctttggcaatgtaggtgtctgttgacgggacataagcctccggctggtagtagtcgtagtaggagacaaagtattccactgcgttctcagggaagaattccttaaactcaccgtacagctgggccgccagtgttttattgtgcgcaagtaccaaagttggcttgtttaactgggcgatgacattcgccatggtaaaggtcttaccggatcctgtaacacccagcaaagtctcgaactggttgccttccttaaaacccttgaccagtttttcgatagcctgaggctggtctcctgtgggttggtattcggagtgtaatttgaaatgatccatacggttctccttgttgttctgaaatttgtggatatgtaaatactgcctgttactatatgtaaagagagtgcttttatctttattattgttgcttttacagtatatcattcagagtaaaaaaagtatagggcaatcgaatatttgttctatactttttactgcaccacacaaaaaggcagagcctgctccactcagactctgcctctcacttttttctttttatactgccgtcattcttctacttttctctcataaacgatctcaccgccaagaactgtcatatccactttcgtggtcttgatctcatccggatcaatcttataaatatctttctccagaactacgaagtccgcatttttacccacttcgatggttccgttctcttcttctgtataggaagcgtaagctgcgttttttgtaaaaagcttcaccgcttcatctacggacattttttcggacgggatccatccttcctcaggctggccctttatatttttgcgggtgactgcaaaataaatattctccatggcatcaaagcttaccacaggagcatccgaaccgccggatgcatggattcccatatccagcatgctcttccatgcatacaccttatccatacggtgtgcaccgatggcaggttccactgtgttcatatccagatcgataaataccggctggatatatgccagaagatcctggtctttcatcccctgcaaaatacgcggattggtaatctggcaatgcacgagaccatgtctgccctttttgttatccttccggtaaggagatttcgcagctgcctcaatgaccatatccatggcacgatcaccgatacagtgtaccgctgcctgcatctgatgccggtcaaaaaaagcaaacagatcgtcaagctcatcctgactgaatgtgatgatccccgtatttcccggtgcatcctcgtaaggctcattcatggccgctgttcttgcaccaagagaaccatcctggatcagtttcatcggcccgatcgtaaagtgttctcctctctgtccggtacgatatccttcctcaataaaagccttcgcatcctccacccgctcaaaaaggcactgctcataatggcggatactcagctctcctctggcatccagtgccttgtaggaggccatgatccgacgccagttttttcccggaagggaagcaagatcatcggactgcacacctgtaaatccacattcattcagcttcttcgcactgtatttgatgtagccttccacttcttcctgagatggtgcttccaatacggaagaataaaactgaactgcattctccttcagaagtccggtatccagatcaacctccttctcaatctccgggaactccgggatttttttcagaagctccagaccgcagctgttgcacacagccacatgcccgcagacacgcaccataatgatggggatttccattgaaagtgcatccagctcatccttatgcggatagcgcggcttatcaaaatgctcctcattccagcctctgcagtagagccaggtcagcttctgacctttgctctcctccagtcttttttttgctgcggcaagcatttcctcaacacttgtacagtcaaacagtttcacagatctttccacaaatgcataatgcagcatatgcatatgtgtatccacaaaaccgggcagcatcagccttcccttaagatcgatccgttttttgcaggaaaaaacttccgcttctttatctgttcccacaaaaacgatccggccattttcgattcccacagcctctgctactttttcactgttatccagtgttcttatacatccattaaaaaaaatcgtatccactgtttatttttcctctttttcttttttatcctcgtagaaaagtgccatatccttgtctacctttccgattcccatgtaacgcgccttgtaatccttcagcagcttaaagaaggtaccacttaagataaataatgtggcaacatttacaaatgtagggaatacggttgtaaaatctgcaattacccacagctgtgccggtgttccgtttccataaagagtaagcactgtgaccagaaggccccataatggtgttccaaggacaaaaaccttctctgcgatcttcagaaccctctgattgtttttcagccagtgcttcaggatcacgctgtagtaggtgaaccatccggttgatgttgtcagtccgaaaaggaaaatactgatcgcgatcagtgctctcgcaacagatcccattccggactcaaacgctgtcagtgtcagctctgatccctgaagtcctgaattccagtagccggtggtgataacaacaagacctgtcatggagcagactacgatggtatctgcaaatacctcaaaggctcccatcagtccctgttttacaggatggtctgtctttgcggaagcatggatcatgggagatgttccccagcctgcctcgttactgtatacggaacgggcaaatccaagacgcattgctgttgcaacaccggctcccataaatccgccgactgccgcctgtgttgtaaatgcccccttgaagatcagtccaaaagtttccggcaacttgtcaaaattcactaccagtattgcaagagatcctacaatgtaaagcatgcacatgatcggtgtcatataggaagagatcacaccgactttctttacaccgccgatgatgatcaggtaaatcgctgccacatacagaagtgacggtacgatgtacggcaggtggaaggtacttccgacagcctctgatactgtataattctgtaaggtaatgaaccatgtcataaaaatacagccgccgaacagcactgcaaaaagtttccagaagggaagctttttctctccgccaagtcccttctgcatatagtaggttgggcctccctgatactcaccatttggctgtttttctctgtagtatacagcaagtgttacctctgccatcttgatgaccatggcaagaagcgctgcgatccagagccagaataatgcaccaggtcctcctgttgcaatagccgttgcaacaccggacatattggatacaccaacggtacctccgatcgcaatggaaatagcctggaacggtgtcaggctctttccgtcatctccgccttcctggcgacgttctttactgaacatgtttttcacaatgtaaccaaaatggcggaactggaagaaaccggaacgtactgtcagatatatgcctgtagcgaggatcgtgatcagcagcggcagtccccagagccagttggtcagattttcaaataattcaaacatcttttcctctcctgtctttcttattgtttgtcttttgcatacattcggaaaatctgtgtatagaatataaaaaatccccggaacacgaagtcagatacggatacccggtgttcccgacatacagctcttctgccatatatctgcgagccccgtttctatcctctttatccttcatgctctggggatcttacatttcagcccacgaatcttccaaacaatgacagtatatcacagttccggaggaatttctactttttctgtttgaattttgtatttttattcatttttcgtgaatattactattttaccgtatggactccggatactccaccccctccggcataggatcccattcgttaaggccaaggctctgcttgaatttcgcctgttcaagcgtaagcttcgggagatcatcctgcagataatccatcagctcgctgataccttcccgggtcttgttatttaccataaagatccgttcacagcccatgttctccatccactgtctgaccatgggaatgttggcatggggagaatccaccttggtgatgattccgatcagcggccgcaggagaaaattcctgccgccgtcactgaacaggttaaatggctcattggctgcctgtacgatagcgatcacatccgcctcaaaggaaaagcaggccagtcctacgctgaaatgcttggattctgcatattctcccggtgaatcaatagtatcttcatttgtattggtatactgagtcttatgataatgaagctcttcccctttaagcgcctgtgtcagggatgttttgccggcttcacttcgacccatcagaaaaatttttttcattttttatcccgtcctgctctagcttctgtggatcttacagacatcgaatttcaatgtctcatggaaaaatcgcaccacttcttccacagctgtcatcacttccgtaaaaccgcctgtcaggatcagtgtcccacagaaacgatccataaatccaacttccacatgagcagccttcactgcaacatctgccgcaaccacgattgcctcccagggtgtgacacggaccataccgatagcatctcctctgtggtcctcaccttcatgaacaccgatatgtaatgcaagattctcatagactgatttatcacttggtgtaaaaacatgtgcaaaggaaagctcttttccaggtactctcacccgggtcagccgaagtcttcttcccttaaggttctcataatcatcatgaaacagccgctccagcagttcttccttcgttatccgttcttccatggtacacttccttatctcttggtgatattgcatactacatatcccagagtatcacggaaataatccacgatttcttccattgcagtctgcacatcggaaatctctcctgttatgatcagtgttcctgtaaaacggtctgcaaatccaagatatacattaccgctcttcacagcaatatccgatgcgatcacagcagattcggaaggtgtcatgttcatgataccaattgcagatgatccataatccacctgcggattcagtccaagcttctgatatatgataggtgccggaccacccatgatatgggcaaatgtgatctccttaccggctacggtttcctgtacgattctgatctgatctctatgttcatctgccattgatgattcctcgctttcaaaaatttcgtattacagcatttttttaattactgctatattcttcccaatcgatctatagcactctcagaaattactgcatcaagttcagctgtgcaaaacataatttgatgcgtcagatgttctcgacgtacgtaatattcgataagccggactctgttcatccggcttataatttccctacgttaaattttactatctgagcctcttaatgtcaatacaattcttcgaaaataaggcaaaaaacaacgttaatcgaaatataaatccacagaaaacaacatctatttccacatcaggataaaaatcattcaaaaatctgcttaaaactcaaacgccttcttaatactatcataatgcaggaattttccctctgcggcaaacgccctgatctgttccagggttgcaaacatatatccgtctgtctcttctgtctgaagcttcagatccttatcctccacatccatgacaaaacggtacacatccacaaagtaattatctccttccccgggattctctcttttatatgtaaaaaggtatccgccctctgcttcactggcgtccagtccggtctcctctttcacctcacggagtactgcatcacgggaagcctctcctgcctgggctgcaccgccggaaacctcccaccagcccggggcccaggcctttgtcatcacgcgtttggtaataagaaaggtcttgtccggtcttgctatcacgcccaaaactgtcagatgatactctccatcctttaaacaccagtcattgcgcttcatagttcgtcctgtcggtttcttatctgcatcgtaaatatcccagaattccattttatctatctcctgtctttttacagaacgtggaaatacagtcttacatctgatccgtttcagcctgcccgtttctccgttttctgtatcttttttatttgttatgataacacgttaaaatcatatatgtaaacccctggatccgataccattttccagttagcgttaccgttcactccgttctcagtaaccagttagctttctacatctgttttttttatattataagcatgcaagtacctacagcctgaaagatgatatgcaaaaatctatagattatttttattatataacccatattatgaattagttttatagattattctgttatataattaacgcaaacaaacgattctatttaaaataaccagggaggtttttccaaatgaagaatgattatccgcatattttttccccattaaccgttaaaaatatgactatcaagaaccgtattgttatgatgccgatgggcaccaactacggtgaacagaacggcgaaatgagttttcttcatatcaattattatgagcagcgtgcaaagggtggcacaggtctcatcatcgtagagaacgcaagcgtcgattccccgcagggctccaacggaaccacacagctgcgtattgatcatgacaactacctgccacgtcttttcaaattctgtgaaaatattcatagatacggaacaaagatcgcgatccagatcaatcatgccggagcttccgctgtttcttccaggatcaacatgcagccggtttccgcatctgacgttccatccaaagaaggcggcgagatcccgcgtcctctttccaaagatgagatccttcacatcgtaaaaaaatacggtgaggctgcaaagcgtgcacagacagccggctttgacgcagtagagatccatgcaggacactcctatctgatcagtcagttcctctccccgatcacaaacaagcgtaccgatgagttcggcggatctgttgagaaccgtacccgcttctgccgtatggtcatcgatgaggtaagaaaacaggtaggaccttttttcccgatcatgctccgtctcagtgcggatgagctgatggagggcggaaatacactggaggatactctggaatacctggattatcttcaggaagaggttgatatcttcgatgtttcctgcggacttaacggttccatccagtaccagatcgatgcaaattatctcccggacggatggcgttcctacatggcaaaggccgtaagagaaaaattcaacaagccatgtatctccatgggtaatgtccgtgacccgaaggttgctgagcgtatcctggctgacggtgatgcagacctgatcggtatgggccgtggtctgattgcagaccctgcatgggtaaacaaggttgccacaggtcatgagtgtgacctccgcaaatgtatctcctgtaacgttggctgtgccggaaaccgtatcggtgtaaaccgtccgatccgctgtactgtaaacccatctgttcttgagggcgatgtatataagaaaaaacatgtaaataaaaactgcaacgtagtcgttatcggcggcggcactgccggactggaagctgcctgtacagccgcagaggttggatgcaataccttccttctggaaaaaggcaatgagcttggcggacttgcatctctgatctcaaagattcctgcaaagaaccgtcttgctgatttcccgcactatctcatgcatcgtgctgaacagcttgataatctttacatcttcaaaaacacagaaggaacaccggaaaacatccgcaagttccatccgaatatcatcgtaagctccaccggctccgctccgcttctgcctccgatcgcaggactgaaggatcgtattgacaacgagaaccataatatttattctattcttggtatgatcagccacattaatgattttccgaaggatctggaaggcaaaaaggttgttgttgtaggcggcggtgctgtaggtcttgatgttgtggaattctttgctgacagaaatgcagacatctctatcgttgagatgatggatcagatcggacgtgatcttgacccggtaagcaagaatgacacaaagatcatgatgaaaaaacacaatgtacatcagcttacaaaaactgctctccttgaggttaaggattcttccttccttgtcaaaggcgacggcgagccttatgagcttccatttgaatacggcttcgtatgtctcggaatgagagctcagggacagctttaccagaacctcacagaggaattttcttctgaggatgttgagatcatgaacatcggcgacagccagagagcaagacgaatcattgacggtacccaggaaggacgcaatatccttaccattcttgagcagaagggatacctttaatattttttccgctatacactttccgggagtatttcaatccttctaccggaaagtgtatataaatctgttacagttcactcggtgatccgtaacatagtttttccacgtcttcctcccccgcagtcgtccggagaatgtccgcagcttcttcagatctatgtggcgggaggtttaaaaaagacaaatcttcatccagattttaccaatgagaggagttattaccatgtcagaaagaatcacaggacataccgaactgatcggtcttatggcatatccgatccgtcactccagctctcctgccatgcagaacgaggctttcgcaaagcttggctatgattatgcataccttgcatttgaggttggcgcagacgagatcgaggatgctgtaaaagccatccgtactctgaaaatgagaggttccaacgtttccatgccgaacaaaactctggtaggccagtaccttgacgagctttcaccggcagcagaaatgtgcggttctgtaaacaccatcgttaatgatcatggtcatcttacaggccatatcacagacggcatcggatttatggcagcactgaaggacaataacatcgacgccatcggaaagaaaatgaccatcgtaggtgcaggtggtgccgcaactgctatcgagatccaggcagcacttgacggtgtaggcgagatcgtgatcttcaaccgcaaagatgaattctgggatcgtgcagtatctactgtagaaaagatcaacaccagaacttcaagccatgctgttctctatgatctggcagatcttgaccagctgaaaaaagaaatggctgacagttatattttcgtaaatgcgacaggtgttggaatgaaaccactggaaggtcagtccgttgttccggacaagtcttacttccgcccggagcttatcgttgttgatgtgccttactcccctcttgaaactgctatgcgttctatggcaaaggaagttggctgcaagacaatgaacggccttggcatgatgcttttccagggctccgctgcatttgaactgtggaccggcgaaccgatgccgatcgaacatatgaaagagattcttaacatcagatacgacgactaaactgctatctgttcctgtcgtatcagaaaggaccattatgaaaacagttcaggtaagaaatatcacactcggagagggaagaccgaagatctgtgtcccgatcgtgggacagacaaaggatgatatcctccttgaggcagggaccttcgcaaggatccccgtagacgttgtggaatggcgtgttgactggtttgaggacgtttttgacacagacaaggttctggatgtggcaaaagatctccagaccgttttaaaggacactccgatcctcttcaccttccgtactgcaaaggaaggcggagaaaaagcgatttccaacgaagcttacaaagcactcaacatggctgtcgcaaaaagcggctatgtagatctcattgatgtagaagccttcacaggtgaggagatcgtaaaaagcatgatccaggaagcacacagctatggcgtaaaggtcatcgcttccaaccatgattttgacgcaactcctgagaaggatgagatcgtgcgccgtcttcgcatgatgcaggactatggcgcagatatcccgaaaatggctgttatgccaagaaacaaacaggacgtgcttacactcttaagtgccacgctggaaatgtccgagcagttcgccgaccgcccgatcattaccatgtccatggcaggtaccggtgttgtcagccgtctcgctggcgaaaccttcggttccgcccttaccttcggtgcagctaccaaagcttccgcaccgggacagatcaatgtcaacgagcttgcacaggttcttgacattatccacaaaagcctgtgatcctgtaacctcccataaaaaggatctacagtagatttttgtaacagaacgcgaattataaaccaatttttaaacccaattgatgtaacaaatttttacaattttaatcccataatagcaaatctattaaaataataattaaaaacaacaaatctcatgacaaaaagaagaagcgtgctgacccatccagcacacttcttctttttctgttttttatatctttgttattcctctgatcaatttttatcctcgatggcattctcctctttctttctggggtcccagtttgaaaggaagatattcagaccgaagcctacagccagggcccatgcggatgcccatgcagttccctgggttgcaagcacagctgccataacacctgcgatcatcttgtcacggtctgttctgcagtaatccataccgatccttgcacagacaaaggcctggaacatcagagtaatggaggaaccgactccgaagatcggacggaagaagcttacaaccggaatgatcagcacacttaaaaacgttgcaatacggaaggatgccataccgccgatcagagacttcatagctttctttccctccttgtaacggatggaaacggatactgtcattccaacccataacggaccggaaagcggcgggaacggcgcaatgacggaaaggatcaggttcctgatgccgctgaccaggttggagcggctggaattgaaatcaatgtactcatcatctctggactggcgtgcctctgtaaccagtgtctctgtggtaacaaaatcaccaaatgcgataacatagcatacaagtgccagaggaagcgctttgacaaacatggagaccggcgggattcccacaccaaagatacttacctgtgagatgatctctttgaactgcgggatcttgataaaggttcccagctccaaatcaggcgcatccagctctcctacaagaagacctaccaccatggcgatcagatacgggaaaaggtttccatacctggcaacaagatccaggaatttgttgttctttctcttctcctgatatttatctgaaaagctgatcaggatcagaaggcctacaccggcaacgatcgccagcggatacttatgcatgttgccgccctctcccagctgtcctgccataaccgtcaccggcgcagcaagaaggataccacccttaacagaatttggtactgcatggacaaatttatccgcaagtttggtgatgcccataaatatgaacacgagaccaaccagcatctgcagggcgatcattgcctggatacgttcttttcccatagggaagccttccaggaatacgatcgtcagcggaagggtcggtgtgatccatcccggtacaaccggatcaccaagtaagctgtgtagcatatacagcatggtctctatgatcacacagctccatgccagctcataaggcaatcccagatattgttccagataaggaaccgccgccagtgccgtaaccccgaggatcaggccctggataaactctacggactcaattttatagtgaataaacggaaaacgaatctgaaatggcccaaacggaatgtagggcagttcgttttctcttcgctgtcttgctgcacgtgccataacgattctcctttgtcgtttttttttgataatacatatatagtatcttttattttgtaagtttgttaattaacaaacatttccagaaacggtaaagtccaatccgggaattgttcccgaattggaactttgttttgcacagattcagtcatcattgtctgtatccatacaatgattcactttttttactgtagtcaaacggatattcaccccaagggatttccttgatccagtcaagcctcttttccacggttcatcttaacgaacagtgcaagaaggattcctatgaatgtcactgccatattgagaagcaggatcattctcggagcactggttccggcagtctttgtaatgtagccggccagtgtcagaatggtgtagttcgcaacgctggatgcgatcatgaccatggatgttgcagttcccttgttttccgggaagaactccgcagttgtggaaacagccagctgaagcacaccgcctgcgcctgcaaaaccgatcacaaatccaccgataagacagattgtcggattctggataaagtagcaaagtcccagcatgatgaaagagatcagcggataaatgatcaggatattgatctccttcagtccttttttgataaatacagaggaacacaggatcgctgcaaaggttcctactgcatagaaggactggatcttggaaggatcacttaagttataaagctttccgagctcctggttacagttcagccacagcataaatgtagaagagcttgtaaatccgatgaggattgctgcaagagctgcaggagtgatctttaattttgctttttctttctttactgtacctgccgtatttctctccgggaatggcaggaacagaatcaggattccatcgataaagatcgcagcacctgcaacaataaaaatggttctgtaggacatattcgcctctgctacaaatccgatgaggaaaggaagcagaaactggctgatacacatggagaattttgtaaacaggttcgctacagaaggattgtttacataaatctccatacatgtcgggcttacgcaggtgtccaggaaggagtttgcgataccgcctacaatggcaaaggcgtaggcaactcccatagacggagcaaatgcgattcccataaagtatgctgcataacagatcacgccgatgattccgcttaatctgcgtccgaatttgtcggacaggggaccggaaaacggaagagagatcagtcttccaagtccaagtgcggcaattacagatactaccatgctgacatccatagttccatcacttaaagcctttgctccccagtgagccgcaagctccggcttgtactgacccatgatggaagctccgattccatggatgaaatatgtaaaatacagcgcgatagaagtaatcactaaatttttcttacctgtctggctcatttttcttatttcccttcgttctcagcctgaaatttctggtactcatctgtcggcatctcaagacctgtgtaaagcttgtaagatgctgcaccctgccacagaagcattccttttccgcctaccgcaagcttcacgcctgcttcttttgcttcttttaccatctttgtctcggccggattgtatacgcagtctgcaacaacaagatccttatggaacatggatttgtcaactagtgtgatgtcatcatgtggtttcattcctgcaagtgttccgttcgcgaggatatctgcgtttgcgatctcttctctcagtttgtcctggtcgtcaaggcaatatacgcttactttgcagtccggtacttcttttgcaagcttctcagcagttccttttgctctgtcaaggaatggatcgtcagggttgaagatcgcgatggatgctgctccgtcaagggcacactgtacagtaagggctgtagctgctccgcctgctccgaggactaccatctttttgccctttacatcaacaccgtgctctttcaggttgcggacaaatccgataccgtctgtgatatgtccaacaagttttccatcctcatttacgatagtatttacagcgccgatgatctttgctgccggtgaaagctcatctacacactgcgctactttgttcttgcaaggcatggttacgttgcatcctctcattttgaacagacgcattgcatcaagagctgccggaacctgatcttctttgatatcaaatgccatgtaagcatagtccaggttatggtactggaaactgaagttgtacatagccggggatccggaatgtcctacagggcttccgatcagtgcaagtaaaccagttgttcctttaattctctgttccatttctttttacctcctgcatttcccctgtcagacatcggatatattttctccggtgtctgacaggtcatctttttaatttttgtactgtccggtttattggatagattggcagatcagatcctggaagctacctcataagcctcttttgttgcatccagtgcacgtcttgcacggatagcatctccgatcacatgtgtctcaggtacaaggtctttgatcttctcttccagaggattgtagttgcggaatcccatggaaaggatcacagaatcatatcctcttgactcgtgacgtactccgtcagcagtctcatattctaccccgtcttcatagaatttgcatacctttgctctggtgatctccttgattccgtagtcctcgaaatccttcatcagatatactctgtgctcgtgaatcacctctgcacctacagtatcacggaactcgataacagttacatcatgctcctgctcgcctaagaatgcagctgtctcgcatccaaccattccaccgccgacaacgagaacctttttgcctgctgctctcttgccatccagaaggtcagagccgtggatgatagccggattgtcgattccctcgatcggaaggatcagagtcttggaaccggtggcaatgatcacgctgtccggcttctcttctttgataagctccggagttacctcacagttcatcacgatcttaacgccatccttctggcagcgatggatgtagctgcggatcatgtttgtgatgtcaccttttcccggcggatatgcagcaagtctcatgtttccgccgagaacatctcctgcctcataaagcgttacctcatgtcctctctcttttgcgataaatgcagcggaaagtcctgcaacaccgccaccgataaccataaccttcttcggctcttccgctttctcaagcggctctgcctcatgacccaggaatgggtttgtcagacagcataccggatttcctgcatacatgtttgcaacacagccctgaagacaggcgatacaaggagtcatatcctccagacgctcttcctgtgctttcttcggcatagccggatctgcaaggctctgacgtccgaatgctacaaggtctgctcttccttcttttaccatcagttctgcaaactgtggctctgtataacgtccaactgtgatcaccgggatatttaccgcacgtttgatctcctcaacctctgctgcagagaatccaccgtggataacagtcggtgcccacataaactcatccttgatatgaacggcacgggatacatggagtccgtccagtccgcagctttccagatatgctgcgatcgctgcactgtcgtggacatcaagtcctcccggaacctcatctgcacagttgattcttgcaagaactgcaatctttccctgtgttgcttttttaacttcctcgatgatcagacgggagaaacgcatacggttctcaaagcatccgccaaactcatccactctcttgtttgttctcggagaaaggaaggtacttaccagataaccgtgtgccatatggatctcgacagcatctgctcctgcttccattgctcttcttgctgcctcaccgtagcctttgatcagctcataaacttcctcagttgtaagctgcttcggaatatcacggccgcacactgacgggatactggttgctgctgtgatcggtgctcctgcgttctttgcatttccttccggacctgcgttctgaagctggatggacacctttgctccttctgcatgacatccgtcgataaccttgcggaagctctcgattgtagagtcgtcataaagacatggtttacgcgggccgccctttgcgcccttgtgaactacagtagcctcgatggtgatcagaccaaatccgccttttgctctttctctgtaatatgcagcggactgctcactcattgttccgtctgtgtttgcaaagttatttcccattggcggaacaacaaaacgattctttactgtcataggaccgatctcgatcggctgaaacatcgcattgaatttcatatgcgttctcctttcctttgaaacaatctttttgtttctttcacggtaacgccctgtcaccggtatgacgtcggaaacaggggcccgtctgaaatattaatttcttatattaattacagtacttccggccaagcctcttccagtaccttctttgtgttctcatatgtatgttttgcagcatactcgatacctttttcaaggtttgcatcgctgataacctctacgccgatggcatttggtctgatgcctttttctttgatcatttttacgaacggtactgttgttccgattcctgttccaggagcaagacggtcatgcatggactcatctcttaagatcgttgttgcatatggtctttcccatacatcgttgatctggatggatacgatcttgtctgccgggattccctcaagtacggaaagctcaatcggctggtttgctcttacccagtgccatgtatcaaggatcagtttcgcattctcgcagtcagcagcttttacaacagcccagccctttttcacatccgggattccgctgtatggcattggctcaacaccgatgatgtatttgcctgctctgtggcaaagctcacgaagcttctgtgctgtgtactctacggaatagttctccatcagtccgcagttgatctgttttacgttaaataattcacacatatggaagcagagctgttctttgtatttctgctcataggaacgatgctcctctgcccactgcacgatgtactcaacctctgttaccttcatgtcatatttatccaggattgccaggatatcctcgtcgaaaagtccctcattcagggcatctacgtaggtttctgctctcaggccgattccctcatagccagcctctttggcagcttttacacggtcctcaaatttgcactgatctcccagtgtccaggaactgattgtgattggaaattcttttgacatgataattcctcctgaaaatttaaataattttatttgttttttttaaattattttgtatcttttttctataagcattatataactttgttaaatacaaaacaaattaattgtaccaggagaatccatagattttatcaatatatcatgttatactatataaaacatattcagccgtattgccgccgtcactgcatacggcctggcaaatctcttatgtctgtcagacttaccggggatctgtccgaagtaaaacattcagataaacttacgaaaggagtattgaaaaatgaatctgtatcatcttcgctatttcgtgacactggctcatctggaacattatacaaaagctgcggatgttctggccatcacacagcccagcctaagtcacgcgatctcttctctggaggaagagcttggagtgaaattatttgaaaaaaacggacggaatgtttctctcaccaaatatggcaagtcttttctggaggatgtggaacaaaccctgaaccggctggattcctctgtaaacggtctccagcttgcaggaaagggagaaggacagatcgatgtggcttttctcagaactctgggtgttgactttatgccaaagatcatccgcagctttcttaatgccaatatgggaaaacagatccatttcaatctgttctgcgataaggttcttaccggcgatatcctcaccggactgaaagagaagaaatacgatatcggcttctgttccaaatttgacgacgaaccactgatcgaatttattccggttgccaagcaggatctggtcgtcatcgttccgccggaacatcctcttgctgagaaatccgagatccatctggaggaaacgcttccatacaagcagatcatcttcaagaagagaagcggtctccgccagatcattgaccagttatttaagagcatcggtcagtacccggatgtggcttttgagatcgatgaggatcaggttgccgcaggatttgttgccaatgatttcggcatctgcattgcaccggatatcccgatccttcactctctgaaccttaagatcctgccccttgtctctccaagctggcagcgaaatttctacatggccatgctgaaggatgtataccatccgccggtcgtggaagcctttaaaaaatttgtgatcgaggaaacctcgagggagattttttataagaccaattaaacgatctgttcatctgcaaatatatggtccggatcttttatatcataaaggacagttgcccgatctccgttctgtttctgtacggtttatcggacagctgtcctttttatatgtaaaactattctgttttatgatcagcaattatttatttgcctctgcctcacgaagtctgtggatcagctcctcgcagatctcaagctcactctttccgtctgtctcaacaactatatctgctgctgcctcatatttcgcgcgacgtttttccaacagatccgcgataaatgaaacatttttgttgttctcaagtaaaggacggtcatgattatcctttacacgttccagaatagtttccggctttgcagtcagaagtacaacacggccattttttttcatctcggtaacattgcgctcccgcatcggaacaccaccgccacaggatactacaacattagatctggactgcatctcgatcagaagatttgtctcgagctcacggaaatactcttcaccgtaagtctcaaagatatcggaaatgctcattccctgtctctccacgatacactgatccatctccacaacatccatggcaagaacattcttcagataatcagagatcgtagatttaccagctcccataaatccgatcaggaagatattataattgaaaagatttctggactggatccttttactgttctgtgtgatacttgcaaaaacatcattgacctctttcttatgacgtctgccttccattctggcttccagccatcctttctgcttcgcctcctgttccggctgaagtaccggaagatcattagcttccttgtataccatgatgtcctctacgatcctgtttctcataaggagtgcgtccaggatgatctcatcgcactgtccaaggctttctcttaatacttctaactggttcataatatctcctttacttcgttcattttattacggatttccgtcatcactttatcactttaaatcaagtatctgtccttattataccaactggtcatttttatctcaacccaaattttcattgaatttacgcatgtgatctatagattatttttataatttttaggcacggcaaagatatctgacgcaggacttcacgctataatggactgaattgtttgcagtaatttatggaattgctatagtattcacgccaggatctgtgtcaaaaaaatctccgccctattacagaagcagagattttttacaaaaattttatcaccaagattctactgtatcacttcatagatccggtaatgcttgtatatataatcccggaactgctccacaagcgcacttgggtaccggtttttcatcattcccatgtatatgtaacgacggcagtgcagattctcaatatttaagattttcacaggaagtgtatggatcaccggtacatccggcacaatgccaacaccaaattcctccgccaccatacctgccagtgcaccatcctcttctacctcaaaggccgtctccggtgaaagtccttccttttcgaaaagctcccggatcacaaaatacaatccgcttgcaggggtaaaggtcacctgcggatactgccccagttcttttatggtcactgaatttctgtctgcaagagcatggttctcaggcactacagccaccagcttttcttctgacaccggcacaaagctgatctccttctcgccctctgcccgggaacagaagatcacgtcgaatttctcttccttcagaccccggatcagacttccggtagctgcattctgaaaacggaaatcaatcttcttcccctcctgttcattaaggaacccccggacaagctccgggataaatctgcgtccctgggtatggatatatccgatggaaatacttcctcccggaatccttgccgcttcctgtatcctctctacaccaagattcaggatatgtaaggagtcctgcacatatttcagaaacatttccccgtatttggtcatggtcacatttcttccgtgacgctcaaaaagtggaacctgcagttccttttcaaggttggagatcgcatggctcagacttggctgggttatatccagccgcttggctgctctggtataattttcgatctgggcaagagtcacaaaatatgtgagctgatttaagttcatatgtcaaaaaatcctttctttcctccgcgcgagagactttcaggcaggtaagctcagacacctcgctgcctggtctgtttcacactccaaggctcaggagttcttttcccgccgcaagtctctcataaaactgctcataaaaatcccgcttctcatcataaggcttcctgtaaaactggtttaccacatacatgttcaggtttcggatcagatcactgtcctcgctctcatagagaaccgactggacatccagaagaaaataatgccagtcacagacaaatttttcgtaatttcgaaaatccggagtatctacccatttccggaccttgatcttactgcggctggtctttttgcactcgtggatctgaaggatgtatttaaaactcccgtcctcatagtatcttcccagcgggaacaaacggcagaagcccggacggaaactgtggatggagcatcttccgttgccattcagaaatacgcatcgttcctctgcccctgtcatcctaagatgcggcagaatatttccgtctgtgacgccaagctctatttttccggcaagcagctggtccacacttaagtgaagtccctgacttaaccgccatacatccagcggatccagtacaacagaatctcccattcccgtacagcagtcaaaacagcccttacagtcctgacagtctgcctttaccatgtcatttgcctcgtataaacgaccgtcggaaatttcctccagtgtaacctcccgccgcattagacaagtgcctccagtcctgtaactccccagtcctcagccaggcttttcaacccgtccaggatctcctccctggaataatcgtgatcatccaggtaatctacgtccatatcattgagatgcagataaaaggtaagggcaagctccagataatccggatcatcttcctccatgttcataagaagctcattttccgctccgttgatgtcaccctcatcagcaagtccgataaccttcttaaaaagctggtctgcctctgtataatctgcctctgctgcaggaagtgtatactgcggcatatctcccttaagaagaagtcttgtgatcagtcttgcgatatcctgaatatttcctgacattctgtcatcctgtaatcccaaatcgttttcctctctttctgctgtcctgttctgccagacacatttctccgaccgacgtatctgcatccggtcctccgctcatccgaaccccggatatctggacaggcaatttatttaatccagtttaattcctgacaacgcctgcgcaaatgcattgttcaccggctcattggcctctttctgctgtttcttaagataacgctgcacatcacgcttattcacacctgcaccctctttggctcgtcttgcctggaaggatgaaagcttttctttatagccgcactgacatacaaaggtctcttcttttcccttcagaagcatctccatacgcttatggcatttcggacagcgcgcattggtggtcctggatactgtctctctgtatccgcattcccggtcctcgcacaccagcattttggcattctttccgttgactgccagaagatgtttgccgcagttagggcacttcttgtttgtcatattgtcatggcggaaggttccctgtccgcctttgatctcatctacgatctcacaggcatatttacggatccctgtgaggaatttatcctgacggagctttccgtttgcaatatcactgagcttcatctcccagtctgcggtaagctccggctttttcagttcttccggaaccagctccagaagctgtttcgccttggaggtaatgtagatctcattgcctcttttttccatcataaagctgttgaaaagcttctcgatgatgtccgctcttgtggccaccgttccaagtccaccggtctcaccaagggtttttgccgcttttttgtcgtggctttccataaagtggaccggattttccatggcaccaagaagtgtggcctctgtaaatctggccggtggttttgtttttccgtttgtaagggatgcggattccacggtaagtttctggccttccgtaagctccggaagctgctggtctttcagcttatccgatgaatcctcttcttcctcatcctgccagcctccttcatagacttctctccatccggcactttttacaatacgtccgcttgccgcaaaagtctctcctgctgctgttccttccatattaacctgctcataaacagccggcggatacagaacacttaagaaacgacgcacaaccatatcgtagatcttccgctcctcgtttgtcatatgatccagctgtacaaactgttctgtgggaatgatagcatgatggtcgctgacttttttatcgtctacaaaacttgcattggcctggactggtttattggcaagagctccggcaagtttccggtaggggccggttccgcatgcctgaagacgttctttaatggtaggaacgacatcctttccgatatacctggaatccgttcttgggtaggtaaggactttgtgattctcgtagagcctctgcatgatattcagagtttcctttgcagaaaagccgtatttctgattggcttctctctgaagagtggtcaggtcataaagccccggcgcataggtcttcttcggctttctggaaacctttgttatggtaaggttgctttttcctgcctttgtctggatctcctgggcacgctccttcttaaaggtacggaggcttccactttttccgtcacgccaggtccagcgtacatttcctgcctgcagagtgatcccgtaataatcctccggcttaaattcccggatctcctgctctcttcttgcgatcatggcaagggtgggggtctgcacacgtccgcaggaaagctgggcattatatttacaggtcagcgctctggtcccgttcattcccaccagccagtccgcctccgccctggcctgtgccgcacggtaaagatcatcataatcatggccgtttttaaggtgggcaaagccatcacggatcgctttgtccgttacggatgagatccacagacgcttaataggtttatggcagtctgcctttgcaaggatccaccttgctaccagttctccctcacgtccggcatctgtggcaatgatgatctccccgatatccttcctgtaaagctgggttttcactgcattatactgcttggaggtctggcgtatcaccaccagtttcattttctccggcatcatgggaagcgtggaaagctcccatttggtatattttttatcgtattcttccggatctgccagtgttaccagatgtcccagagcccaggtcactacatagtcttttccttccagggttccgttccccttctgactgcagtggaggactctggcaatgtctctggcaacggatggcttctccgcaattactaatgatttcatatttttttctttcacctcttactctttggagcttgtttcctaatagctccggggttcaactattatagcatgaaaaaagcacttcgtccagaaaagggccgaagcctttttccgtcgaaatgctctttactttcatattactctcagcagctgttcatgcacattttccgctgatcttatagcccactccacgaactgtttccaccagatctcctgccgggccaagcttctggcgaagggtacggatatgtacatctacggttctgctctccccgtcgaattcatatccccagatctgatttaaaagctgtgttctggaaagaaccgtaccactgtttttcaaaaggagacaaagcatctcgtattctttcagtgtcagattcacaggctcctgatcaacagttacctcatgtcttcccggacatacataaagattttccatacgatactcctctgcgccattgtcctctgatctccgaagaagggcacgtaccctggagatcagctccatcatacgaaatggcttcggaatataatcatctgcaccgctgtccagacctaccacggtatcaaactcgcttccttttgcagtaagcatgatcaccggaagtttccgcacatccggacggatacggattttttttaaaatagacagtccgtcttcctccggaagcataatgtccagaagcaccagtgaaggcagttctttttccagcgctttccagaaaagtgacggcctttcaaaaccctgtgcctccagtccctgactgtttaatgtatatacaacaagttcacggatactttcatcatcttccacaagatatatcataattttcctccagcttcatttttcatctgatacgtgcaagtataaggtgcattcgtaaaatccagcatagaaaaaaggttaagtttatgtaaaatatagaaatccttaagaaattttaatttgtaaaagccaaacgtcaatgttatgataaagcagagagttgtttggaggtttttattatgtattcttttattgtgaatcccaattcaagatccggtgaggggcgtaatgtctggaaccggcttcgcagcatcatggaaagtcaggggatctcatatcagtattttctcacagaatatgtgggacacgccacagtactggcacagaggatcagtgccgccggaacaccggaggatccggtaactctggtaactgtaggtggtgacggcactatttatgaagtacttaccgggatcattgatctgtcttcggttgtttttggatttattccggtcgggtccggcaacgatttctgccgcagtatgggcctgccctttgatccttttgaagcgcttcgctctattcttgagaacagacggaccattttcatggatgttcctgttctccaccttggcagccattcctaccgtttcggcatcagtgcaggaatgggctacgatgcggcaatctgtcaggaagtcctgatcacacctggcaaaaaatttctcaaccgtctccatatgggtaaactcatctaccttatggtggcactgaagcaatttctcttccttactccgtccccggtcacgataacacttgacgggaacaagccacaaaccttcagcaggacttggtttgcggctgtaatgaaccagaaatatgaaggcggaggctttaaattctgtccaaacgccagtccggaggatggtttactggatgtgatcgttattgaaggaatctccaagctgaaaatgctgttctgcctgccgagcgctctctggggaaaacatacccgcattcgcggtgtacatattttacagtgcaggaacgtacatattacaagtgcccattcccttcctgtgcataaagacggagaatccggcggaatccagcgtgaattttctgtgaccattgaaaagaaacctttaaaaatcataatgcctgtgttatagtagcaggtagatacttaacaaaaaagaagcttaaggctgacatcagccatacctcaagaaaaggagcggcaaaatgttgagtaaaataaaaaaatacaggcacggttttatcatagcgatctatttcgttgcctatcttatcctgtttggatatctggagcagcggcctgtacgagcctaccatgttgtacatactgtttttgatgatatgatcccgttctgcgagatttttattattccgtaccttttatggtttccatatgtggtaatgacggttgtgtatttcctgtttcgcaataagaataaaaaggaatatttccagctgatcttcaacctgatgatgggaatgacggttttccttgttgtttcctacatctatccgaacgttcagtatctccgccctgcggtattccccagaagcaacatctttacacgactggtggctgagatctatcggacagatactcccaccaatatcctgccaagtatccatgtatttaattccctggctgtttattttgccattcatcactgccaggcactaaaagacaggaaatggcttcagcgaggagctttgatcctttctgttctgatcatcctgtccaccatgtttatcaagcagcattctgtgatcgatgtatgtcttggcaccacactggcactgttcggacatctcctgttctatccacagagagtggatgattacgaggaacagcgttctctatcccatatgcgtaagaagaagccggaacagaatttataaaaaaaagccccgttgggggctttttttaattaaatccataaaacttctgacagatcttatatgctgccacaaacatctttcttccaccttttccgggaagattggacactcttccgaagagacttctccgaagcttccggtatagtcccatattctggtctttgatgtaatcctgcagctcctgttttttatccaggcattcctgtgttgcagctcttaccagcatgatcgaagaaacggttgtgatgatatccagatagctgaacatataagcacgaagcctgcggttgctcacattagccttcagataggcgtccaccatcagtttatttacacggatctgctgatcgatacgcttgatcatcactttctcattgacagactgatcatctcttccaataaaatatcgataaaaattcacatccagataatagagattttttacatagggaagtggctcaaacgcaaacaggttatctacgtagaacgtatgcttcggaagctccattccacagtcatggagaagttttgtacggtatatcatggaatgcataaggagatactggccttttttcatgtggcgtacctcatcccatccgaaaatctggtttgtcggaaaacagtgtctgtactgcatgacctttttgcgggtagctccctgcttctcataaacgaaattactgatgagaagatccacggtctcagccccacgtgtcagttcataaagtgttttcaggacctcatagtaggcgtcctgatttacccagtcatcactgtccacaaccttgaaataaagtcctgttgcgtttttgattcctgtgttgactgcctgtccatggccgccattttcctgatgtatggcttttacgatagttggatatttctcggcataatcatctgcgatctcggcagtacggtcactggagccatcatctacaatgatgatctccacttcctctcctccgatcagcagggaattgatgcattttgacatataagcctctgaattatagcatggtattgctacgctcaaaagtttcatgagttttcctccttcatatatctggtgtatgcgcgaaacgcagatggtattgcatattttttatcggattctctcttatccacaaacaggaactccccctgcggtgcttcttccagagaggatacagcgatacgataagcacacatcctccattcaatatgggaaaaaatgtgcttcgcatccggcagtgcttcgatccgcagtggttccagccccatggcttttacccgggcaagtgccgccttctccgtcagatgtccttccacatttggaagctcataaagacctgccagaagtcctgtatccggacgtttacggatcgctgtacctgctccgtcctggatcacaaggaccgttcgctgttctatggtgcgggctttcttcggtgcttttacgggaagttcttctacagttccatgctttctggcaaggcaaaaatgccccagcgggcattcttcgcactttgctgctccgtttggaacacagactacagctcccagctccatcatagcctggttgaaatcccctggtctgtcctcagacatctgctctgtaagatcattttccaccgatttccgtacagactgtttcatgatatctccacggttttcggtgagtcttgcgtatacccgcagcacatttccatctactgcagggactttctttccgtaggcaatggacgcaatggcacctgccgtatatcttcctattccttttaacgagagaagtgtctcaaaatcctcaggaatcctgcctccatattcttccatgacctgaacagccgctttctgcatgttgcgaacacggctgtaatagccaaggccttcccacagcttgatgatcctctcttccggtgccgccgcaagggctgctacatccggaagttcctggataaagcgctgaaaataaggtttcacagcttccactcgggtctgctggagcatgatctcagatacccaggtataataggcattgtctttatctctccagggcaggatccttttgtttttatcgtaccatttcagaaggggttctgcaatgttttcaggcatatcgtttcctttctataatcttaccggtatcggatcatagatcttcatggaatcttccgtgacagcacagtcataggccagaatgtgaacaccggcatctgctgccgccttaagtgtttctccaaattccggatgtgtctcccgatttggttcaaaataccttacacccttcatctggatcaccagaagaagatacgcctcatagccgtcagctgctgcatgcatcagctcacagagatgcttgatcccccgttctgtaggtgcgtccggaaagcgcacgatattattttcttccagagtgacgccttttacctcgataaaagcctttcgcttcccggattccacatacaggtcaaaacgggaatttccgtatgtcttttctctcctgacagtcactttctccggaaaaagatttccggccgccacccactcttctgctgctttatttggagcctgggaatccatattgatccagcggccctccttgttcacactgatcagatcgtatttcgttttcctggcaggattatcactcttttccaggatcacttctgcttccggaacaagaagttcccggcatctgcctgtattcttcacatggaccgtttccagctgatccccgatctgcacatgagcgataaaacggttcggcctgtctttgaatatacctctgatcgtattcttataattcatagtttttccctcgtaacccttactataacataaaatcttcaaaagcgcagttgcttttttttcttttctcatatagaattgttttgatcactgttcactggtaatattccgcgaggtgttttttgtgagcgaaggtcacagaaaacccgagacataccgcgcgaatttatgcgattagcataaattctgtgcatcgtgaagcgtattgctgagaacggagtgaacagtaacttgttttgtactatgtacagtacaaagggttgcttttttacatatcatagttttttggggaggtttttctgatggacagtattatttttgatgttgacggtacgctctgggattccaccgggatcgtagctgaggcctggagtgattaccttatccatacggagcacatggataccgatgtaagcgccaaacgactgatggggcttttcggccagctgctgccggatatcgcaaaggctcttttccctgagcttccggaagcagaacagcttcgtatcatcgacggctgctgccaggcagagcacgaggcactgcttcgcaaatgtgctccgctgtatccggatcttgaggaaacactgaagattctttccagccgttttcctctttttatcgtcagtaactgccaggccggatatattgaagtgttcctgaaatccacaggcttcggacactatttcaagggccatctctgtcccggtgacaccggcatggccaaagcggaaaatatcatgaagatccgcgaggataataatctttccgatccggtttatatcggtgatactataggagactttaatgcctgccggaaagcaggagttccttttatctttgctgaatacggtttcggtcaggtggataaaccggattaccggatcaccaggccttttgaccttacggagatatgcagatgagtatgaaaagatcaaaatccatagaccttacttccggtccgatcctgaaaacgctttcagagcttgctcttcctatcatggcatcttcccttcttggaactgcctataatatcacagatatggcctggatcgggcttctgggctccaaggcagttgccggtgtcggtgtgggcggcatgtatgtgtggctttcccagggactggtagcccttccgcgaatgggcggacaggtaaacacagcacagtcctgcggccggaaggattataaagaggcacgttcctacgcggccagtgccctgcagatgacccttctcttcggtctcttattttctgcagcaagtattatatttcttgatcctctgatcggattttttaatctgacagacccggaagcatattcttctgccagatcttatatgctgatcacctgcggactgatcattttttccttcctgaacctgactctcaccggactttttacagcccagggagattccaggtctccgctgatggccaattttcttggacttgtgggaaatatgctcctggatccgctcctgatccttggcattggaccttttccacggcttgaaacgttaggtgctgccattgccacagtaactgcacagttcctggtttttgcagtgctggttttccggatctttacttccgggctggaaacaaatgtacttcgtgaacttcatcttttttcacgttttccgggaaaattttataaaaatatcttccgcattggttttccaaccgctatccagagcatgctctactgtatgatctccatggtactgaccagaatggtttccgccttcggtgctgctgccattgctgtccagcgtgtgggcggacagattgaatccgtttcctggaacaccgcggacggctttgcctctgccttaaatgcttttaccgcacagaatttcggtgcaaaaaaatacgaccgcatccgccagggctaccgtatctcctttggtatcctgacaatctggggccttatcataactgcagcctttgtgctgctcccacgcccaatctccggactgtttttccatgatccggaatcccttgggatttctgtaaattacctgatcatcatcggcttctgtgaggctttcatggccattgagctgatgaccatcggtgcactgtccggccttggtatgaccaagctctgcagtatcatcagcattatcctgacaggggccagaatcccgcttgccatgctgctgactcatgcgggaatgggacttaatggtatctggtgggcactttcccttacttccatcgtaaagggaatcatctttactctgacattccggcagaccagccgaacgaaattaaaataaatacagacagaaaaactccccgcggataccggagcctgatcagacaggttaccgtttcacggggagttctgcttttttacctaaaggatagttctgatacttctgatcattttttgatacattttgttctgagtacaaacagaaataccgcaagtatcacaaacagaattactacataggcgatctttgctgctacacttgtggtgaatgcgtcaactcctgtagccactccgataagtatcagacagattcctgaaaccttttccatttttttctcatcatacttctgggctctggcctgtgtgtttccgcctttcataaaaaaggaaccgtgtccggtaaaaagcataaatcctactaccagtgctgcgattgtaagtataaagctgaatgactgatcaaacataatattttcctcctgctaaagaacaggagccacacaccggatcaccggctggctcctgtttgttttttgactacagatccgatcaatagaaacagacgatcggaacattatactggataatgttgtaaagctctcccgctttatccggcggcatattgatacagccgtgggaacctccggttagataccgatcgcctccaaaatacggctgccagtctgcatcatggaatccaatgcctccgttaaacggcatccagtaggttaccggctgttcataggaataggttccgtctggtttcttggtgccacgtagcacatccgggctcttcttataatacaaggtgaagattccaggaggtgtttttctcttcggatcacttgcaagtccggatacgatatctgattcaaagatcacatttccatcctgataataccacatatactgttctgtaaggtccacttcaatgtaggtatttcccaaatcattcacaccataagaattggctctcatggaataaaccggctctctggtcgtctgagctccggactggatctcctgggtaagctgtgccacctctccgtcctgatcgatcttccagccatatgcagaaccggaaaccgaaacagttcttccgcttgttgtctggaactgacgctctgtacctactgtatcatgatccgctgcaagctgtgccacataatccacgatatgctgtttgaaggatgcatcatcctggatcagctggcccttttcgtcaaactgcagccagttcttgatggtgcttccatcaagtgttactgtctcatctccaaatgtgtaggtgatgcttgccctcgcaaagttattatatgcatccaccgttgcctgcagatctgcactgtcgctggtcacatctgctttcacataagcatccgggttactgccaagatctacttccccgtcatcgctgctgatagcatcactgatcatctgataggcttcttttaccttcagttcacttcccactgtctccggcacgatcgtaaactcggaatcattaaagcttacgtacgcattctccggtgctacctgattctctttctgggcacagttcagtgctttcacttctgactccagctttgacttgtcaaaagctgtctgctcactggctgtgtaagtcgtcttttcaaaaaatcctctcacccattcatagggcttctgcgctttcaaaagcttcagaacttcaccactggatatataacgataactgatatccgttccttctatcgtctgcggttcctgatctctggcctttacctggatggaatagccttccattttttttgcgatctcctgctccacctcatatgcagtcctgttggagctgtcgatcccgttaatcgttgtgccctcaaagaaatgactggtgtaataataagatactcctgcatatgcacagcctgccactaccaaaaccatggcggcgatcattccggttaccttcagtgccttatgctttttcttttcgggtataacaataggttcaaattcagattcatcgataggtacgtaggtgatcttccttggccttgctgatttcgaaggtcgtgccgacttgtgagcagctgatctgttatttttattttcaggctgaggctctcctgcagtatcactgacgatctttgccatggcatcattgatcctgtcctcgatatccctcttttcatcgttgctcatatttattcacctctatgttcatgtgccttcaaaaaaggcatctttccattgatactttctggtcttactcaccagctttttcattatatcatactttccggaaattgcatctcatttcacggtttttttataacttatttgtaccgtacagcttccgcgccatatctttcataacatagaaatacattacccaaaggagcactgacgcaaagatccaggccaccggacttgcaagacaggtaccgatatagctgctttttccggctgcaacggtagcggtgatccctcttcctgcaagctcagccacaccggccatcataggaagaagaccatatcccattccctggatcccgtttcgcagtacattgacaaaatacagaggaataaaaaacagtgccacacattttacatagattgctaccataggaagcacttcttcaatgttatctgagataaacagatatgcaaaatattttcccgcaaagaacagaaaactaccaacaacaacagaatatacaattcctataaaatgcgaagcccggaagccttcccgcactctctcaagctttccggctccgatattctgtgcattgtaggtagcgctggcagttccctgtgccacatatgcctgggtgaagatctgctcgatcttacttcctgctgtaaacgccgccaccgcataagagccaagcatatttaaggctgactgtaccatcatggttccgatcgccgtaatggaatactgcagtcccattgggattcccacaccgatctgcttggctgcgaggttacatctgaaataccagtcttcttttttcatacggagctccggcacaaacttccagatatataccagacataagactcctgaaactccctgggaaataatggtagcccaggctgctccaggcgctcccagcttaaacacgatgataaatacaaggtcaagcacaatattcagcattgcagataagatcagaaaatacagtggtaccttactgtttcccagtgcacggaggatactggccaagatattatataatgcctgggcaaaaatccctccgcagatgatcataacgtaagcatatgcatccttgaaaatatcatccggcgtatgcataaatttcagaagtgcatgcatacctgtcatgctgactgctgtcatcactgccgagatcagcgctgtcaggatcagtgcatttcccacggtctgacgcatctcatccatttttcccgcaccgtacttctgtgcagtcagtacggtaaaaccggcagtaagtcccagaagaaagcctatgatcaaaaagatgatagttcctgttgagccaactgccgccagtgcctttgttcctacaaattttcctacaaccaccgcatctaccatattgtagaactgctgaaatacattaccaataaataccgggatcgtaaatcccaggagcacttttaccggttttccctgtgtcatgtctgttttcatgaaatcttttttccccccatttaatttgatcgttcataaactttgtgctgctttttgttattctttttattattctttctgtaactttacagttgctcaaaaattacctgtttttatgtatcagagggattatagttgaaatggaataattttacaagatgattttgaaaatttttttcatgtgtggaaacagaaacaatcggatgaaaaaatcccggcagatccgtaaaaatctgccgggattccgtgaagcttatttatttctcaacaagaagagactctcctgtcatttccttcggctgctccatacccataagctggatcagagtcggaacgatatctgcaagacatccgttctcacgaagtgtgtatttcggatctgcgtttacaaggataaacggtaccgggttcgttgtatgagctgtccatggctcacctgtttcataatttacaagctgctctgcgttaccatggtcagcgcagataaagagctgtccgtcaacctctttgattgcctctacagccttaccaacacacgcatcaacagtctcaacagccttgatcgcagctgcctcaacacctgtatggccaaccatatccgggttcgcaaagttgatgatgatcacatcatatttgtcagatttgatcgcctctacaagcttctcgcaaacctccggtgcactcatctccggctgcatatcgtaagtcggaaccttcggggattttacaaggattctgtcctctcctttgtttggctcctcaacaccaccgttgaagaagaatgtaacatgtgcatatttctctgtctcggcgatacgtgcctgtgtcatatcgtgagctgcaaggtactcaccaaaggtattgtgaagaagaaccttgtggaatgctaccagcttattctggatggtatcatcatactctgtgaagcatacgaatgtggtatccagtctctttgctctctcaaagcccttaaaatcgtcatcacagaaagctcttgtgatctctcttgcacggtccggacggaagttgaagaatacaacggaatccttatcggaaatagttgcaaccggtttgccatccttctcgataacagtcggaagcacaaattcatctgtcttgtcatcatcataggaagcctgaactgctgctgctgcatctgttccctttacgccttcgccctgtgtaagagctttatatgcaagctcaacacgatcccagcggttatcacgatccattgcataataacgtccggagatcacaccgatctcaccaacgccgatctctttcattttggcttccagctgctctacaaactctttaccggatgcaggcggtgtgtcacgtccatccaggaagcagtgtacgtaaactttcttgagtccctctctctttgccatctcaagaagtccgtagagatgtgtattgtgactgtgtacgccaccgtcagaaagaagtcccataaaatggatcgcggaatcgttgtcttttgcattcttcatagcagaaagaagtgcctcattcttgaagaaatcgccgtcctggatctcttttgtgatccttgtaagctcctggtatacgatacggcctgcgcccatgttcatatgaccaacctcggagttacccatctgtccgtccggaagacctaccgcaagaccgctggcattgccttttacaaacggataatctttcatgagtccgtccataaccggtgtttttgcctcatatacagcatttccgtcatgtctgtcattgagtccgtatccatcaaggatcattaaaactgttggttttttgctcataattttccccttcttatctttgatcgaaaatctgtctggcacagctcttcactgattctgaaaccctctgtaccattcaggattcttttgttttccattttatatagtaccaaaatccagaaattttgcaacgttttctttgacaaaaatttgtctgttttcaatttcccgacaactgatacggctgatctgtaaatttacgcgaaagatattatttctggtatacacggatcatagaagaaatctttcttacagatgcgctgttttccagttcttccttaaccttaaagaaagcgccctcgcttacaagtttggtgatcacaacaacctctgcggtatccggtctcttgctttctttctgcatgatctgtgccacgcttgcctgatattttgcaaaatgctccaggatttcagccagcacaccgcagcggtcctctacctgcaggcggaggaaataacggttatgggtatctgccatattttttaccggaagtgtcttatagcaggtgcagcctactcttccgcagcaatctgccttcatattacggactacctcaaatacatcaccggcaaccgcacttgctgtaggaagctcacctgctccacgtccgtagaacatggtatctcctactgcatctccgtgtacaaaaaccgcattataagaatcattgacggatgcaaggggatgctctgccgggatcagcatcgggcagacataggcctcaacgccgtcctcctgacagcgtgcaacacccagaagcttgatctcgcagcccatttcttttgcgtaacggatatcctttgccgtgatctttgtgattccttctatatgaacattatcaagggtaactctggaattaaaggcaactgatgcaaggatggcaacctttcttccagcatcaattccctcgatatctgcagtaggatctgcctctgcatatccaagttctgtagcaagagcaagagcatctgaaaattccattccctcctgggacatcttggtaaggataaagttcgtagttccgtttacgattcccataacttccgttacatggttggcctcaagactgttcttcaacgggctgatgatcgggattcctccggcaactgctgcctcaaacagaaaatccttctgcgctgccctggcagtttccaggatctcttttccgtggactgcgatcagatccttgtttgcagttacaacgttcttgccggctttcagtgctgcaaggatatacgtacgtgccggctcgatcccgccgatcagctcgatcacaatatcaatggaaggatcttcctcaatatctgcccagtctgttgtaagaacagaaggatcgtctaccttcccggacgctttctcaaggttacgcaccaggatctttgtgatctttacctggcatccaagcttggctgtcatttcctgctcctggcttttgatcactttatatacaccggttcctactgttccgagaccaagaagggccgcatttacgactttttcgttcattttctgatgtcccctttccgttttttccaatttttatcagagtaactcctatgttatggcagaaaacgctttttgtcaagttccggcagaggaagtaattccagccagctgccaaaaagtccggtgatcagttcctgcaccatagcttttgactgtggttccagtttatccagctggcgcaccatggcagccagacttttcagaccaccttcctggatttgggaaatggtatctgctccggttgcttccaacacagaaaagagttccccgatgagatgctctctctgctttttatccatatggtcgatccatttatgaagacttcgatctgacgccgcagctcttcttgtcaaactttccttctctataaaggatgaccccattacctcccaggtaaaagcatcatgctgcaggattcccttctgtgtactggctacgatccgcggatctttctgatggctgagcagcataccgatcacggatgcctcgggaatgatacgggtgacttttggcaaaacgctttccactcttccgggactgaaaaatccttctggaaaacccgggccatcattatcatagacagaaagaagcttttcctgcaggatgtcactgcactgcatcgctgcatacatagccagatttcctcctttggaatgaccgccgatccgcaacatggactgtatataagttccatgcgtttccagatattccaacgcttttctgtgcgatggaacaactccgttgcttaagttaaaatcctccttccatcccacaatggtatcatcggttccacgaaatgaaatatatgtggttccatcatccagtcctatagtcactgccgcaaactgctgagcctgactggaaaggatttcattgacaaagccccctactgtacatttccggaatctctccgcacaggccattttttcaaggagcaccggtgtattctgcagaaaggcgctttctgctttcagatccttcttcatttcccttctggaaaaagccgcaaagagttcttctacagaaagagtatttccgttttttacttctgccctctcatccagatcaagataggaaaaacacgccagtatcagattgtcaacttcattaaagggtgactgctcaaaggtaagatctcctctccagtcaagataatccagaatattccccataaaatcctccgcaaatgatcatataagcgtcttacgcacagctgcaggctttctttctattataatacgtaacggctgcatcacagcacagccatctgatgcgtttctgccgttatcagataaccgttttctgaaacgacataccctgccagatatttattgttatcataccataaatcctgatcatttgctcctttcatccattttttttctgagataaaggatgtaatgaatgcagccacaggtaaaagccggaaacagtatcgacaggcctgctgctgacatcatatagatcactgccccttttccgtcatccggtgttcctgccacaaaacagtagaacatggtagctgaaaaatacagtgtgatcaccactgaaattaagattttaaaaaacttcctcattgcttctcctttctgtagtgtcgatataaggacactgttgtgattccaattttaccttcataataagattaattcaaggatgaatcggacaggatatatatatgataaaatatgacagattttgggtcacgatgaaggagcgtgggatcactcagtatgatctttatgaacattaccagatcacccgttcacttctggacagacttcgaaaaaataaaaatgttgaaatttataccatagacaggctgtgttccattctccactgcgagattgaggacattgtggaacacgttcccgagcctgacgaaaggaacgaacatacagaaaaagcttcagagaaaaacaatccttactctgaagataagaaaaactctctctgactgtgatcagatgcagcttttttgttggctgtgctatccgtgtcagggagagtttttctggtttttttataaaaagatataaaaaaaggggccgaagcccctttttaaatggatcttatttgtagtttacgatctttccgaaatctggtttcagggaagcgccgcctacaagaccgccgtcgatgtcagcctgagcgaataagtcaggagctgttgcagcgtttacagatccgccgtactggatacggatctctgctgctgtagcgtcatcatagatctcagcgatgcatttacggatatcagcgcaaacctcctgagcctgctctgttgtagctgtcttacctgttccgatagcccagattggctcgtaagcgataactgctgtcttagcctgatcagctgtaacaccctggaatccaaccttaacctgctgacggatgaagtccattgtcacgccctgctctctctgagtaagtgtctcaccgcagcacatgatcggtgtgataccatgctcgaaagctttaagcatttttttgttaacgtcttcgtttgtctcaccgaaatactctcttctctcggaatgtccaagtactacgtacttaacgccagcatctacgagcatagccggagcgatctcgcctgtgtaagcacccttctcctcgaagtacatgttctcagcgccaacctggatgtttgttcctttagctgcctcaacaacaggaatgatgtcgatagccggtacgcagaatactacatcaacttcgtcgttaacaacaagcggttttaaagtctcaaccagctttacagcctcgcttggtgtcatgttcattttccagtttccagcaatgattttctttcttgccatggttttatctccttttttgtgttcttggaacactttattttttatcagtctttatcgttagctgctgctacacctgggagctctttgccctcaaggaactcaagagaagcaccgccacctgtggagatgtgtgtcatcttgtcgccatatccgaggatatttacagctgctgcggaatcgccgccaccgatgatcgttgttgcgtctgtctcagcaagagcttttgcaactgcctctgtaccatgtgcgaagttcggcatctcgaagcatcccatcggtccgttccatacaactgtcttagcatcttttacagcatctgcaaagatcttctctgtctctgttccgatgtccattccttcccatccgtccggaatctcaccacgttttacgatctggatgttgcagtcgttggagaagtcatcaccgattctgttatctacaggaagaagaagttttacacctttctcctctgctttcttcatcatatcgagagcatactgaaggtaatcatcctcgcagagggattttccgatatgtccgcccatagctttggagaatgtgtaggacataccaccaccgatgatcagtgtatctaccttgtcaagaaggttgttgataacggagatcttgctggaaaccttagctccgccaaggattgcaacgaatggtctctccggattgtttacagcgtttccgaggaaatcgatctctttctgcatcagatatcctacaactgctgtcttcacatatttggtaacacctacgttggagcagtgagctctgtgagcagttccaaatgcatcgtttacgaatacatcgcagagggaagcaagatcttcgctgaacttgtcttcgttctttgtctcttctgcacgataacgtgtgttctcaagaagaactacatcgccatctttcatctctgctacagcagcttttgcgtttggtcctactacctcaggatctgctgcaaattttacttcctggccaagaagctcagaaagacgaactgctacaggtgcaagagaaagctccggtttcggctctcccttcggttttccgaggtgggagcaaaggataacttttccgccgtctgcgatcagtttcttgattgtaggaagagcagctacaagacggttctcatctgtgatctttccatcctgaagcggaacattgaagtcgcatcttacaagtactttctgtccttttacattgatatcgtcaacactttttttgttcagcatctctatatctccttaacttttatttctgcaaaagcagatgaataagggcgagcggtattgttgtccgctctgttaacagtcatttcctcagatattcttttgtctgatcttttggaaaaaaagggcccggtcctcttcagaccggaccctttctgagtctattcttctacactcgttcgctgaaaattaagcgttcagaaggcttccgaaatgcttgattgtacgaaccatctggcttgtgtaggagttctcgttgtcataccaggaaactacctgaacctctgttgtgccattctcaagtggaagtaccattgtctgagtagcatcgaagagggaaccaaatctcataccaacgatatcgctggatacgatctcatcctcgttgtatccgaaggactcgttagaagctgctttcatagctgcgttgatctgctcttttgtaacatttccttcaactactgctgtaaggattgttgtagaacctgttggggtaggaacacgctgtgcagaaccgataagtttgccgttaagctctgggataacaagtccgatagctttagcagcacctgtgctgttcggaacgatattaactgcagctgcacgggatcttctcagatcgccttttctctgcggtccgtcaagtgtcatctgatcgcctgtgtaagcgtggattgtgcacatgataccggatttgatcggtgcaagatcgttaagagccttagccattggtgcaaggcagtttgttgtacaggaagctgcggagatgatcttgtcctcgtttgtaagaccctgatggtttacgttgtaaacgattgtcttaaggtcgtttccagccggagcggaaataactacgtgcttagcacctgcatcgatatgagcctgagctttatctttagatgtgtagaaacctgtgcactcaagaactacgtctacaccgatctctccccatggaagctctgcagcgttagccttagcatagattttgatctcttttccgtctactgtgatggaatcctctcctgctttaactgtatcagcaagagcatatcttccctgtgtagaatcatattttaataagtgagcaagcattttaggagatgtaaggtcattgattgctacaacctcgaatccctctgctccaaacatctgacggaatgcaagacgaccgatacgtccaaaaccattaattgcaacttttactgccatgataaattcctcctatgaattgaatggtgattaaatcgttcctttgttaaagaaacatcaacctgtttcatattgtacctaattccaaacaaaaattcaagagctatttataaaaaagaacattaaaataaatattaagaaaatttctgaaaaatgtgctataattctctgatagaaagttctgtcctgctgattcccaaaacggatatctatattcccgctgggagtttgactttcccggattcataacaggcagatacgatcattgtcacagaatataaaggcttgaatatggaggtacaaaatggaccagaaaattttatgggactgccatatgcactcctctttttccgcagattccgatacaccgatggaagagatgatccagactgccgcagaccagggtctcacgggaatctgttttactgaacattttgatccggattatcccgatactccggaaaatcttgatttttccctgaacatccctgcataccgccagaaacttgagagtcttgcggatgcttttaaagaccagatccaggttaacttcgggatcgagcttggacttcagcctcagcttgcagaatctttttccgatcttctgaaagaagttccttttgatttcgttattggttcctcccatgtggtgcacggatacgatccttattatccttcttattttgagggccgtaaggaatccgcatgctatatggaatattttgaatccatcctggaaaatatcgctgcttttgacgagatggatgtatacggacatatcgactatgtagtacgttatggtccaaatcagaaccgtcagtattcttatggaagatataaggagatcctggacgagatcctgcggacattgatccgcaaaaatgtgggaatcgagctgaacacaggcggttatcactacgggcttggtgaaccgaatccatgtgtcaatattatccgacgttaccgtgagcttggcggtgagatcatcaccatcggtgcagatgcccatactccggataaaatcggctatgcttttgacaaggcggctgatgttctccgtgaatgtggtttttcctattatgctgtatttaaaaaccgccgtcctgtttttcataagctgtagctctgtttctctctccggtgagagagtttacatttttataccgaaaaatatcattttatctaaggaggaactctatatgtcaacaaaaagactccagaaaaagaaagctgccatgcaggcaaaaaaagaaaagcagctgaaaaaaaatacctctgctgccggcaccagttccagtgctgccaaatctgttgaaaatgctaaagccgaagtaaaaaaacttgaaaccgtaaagaaggaaacgcttaaagtcgaaacctccaaaactgaaccgatcaaagtcgagacttccaagaccgagccgatcaaagtcgagacttccaagaccgagccgatcaaggtcgagacttccaagactgagccgatcaaggtcgagacttccaaggtcgagccgatcaaggtcgagacttccaagactgagccgatcaaggtcgagacttctaagaccgaaccgatcaaggtcgagacttccaagaccgagccgatcaaggttgagacctcaaagactgaaccggcgaaagttactacttccaagaccgagcctctgaaagtcgaaacttccaaggaggacacagcttacgatgccctctacgagaaacgtctgaaacactactacaatgatctgaaatggctctactgcgaactgttccgcgatcatccggaagttgccggcacattctcaagcctcacaaaaaaaatgaaagagatttatcgtgagcgctctctttccatgaaagaagctgatcagacctgcgttgcagatcctgactggttccgtaagactactttcaccggaatggctgtaaatcctgctgacttcgcagatactctttccggtctatctaataaactggactatatcagcgaatgtaatgcagacactctgtacctgacagatcttttccaggcaacctccaattgctcccttcgcattatcccggagatcggaacctccgaagatctgtacacacttgcagctaactgtaggaaagcaggtatccgcctggctcttgagatcccgttaagtctttctgtggatgacccacagtccggtgcgccatgtgtgctccagactccggcttatttcaatgcaatgcttcttcagatcctggagcttgcaaatgaaggtgcttctatattcagccttggtgtccttccgatgatgccggaagaaaatctctggaagcttcactctctgctgcgtatgacccgaatggtgtgtgagatcgtatgccccggaattcttctacttggcgaaacagaccgcccacctgcagaggctgctgcattcggcggaacttccgatatgccggaacttcacattgtaaacagcacccagctgatgtccgatctctggcataccgttgccacaaaggacactgcccttctccgccggggaatcgacagagctgcagaccttccgcaggcaccggtattccagaattacctccgtaaccgcaacacggtacgctggaatctggactatgatttcctgaaaggaagctttatcacagaagggcctcacagagattatctgaatgaattcctggcaggtattttccctgattcctttgcccggggtgaaatttatgtgaatccggaaaccgaggaatcggagctctgcggaacaaccgcatctcttgcaggaatcgagcgttttgattatgaaggaaatatggagggtgtcagccggggaatccgctacgacgtagcacttcatgcattgcttctttccctccccggaattccggtacttcgaagcggtgacgaggtcggacagctgaatgactacacctataaagctgacatttccaaagcagctgattcccgctggctccacaacggacgtttcaactgggcacttgcccggaacagagccgatgccgaaacgatccagggacgcattttcaacagccttgagcagctggaatccatccgtgctagccatccggtatttgcacctgaagtttctgcacatacactggaaacctgggaaaaagctctccttgccctggtaagagaaacttctgaagaaaagctgatctgcatctacaacttcagcgacctggataaggtagcctggatcaacgaacaggacggtacctacacagatcttctcacaggagttcagagagacgcacaggctgtagagatcccggccttcggatttatctggcttatgcacacgaaataatagctttgtcaggcggatatccacaatctgcattctctacacagctctgcaccggataactggataactgcttcacagtttatttgcaaaaaaggacactgccattttcaacgggcagtgtccttttttatttctcatattattattttctcagcttatcaataaatgcggcaaatttcccctgttccccactatccagcgaacgactgtaaatatttctgagccaggccgtgatcacatcgatcaggatcggagaaaatgtcatcaaaaggaacaccagaatgatcattccgaattccagagatcccagtgtcagaagattctgcagaatcaccgccgcaccgaaaaagatcacctgcatactgtaaatgatcacctttcgataggtattcaaaggcgcatagaccgtcttaagtgccgccatataattccatcctgtcacaagcacacaggctgtattcagcatggcattggaatggtatacattctggcataccagcatcacactgaacacacagcccgtgatggtcacagcagccggaaatgcgttcataaacacatgacgcaaaaatgtatggtcaatcttctcataattattctcctgtgccagaaggaacgtaggaataccaacagcacaggcactgatcaaagacatctggatcggctcaaagggataagaatccccgaagaagatcgtgatcagtgacagcagcacggaaaaaatcgttttgatcagaaacatagatgccgcagtacggatattatttacaacccggcgtccctgattcacaatttccggcattgctgcaaaattagaatccagcaataccacattggcaatattcttggcggcatcactgccctcagccatggcaatactgcagtccgcctctttaagcgccagaacatcattgacaccatcaccggtcatggcaaccgtatgcttctgagcctgcaaagacttcaccattgcctgcttctgctgaggtgttacacgtccgaacacactgtattctgcaactgcttcgtccatctgttcctgggttgtgatcgttgtcgcatctatataatgctctgcatttttaagacctgcacgtctggcaattgcagaaaccgtcaccggatcatcaccggagatcactttcagatcaacaccctgactttcgaaatatgccagcgtatccggtgcctctgcacggatcacatctgtaataagcaaaagtccgacaggttccagtccctccggaagctccgcaccctcactcacatttacactatgggcaaggaccagcacacgaagaccttcctctgcaaatccgccacaatactccatcaactccgggttcccttccgggaaaagaaactgcgctgcacccatcagataagtacctgcatctgtaaatgcagctccgctgtacttcctgtcagaagaaaacgggatcacatgatccagctccatatcctgagatactttaaatcttgccctgagtgcatcggcagtggcattctgatccttcagcacagaaagcagatttcccatgatatgctcgatctcccggatcttctccggattctcctgactgtgtttctccgggtcagcgtctgacttttcctgcaatacgagattcgcgcttccatcctcctttgcgatagcatctgttgctgaaactgcagaggcagcagaactttcagttccatcgctgtcaccttcgccggattcaggatctttcccggatattttctcggaaatctcatcatacaccggcggatagctttccaccgcttccacacacatggtaccctctgtgatagttcctgtcttatccagacagagcgtatccacgcgtgcaagagtttctatacagtacagttcctgcaccagcgtcttcttctgagccagcttcagtgcacccaaagtcagtgccacactggtaagaaggacaagcccctccgggatcattcccaggaccgctgcaaccatattgacaacagaatcccggatattatctcccacaaaatagtactgtttataaaaaagcagcgcccccattggtacgataatgatactgatcaccttcagaatggcattcagggaatttctaagctctgaattatggcgtttgaattcctttgcctcgctggtgatccttgacgcatagttgtcgcttcccacatggatgatctgacagcaggcctgtcccgccgtcacaaagcttccggaaaaaagctcatctcccggattcttcggaagattgtctgcctcaccggtaagcagggattcattgacctcaaggcttccctccaggatcttcgcatctgccggaacctgttctccggccttcaggaatatcagatcatcgacaaccagcttctctgtagaaattttccatttttttccttcacgcagaacaaccgtcttggattctgtcaggatggccagcttgtcaatagtcttcttagcacggacctcctggatgatcccgatcacggtattaataaaaatgattcctacaaacatggagtttttgtaggaaccaaccagcagtacgagaaccagcagcaccaggttcagaaaattgaagaatgtcaacgtattctccagaataatctgcttatatgtcctggtgttggggttttcgttattatttacctgaccctgcgcaattctttcctgaacttcttcgttcgtaagtcctgtcatgctccttacttacctgtcctttcaatggcttacggttctgttcaactgaagcttgctcatgccccggttatgatcgtaaataaaagggatcaatactcctcttctgtatcctcttcaccctcgtggatatcagacttcggtttggaaagaccctcgatcttaatgtgatgtttctctgcataatcccagagagctgcatgaattgcttcctcagcaagcagggaacagtggatcttcaccggcggaagtccgtccagagcctccataacggccttgttggttacttccatagcttcctcaatggtcttgcccattacaagttctgttgccatgctgcttgttgcaactgctgcaccgcatccaaatgttttaaacttgcagtctttgataatatgagtttcgtcatcgatatcaaggaatattctcataatatcaccgcattttgcatttcctacagtacccacgccacttgcgttctcgatctcacctacattacgtggatgctgaaaatgatccattactttttcactatacattattttttcctcctggcaagtatttttattattttttctgttttttaataaaatcttcatataacggagacatgcttcttaagtttgcagtaatatctttcagcttatctactacaaaatcaacatcctccattgtcgtctcctcgcttaaggtcatacggagagatccgtgtgcgatctcatgaggaagaccgatagctaacaaaacatgtgacggatccagagaaccggatgtacatgcagaaccgctggatgcacagattccaaaattatcaagcatcagaagaagtgactctccctcgatgaactggatgcttacatttacgttgttcggaagacgttttactttatctccattgaggcgtacgtacgggatctctgtgaggatcctgctgatcatatgatctctgatctcaatttcttttgcagtacgttctttcatggacttgtttgcacgctctgctgcaagaccgtatcctacgataccaggaacgttctctgtacctgcacgacgttttctctcctgtgctccgccatgtacgaaggagcggatcttaacgcctttacggatatagaggaagccgattcccttcggtccgttgatcttatgtccgctggagctgagcatatcaatattgaactcatctacattgatcgggatctggccaaatgcctgaacagcgtctgtatggaacaggattccatgctcatgtgcgatctgtccgatctctttcagcggctcaagagtaccgatctcattgtttgcagccataacagagatcaggatggtctccggtgtgatggctttctgaagctcatccaggtcaatgaaaccattctcatctacatccaggtatgtgaccttggcaccacgctctttttcaaggtactcgcaggtatgaaggattgcatgatgctcgatctttgttgtgatgatatggtttcctttatttttatatgcctcaaaggtcgctttcagggcccagttatcggactcggaaccacctgctgtaaaatagatctcctcttttttggctccgatcacatctgcgatctgctgtcttccttttgcgatggcagccttgctgtttgccgcaaaatcataaacagttgaagcatttccataaaactctgtaaaatacggcagcattgcctccacaacttccggtgcggtctttgtggtagccgcgttgtccagatatatcatttttcccattttcttttcctcctgttcaggataattatttttcgtgtattctccggctttcttcgatcagctcactgagcatcagggtatccactgcatctgtgatgctgtcattgatcctcttccacactaatttagccacgcagagatcggaaccctggcagccaccgtcaccttctgttcccggacatgttgcagcctccaggccaccctccaggacacgaaggatatctcccactgaaatctcttctgccggtcttccaaggaagtatcctccggctgcgccgcggacactcttcacaaggcccgctttcttcaaaagtgccatcagctgctccagatagctgactgatatattttgacggcccgcaatactctgaagcgagaccgcttctttttcactgtaaagaccaaggtctatcaaagccttaagtccgtattttgctcttgttgacagtttcatccgctcacctctttttcaattcccagtgttttcctcggatttcatgtttactctatcagaaacatatggttctgtcaagactaacttcttcatatactgacaaaaaagactcaaggttatccatgtcaaaaaaaatatttctcaaaggaaccctgattcttgcctgcacaggccttatcagccgtatcgcaggtttcttttatagaatattcctctcccatgccattggtgcggaaggtcttggtttgtatcagctggttcttcctctccagggacttatggccgctttatcctatacagggatccagtctgccctttcacgcctgattgcatccagacttgcccttcaggagaaaaaggaggcacgtttttcgctggtcacaggaacacttatggctgtctttttttctgctgcagccggttttctgctttttcagcacgcatatttttttgcttccgcaattctgaaaacaccgcagactgccggtcttcttcgcctaacagctgtcagtattcctctctgtgccattcattcctgcattgacagctattattatgcccggaaaaaagcctctgttccggcagtcgtgcagctttcggagcagtctgcacggatcggcactacctatatcctgtatctgatctttctttccgaaggacgtccgatcactgcattgatcgcagcgggaggttcccttgccggagagactgccgcttcgctggtgtcgctgctggtagtttcctttcatttcggaaatcaccctgtacacgaaaagactcccgtcaggatctttccgctgataaaggaccttttcacactgtcttttcccatttccctgaacaggatccttctgacacttctcggcagcatagaagcggtcctgatcccacagatgcttctgcgttccggcatgacagcctcagactcactgaagatctatgggatctttacaggaatggcactgcccctgctcctgtttccttccacacttacgtcttccgccgctgtaatgctgatgccttccatcgcacagcttgatgcactgggaaagcagaagcagatccgccgtgtcactgaccagaccttttttctgtgcatgttcctgggatttctatgcggaagcggattctttctttttggcccattcctcggaacattgctttttcacagccagactgccggaacctacatacggtatctgtcttttatctgtccttttctttatacaaacaccatgctcaccagcatcctgcagggacttggaaaaccggggctctgtctgatccacagtattgccggcattctcatccgtattttctccgttgtttttataattccggcaacggggatccgaggctatttttacggaatttttctgggtgagctgctgcttactcttctacacgtgaaagcgctaaaatttccctatcgacaatcggccaataatcgtttataataaataattgaaatgtctatagttatggaggaatgaagtactatgagttttgaattcataaaaaaactgccaactcctgaggaaatccgcaatcagtatccgctcgatgctgaacttcaggcgctcaaggagaaacgcgatgctgagattcgcgacgttttcaccggaaaatccgataaattcctcgctatcatcggaccatgttctgcagataacgaagatgccgtatgcgattatcttttaagacttcgcaaagttcaggaaaagatcgagaataaagtccttatcatcccgcgtgtttacacaaacaagccacgtacaaccggtgaaggatacaagggaatggtccatcagccggatcctgagaaaaaaccgaaccttcttgccggactgatcgcgatccgcaagatgcacatgcgtgctatccgcgaaagtggcttcacctgtgcagatgagatgctttacccggagaactaccgttatctctcggatctgctttcctacgttgctgtaggcgcacgttctgttgaagatcagcagcacagactcactgtcagcggcatggatgttccggctggtatgaagaaccctaccagtggtgactacagcgttatgctgaactccattgttgcagcacagggcgctcatcgttttatttacagaagctgggaggttgagaccaccggcaacccactctctcacgcaatccttcgcggtgcagtaaacaagcatggggaagcgatcccgaactaccattacgaggatcttcgtcttctctatgacaaataccatgcaaagaaccttgccaacccggcagtgatcgtggataccaaccactccaactccaacaagcattacgagcagcaggttcgtatcgcaagtgaggttcttcacagccgtcaggtagatcctgagcttcactccatggtaaagggtctcatgatcgagagctatatcgagccaggcaaccagaagatcggtggagatcacatctacggaaaatccatcacagatgcctgccttggttgggatgagtctgagaagctgctttacacgatcgctgaaaattgctaagttctgtctgatctgcagttcagaaaacggatatttgtgatccttttacactttatgttcaaaaaaagaaccggcattctcccattttggaagctgccggttcttttttgaacgcattttttatattatttcttacagatcaatgcctcggatgtgctttcatatatacgtctcgcattttcgcaacgccaaaattcagatagacctgtgtggtggaaatatccgaatgtccaagcatttcctgcacactcttcacgtccgctccattctgcagcatatgtgcggcaaaagaatgtctcagtgtatgcggcgtgatatcatgctggatcccggcttcctctgcatatcccttcagaaccttccagaatccctgtctgctcatggattttcctgaacagttggtaaaaagactctccgtctcattttctttcacaaattttccacgggcttccttcagatatttctccatggctgttttgcatacatttcctatcgggatcacccgttccttatcctcatcgtgacagactacataaccaagccgcagattgagatcctccagattcagccgcaaaagttcactgacacgcattcctgtagcatacaaaagctccagcatggcactgtcccggattcccttcggtgtattcagatccggctgtttcaaaaggcggtctacctcatccacagtaaggatctccggcatccgcttctcaaccttgggcggcttcagttccagagacggatccctctcgatcctgttctcctgataaagatactgaaacaaggcacggatagatgctacatttctggagatcgttgaggaagcgaactgtcctctctccatatagctgagatagccttctagctccagttctcctacatctcggatatcatagatcccacgatctgcaaaatacactgccatcttcttcaggtctctctggtaagatacttctgtattatgtgacgtcctttttctattatgtaaatatgtaataaattcccgtatctctatgtccatttctctgcatcccgtttctctaaaatcatactcgtttatgactgaattatactgtgaattttacataaaatcaaacagtttttcatcgtaaaaccgcacaatttcaacactttccggcacaaaccaccaaatatcgcagattttatggaaaccatcactagatattgtggaaattttcctcaaaaaaatttcaggccctttataactttttctacgatccagggattcagaaaactttctgcaaggattcctcctgtatacagcagaaaaactgtgatcccctgccgaaaataagcccctgttttctgcggcacaagtccataatttttccagatcccatacgattgtctgtatacgatacctgcaagataaaaatacgccggaatatagaccagatactgcggcatcagaagtccggcgccggccacaccgccataaataccaaattccagaaccgataatgccaggatcattcctgtctccattcccaaaaacagcatatatgcgaccgtcaaaggcactccgaatattgtaaatccgcataaaaacaacagaagaaaaaaaccgcctcttcgtcgcagcacttccaggaaataagctccgccggaaatatcttttcctgcaaagctgcggatcagataaaaagaagccagggttttctgtttccactccattttccagatcagattcggcaacacatttcccgcaaaaaatccggtcataaaaagaagctccgccggaaaacgtccggcatttttccacttccggttctctgtcttactctccatttactcaccctgtaccagtttacgcctgtttttccggtaatatgaccgtttttccacatgacaaaaaggccggccagctaaaaagctgtccggcctttgatatttccagaactttcttccattgaaagcttattttgcgtagtcaaccgctctgctttcacggatcacattaactttgatctgtccaggatactcaagctctgcctcgatctgctttgcaatatctcttgcaaggagaaccatatctgcatcacttacatgatctggcacgaccataacacgaatttctcttcctgcctgaatagcaaaagatttctctacacccttgaattcattggtgatatcctcaagctgtttcagacgattggtataggtttccagggtctcacgtcttgctccaggtcttgctgcggaaattgcatcagcagcctgtacaatacacgcgatcagagattccggctccacatcaccatgatgagacgcaaccgtgttgataacgatcggggactccttgtatttcttgcagagatccacaccgatctgaatatgagaaccttctacctcatggtcaatggatttaccaatgtcatgaagaagtccggcacgcttggccatacgcacatccacaccaacttctcctgcaagaagtccggaaagctgtgcaacctcaattgaatgtctcagagcattctgtccataacttgaacggaatttcatacgtccaagaagcttcagaagttccggatggattccatgtacccctacatccatggcagcattctcaccgtcttcccggatctgtgcttccacttctttctgggctttctctaccatctcttcaattcttgccggatggatacgtccatccacgatcagtttctcaagagccactctggcgatctctctcctgatcggatcaaatgcggagagtaccactgcctccggtgtatcatcaatgatcagatccacaccggtaagtgtctcaagtgtacggatgttacggccttcacgaccgatgatccttcccttcatttcatcacttggaagctgtaccacagaaatcgttgtctcggaaacatgatccactgcacatttctgaatggcattgactacatattccctggctttcttattggcatcttccttggctctgttctcaagctctttatagagtcttgcaacatccacctttacgtcatcttctacagatttcagtaattcttcttttgcctgttcggaggtaagacctgaaactcgttccagttcctgtactcctttttcctcaagttcatttactcgtttttctttttcttgtaactcgttaaatttcgctgtacattccagctcacgcttctccactgcattggcttttttgtcaacagattcctcttttgacaaaactcgcttctcgtatctctgcagctcgtttctccgttccttggtttccctttccagttcatttttagttcgcagagattcttcctttacttcaagtaaagtttcgcgtttcttggtctctgctgctttcaatgcttcatcaagaatattccttgccttatcctctgctgtacctatgatttccgcatccttgcgtactttcttgtcaacagcaaccttgcaagtaacaggaactgcaataagtagcgtgactaccacagcgacaataacaccgataattgtgcctgccacaggagcacctccttatttagttttcattgtacaaatacaacaatacaagtttagctgtttttcacatttatgtcaagtttttctcatgaaaaagcagattttggttagcacatataaactggctctttttctccgcagagttattgttactgttcactccgttctcagtaacacgcttcgcgatgcacagaatttatgctgatcgcataaattcgcgcggtatgtctcgggttttctgtgaccttcgctcacaaaaaacacctcgcgggacattaccagtgaacagtaacgagttattccatatcacggttcacccggatgttcatttcttccagggtatgggaaatatcctcataccggaacgctcgtctggccagatatccatacaaccttcgcatctgtccttcatcaagctctgtgtccggcgcatatttcttttcgatcgtcctgcgtaatacctcccgctcgtccggttccataagctcttccatctcattccaggcatccagggcagtctgacggtccacaccctttaactgaagttccgagaggatcttctgacgacttctggattccatgcggaaggagatataggttctggcataacgggcatcgttgatatacccataggacttcacataagcaatggcatcttctactgcctccggtgaaaattcagcctgacggagtttatccgtcaggcctttctctgtgcggtccatatgttccagaagccgcatggctttctttcttgcacggtttcgttcttccagatccagcatggattactcttccttctctgtatcttctgcctgtactactgcttctgctgtctcatctgccggatccagatgataatgtacacgaaccttcttctcgatctcatcgcggatctccggatgctctctcaggaataatttggcattctcacgtccctgtccgatcttatccccctcatatgcataccaagctccgctcttgtttacgatggagcattctgcagccagatccaggatatctccctctctggaaataccggttccgaacatgatatcaaactctgcctgcttaaatggcggagccaccttgttcttaactactttcacacgggtgtggtttccaaccatctcaccaccctgcttcaatgtttccacacggcgtacatccatacggacagatgcatagaatttcagcgcacgtccaccggttgtagtttccggattgccaaacatcactccaaccttctcacgaagctggttgataaagatcaccacgcagttggacttgctgataacagctgtcagtttacggagtgcctgtgacatcagacgggcctgcagacctacatggctgtctcccatatctccttcgatctcagccttggggaccagggctgcaacagagtccacgatcacgatatccacagcaccggaacgtaccatagtctctgtgatctccagcgcctgctctccgttatccggctgtgaaatataaaggttgtcgatatcaacacctatactcttggcataaacaggatcaagagcatgctccgcatcgataaatcctgcgattccgcctctcttctgcacttcagcgaccatatgtaaggctaccgttgtcttaccactggactccggtccgtagatctccacaatacgtcccttgggaacaccacctacaccaagggcgatatccaagcttaagcatcctgtgggaactgcctccacctgcatatgggaactggaatctccaagcttcatgacagagcctttaccgaactgtttctcaatatttccaagagccgcttccagcgccttctgcttctcttcactgatcattatgtaatctcctattctttattctctttctaatcaggtttcctttaatccgaacctttgttcgtgttttctgtattacatagtattataaaacggaatgattgtcaataagatacttgaaaatccctctgtttttttgttgacaggatctctgaaaatccgacaaaaggcttcccatacatgatttctttttcctttctgaatgcaaaaaaagcagataaaaagatttccctcttcatctgctttttatgcaatatatttcctgtcactgatcgttggtcagcttcagtttgtccagaatatagaatacaaggcttaatgccatggcaaccacacatgccagcaccataccggtaagctcaacatttccaagcttcagggcaattccggaaagacctacaacaaagacaacgcttgtcagcgtcagatttctggacttgctgtaatccacgtgattgtcaaccagcatacgaaggccggaggttccgatcattccgtaaagaaggaaggaaatcccaccgatcaccggaccgggaatggtactgatcagagctgccagtttaccaaggaaggaacagcagatagaaagcactgccgcaccaccgatcacctgtacactgtaaacctttgtcactgccatgacaccgatgttctcaccgtaagtagttgtcggcacagaaccaaggcatccggaaactgtggtagagaagaaatctgcaaacagggatctgtggagacccggatctttcagaagatttcttccaacgatctttccagttacgatctgatggccgatatgctcggaggttaccagaagcaatgccggaaagatcgtcataatggcctcaaaattaaatttcggagatgtaaagttgggaagagccaaaaatgccgcttcccttacctgtgtaaaatccagaagcccgcatgcacctgctgccacatatcccgcaatgatcgcgatcaggatcggaataacagaaaggaagccccggaacaggatctgcccgaataccgcaactccaagtgtgaccagaaatacgatcacattcttcggatctaccttctcgtccagaagtcctgccgtacttgctgcatttcccgcaagttccagaccgatcagtgccactaccggtcccattgccgctgtaggaagcacgatatcaatccagtctgttccgcactggcggacgatcaatgccacgcacataccagcaatacccagaacaacgaaaccaccaagggcatactcatatccatacttgctgatcaccagaagagccggtgaaaggaaggcaaaactggagcccaaataagccggtgcctttccttttgtgatgaaaataaaaaggagtgttcccacaccattcatcagaagcacaatagccggactgataccaaaaaggaatggcaccagtacggatgctccgaacatggcgaacatgtgctggatacttaacggtatcagcatctttgcaggtactttttcttcgacctgtatgattcttttttccactctcaaatcctcctgttttttattatctcacagattatagcacaagttttcacatcgtgggagattttttctgaaaatatacggatactgtgtggtatactgttattatctccggaaaaacagaacggcttcataaatgcg

SEQ ID NO: 270 - DNA, 21509 bp, Unknown
  gut microbiota DNA sequence
agaaaggaatattcttctatgaaagcataccaacgacttttatcctatgtaaaaatatccacacccagcaatgaagaaagctcttcttccccctcttcccagtgccagtttgacctggcccggcttcttgtggaggaactgaaaggccttgggatctctgatgtgtctctggatgaacactgttacgtttatgcacatcttcctgctacagaaggtctggagcactgcaaagcactgggttttatcgctcatatggatacggtttccgatttctgcgaccatgcagtcacaccgatgatcacagaagattacgatggaaaagagctccctctcggcacaagcggcagaactctttccccggaaatgttcccccatcttgcttcacttgccgggcgtaccctgatcacctcagacggaaccacgatcctgggcgcagacgacaaggccggcattgcagagatcctcactgcgctggagcatatccttacggaaaaaatacctcacggacctctctgcgttgcttttactccggatgaagagatcggcatgggaccggcccactttgatgtaaaaaaattcggtgcggattatgcatataccctggacggtgatacggaaggcgagatccagtacgaaaactttaacgcctgcagtgcaaaagtaaccttccagggtgttaatgtacatcccggttcttccaaaaatactatgatcaacgcagccctcgttgccatggaatttaactccatgcttccggcagcggacactcccaggaatacagaagactacgaaggattttttcatctgtgttccatgaaaggagatgtttcccaggctgagcttcagtatattgtccgggatcacgatgccgcttcttttgagatccgtcagaaaacgctcacacatatcacggagatccttaatgaaaaatggggggaaggtaccgtaactcttaccctcacccagcagtaccgcaatatgaaagagatcatcgatacctgcccatggctgatatctctggcagaggaagcctgccacagctgcggtgtcacaccgctgatcctgcctatccgcggcggcacagacggtgcacagttaagctttatgggactgccctgcccgaatctcggaaccggcggacatgcctatcacgggccttatgagcacattacagcagaaggaatggatgccgctgtgaacgttactctggagatcataagactattttcacagagaaaagactgaaaagaaacttttcttcgaaagtctgcattccctgaaatctgatataatgaaaaaatactcacagatcctccggctggaaatctgccggaacaaatctgtgagtattttttcctgtgctagctgtgttcactttgagttctgcaccgaataactgtattgccgtttactgatcggacttacagatcagatgatcttcatcattctcgccagcttcttcatatatcttccaccaggcatcatacccagctcatcttcaccgggcttgcttacaaacagatatacaataaagtatacacctgctgccaggatcacggaaataccaagacagatcacattggaatggatcagtgcatacaatccgtaatacaccactcccgcaacaactcccatcgggatagatgcaaggaacgggcttaaataagcacttctccacggattcttatagcccatatatttcttgatggaacgatcattgagaagacacatcacaactgcataaacgatctgggcgatgacaatggtataaacaccaagattggtaaataccagcagcagggccatggctatcacatctgccaccagtgcaatggctgcatggatcatcgggagcttcggcttgccgattccctgaagtacaccgttggtgatattggagttgccattcaggataatggtgattcctcccaggatcagaagctgtccgcctacaccattggttcccgggaagatcagtctcgtgatcggtccggaaagaactgcaagacctactgccgccggaatggagatcagcatactgatccatgtggcacggtctgtcttcatatttgcaccttcaatatcgtgcattgcataatgcgcggaaacctcagggatcatagatgtcggtgctgtacttgccagggtaagcgggatattgatcagcgtcatataatatccgtactcggaatacaaggtctggatcacgtccttggcagcacccttgatatccatgatgccggaatacatatagctgttgatatatccgtttacattataaataaaagcactgagaatgatcggcatgatgatgagcacgatattactcattacatgacccatactctcatttacagaatggcggtcattgacgatccttttccggatgatcttacggtttaccccataaacgatcagcataaagatcagcgcggaagccacacctgctccggtacccatggtagcacctgccgcaccccagcgatggaccagatccatatcttctgttgcggaaaaatgctggataaatacatgtgacatcaaaagcgcaaaggttgccacaaagatctgctcaatgatctgcgagatcgatgtaggcatcatattgcggtatgcctggaaatatccacggaatacaccgcagagaccggacataaaaattgtgggcgcaagcatctgcagtgccagacgggcgttcgccatactgtccggaaccaggatccctgcaccaaatacacagatcagcgccacgataccgccggcaactgccgcatagatcagtgcaccgtaaaataccttctgtgcatccttatatctgtgaaaagcgatcttctccgccatgatcttggatacagcctgaggaatactgaaggacgcgatcatcagcaggataaaatatacattctgtgcaaactggaaaagtgcaaagctctgacttcccagtgtagttgaaagcggactcttgtacagcattccgatgatcttggagatcagcgccgcaaccataagaaaagatgcgtttttcacaagtgtgttatcattttttttacccattttactttccttaacttaaatattctcaatctgccagtcaacaggttctaccccattggctttcaaaaattcattagccttgctgaaatgcttgcatccgaaaaatccccggtaggcagaaaggggacttggatgtggtgcttccaggatcagatgcttcggattatgaagcatggatgccttcatctgagcaggccgcccccagagaagaaacacgatcgggcgatcctcctggtccaggatccggatggccgcatcggtaaactgttcccagccgattcctctgtgggaattggcctgatgtgcacgtacagtcagcactgtgttcaaaagaagcacgccctgctttgcccatttttccagattaccgttgtttgggatataacatcccatatcatcctcaagttccttataaatattcaccagagatggcggtgtttccacacctttttttacggaaaagcaaagcccatgagcctgtccgtcattgtgatagggatcctgtcccaggatcacaacctttacctgatgcagaggcgtaaaatgaaacgcattgaacatatcttccggcggcggaaaaatctttcttgttctgtattctgtcatcacggttttataaagtttggcatagtagggctgatgaaactcacctttcagtgcctcctgccagtctcctgctataggagccatatctatcacctctcatccaacttatcttctcacggaaattcctttttccgcaaggtaatccttcacttcccggatctccagctctttgtagtggaacagagatgctgccagtgccgcatctgctccgccttctgtcagtgcatcataaaaatgctccagggttccggcaccaccggaggcgatcaccgggatggaaaccgcatctgcaacggctcttgtaagttcaatatcatacccggccttggttccgtcacagtccatgctggtaagaaggatctcacctgcgccaagttcttccaccttctttgcccattcaagagcatcaataccggtatccagtcttccgccatgtttgtagatattccagccgccatcctgtcttctcttggcatcaatggcaactactacacactggcttccgaatttctgtgcggcctcatggatcagctccggacggtcgatagctgcggaatttacagaaatcttatctgcaccttcacggagaagcttccggaaatcatctacggtacggattcctccgcctacggtaaacgggataaatacgttggctgcaacagctcttaccatatccaccacggtatcacgctcctcgcaggaggcagtgatatcaagaaaaacaagctcgtccgcaccggctgcatcgtaagctttggcaatttccaccggatctccggcatccttaagatcaacaaaattcacgccttttactacacgtcctttatttacatccagacatggaatgattctttttgtaaacatgattatgcctcctttccggtgtctgactcaagtgccgcaaaattctcaaggatcttcaagccccaccggctgcttttttccggatggaactgacacgcaaatacatttcccttctccacagacgcatggatgcatgtgctgtactgagtggtcgctttcacgatctcttcctcctctgcctgaagataataggaatgtacaaagtaaacgtatgtgttttccggaatacccttaaataatcttccgctgttctgaatatgcagggaattccagcccatatgcggaatcttcagtcccggacttggcgggatgcgcaggattttccccttcaggattccaagaccttccactcccggtgtctcatcactgctctcaaaaagcagctgcagtcccaggcatatcccaagaaagggcgttcccttttccacgatctcatgtattaccggaacaagtccgtattttttgagattttccatagcatcaccaaagcttccaacccccggaaggattactttatctgctttcagaagcacctggggatcccttgagacgacagtctcctgtcccagatactgaagtgctttttccacacttttgatgtttcctgcatcatagtcaatgattcctatcataataatgcttcctcctgctcttttgtatctcgatattcctctctcaccttcgatttacattgctttagtataacgcaaaaacaggcggttgcaaagacttttctctgctgccgcccattttttcacattatcacggtaaagttttattatttccggtccagtgtaaaccagaattccacgccattatcaaagttctgcacgccatattcctggttcatgctttccatgatggcctttacaatggataaaccgataccgcttccgccgtattccctagttctcgctttatcaactttataaaatttattccagagattcggtacatctgcctcagggatcggagtccctgtgttaaacacactgatcttcacacggttaccctcatcctgcagcttgatctcgatttctttctctccctccagatggttcagggcattgcttacatagtttgtcacaacctcttcgatcttaaactcatcggcccatacataaaccggcttctccgcctcaaagatcacttttgcattcttctgcccgatcatgatattcatggtctgaagcacgccgcggatcagggatacgatatcaaaccgctccattacaactgcatctttgccggattccagctgattcagtgttagaagattttttaccaatttattcatcttggaggcttcatccataatgacatcgcaatagaactctctgctctcaggatcatcagaaatattttcttttaagccttctgcatagccctggatcagggcaatgggagttttcagttcatgggacacgttatccagaaattcctttcgcatcttgtcgatcttgatcttgtcctcaatgtcacgctgcagttcattatttgcagatttcagttcactgatggtagtctccagctgtgaggacatccggttgaaattatctcccagaacatcgatctcattgccgaccttgctctcgtattttgcctcaaaatccagatctgacatttttctggaaagttccgtaagctcactgatgggacgggtgatcctcctggtcacgaccataatgaccagaccacttaagattatgatcatcagacctaccgcaaagtaaaacttattggaaatatcagcgctctcccggatgctctcaaggggtgtccttatgataaaataatgttcctcatccagctgtccccagcattccacataatccattcccgcaaaccggtcatgcgactgctggatggtataattgtcaccctgcttcaaggtccggctcttatctccgtcctcatccagatcatagacatatccgaacagcttgctctgaagcattttttcattttcgccccaggaaagccagctggtattgctgctgtcaatgataacccaggaaagattgtttctggagcaggctctctggatctcatcgggaatactctccatacctttcgagctgttgctgttcatcatcttgtcaatatctgtattttccagagttgttcggagattcagaagtacatcgatcttttttgtcacataatatttttcaagaaaggctccgttgatcacggtaatagtcagaatggataaaaacagcagaccgataaagtatgctgtgatctgatggcggagactgtggatcttttttattttttccttcgtttttttcattctcctacctcaaacttatagcccatcccccagactgtcttgatatactcgcccttatcgcccattttacttctcagttttttgacatgagtatcaatggttctggcatctccgaaataatcataattccacacagaattcaagatcttttctctggaaagagcgattccctcattctccaggaaataagtcagaagctcaaattccttgaagctcagatccatcggtttatcatctaccgttgcctgatgcgctgccttgtcaatgacaatcccacctgctgaaagtatctcatccgggttgctctgtcccgttcttcgaagaatggcttctacacgtgctacaagaatcttggggctgaagggtttggagatatattcgtccaccccgagttcaaatcccagaagctcatcacgctcatctcctcttgctgtcagcataatgatgggaaccttggaatttttgcggatctcacgacatacttcccagccatccatcttcggcatcatcacatccaggatcagaagcgcaatgtccttttctttataaaaaatatccatggcctcctcaccgtcaccagcttccagtacctggaaattctttttggtgagaaaatcctttaccagttttctcattctgctctcatcatctactacaagaatttttaatgcatccattctatcttcctccgtttctcagtcgctgttccgggcagctgctgacagcccgaaatgctctgtatcatccctctttacaaaaagctgagcttttacttccggttcattctaaagcggatatttccattccgctttgctactgctcataatatatcacaggtttgtgttgtgtgtgtgaacgtaatttcattttttttaattttatccgcaaaaaaggagaaccctctaaaaggattctccgatcttttctcccatgaatactcttgtttcaattccttcacgggaattgtttaaaatatcttcatccggctttaccgaatttttttcggtgatcagcacaatggtggagccgccgaaagcaaaatttcctttttcgtctccccgtttcacaaatgctttccctggccggttttcgatccttccgacaagaagagcacctacctccatcatcagcacggtacggaaattctctgttttcaaaagagaatactctctgctgttttccttgtagatcggataggcatcgttggccacggggttgactgtatgcaggatccccgggatcttgatgcgtccggactccgtcgcattgtccggataaatatatctgtgataatcctgaacagagagacgaagcacccacacatagccaccctgatatctttttccaagagaaggattcctgagaagctcatctatggtatattcggtctgtttgatatgaagacgggctttttcatctaccggatacacactcaccctgcagtcacagggactgataaaatgtcccggttccatatcaatatggcgggcaccctcccggatcttccgcttgaaaaagtcattgtaggaagtatacttacgcttttcataatcactcatatccagatgattgaaccgtataaagggtttcaccgctgctgccgaaagtctggaatccagaagctttcccatggcaatggaaacaacaggagtgaccagcggccggatcagcatgcgtccggctacagaaccgtagattttttccagaaggttgttctgaaaggaatcctcctgtgtaatatgccccattctgtccgctgtccggatcatagattaccacctctctccatggaaagcttatagagataattgaacttccaccatccttcgttgtagaaaagtacaagaaggactgccacagaaactaccgcaacaatgatcaccagctccctgttggtgggcttacggaatttaaaatccaggataaacagaagtcctaccgtcagcattgcaatatgaaggagcactacaaaccatttatactccggaaaaagcagggataccacaaatagaagcggcaggaccacagacatggatgtgatgggaagtccctgataatattttcggttttcggaggtttcattctgacgtttttcctccataacattgaagtatgccagacggatcaggcctgccagaccgtaaaataaaagaatagctattccgtagatatgacacattccaagcttaaatcccagcacaatgggaaggatcccgaaacagacgatatctgcaagggaatcgatctggatcccgaagcatttctcttcctccgttctgttcttcttggttcttgcgatctttccgtcaaacatatcgcacagtccggaaaatgcaagacagcacaccgctgctgaaatatggtccgtcacagcgcagaagattccgatcatggaagaaactacgcttatgtaagtcattattaccgtataatcataaaatcctatcatttgcacacctcttttttctttttcatgtcaggctatattcacagtcccacaggggacttacctgatctgggtcaagcagatctccgcgatctgcattcgatcaaatcttttcaggattccttttttccgatagtgagctgagccaccgcagtaaacaccgcactgatcagcagctctccgtaatatcccagccctctgctaagcaccattcccggaagcagcaggccaccgaataccggactgaaaatggtaagaaacaaagtctcactaattcccattcctcccggaagcggcagcatatccacagataccgatatcactgcctggagaaaaaggatatcccagaaaccggttccatggagtccaaaagcctgatatacgaaccaggttactgcaaacagtgccatacgctggataaaagtgatccctattactttaacgatcaccagcggattattcttcagatatgccgcagtatttcggtaagtatccatggaagcttccagttttttcagccgtccctcttttttccgtatcagatgaaaccgttccagaagcttcattcccttcaccaggatcgcttttgcaaaaagcggatgaaataccagaatggtcataaaagtgacacagaaaatattcagcatcagtcccagataaaacaccggcaggattccttccaggtatttgtgaagaaatcctcttccgaaaattgcgatcccaataccgatcaccacaagcaccagcttataggtaatcgtcacgatcattagtatcaccgttgacaccggaatggaaatcttctcttttttcatatagtagatctgcatgggctgtccaccgctggcggatggtgtgatacagctgaaaaagaatcctacagacgaaaacagaaagcaggttctttttttcagatgaatcccgctggaacgcatcatataccagataatgatggattccccccagataaaaaatgctaccagtgcaattcccggaagcagccaccgtttatctgccctatgtatggcatccatcatggaagacaggtcttctccgtgaaaaacgccgtagatagtcagggcaaaaactactgccaggaacactccgttaaatatgatcttttttctgctcttcatcacttgacaccttctgtatagctgttgatcttcttttcaattttagttccaaaccgttcataaatatgccagagttttgttttctgtcccagaataaagcatacctgagccaggatcacgccacctgccacatccacaagtacatgctgcttggtaaaaatggtagacagaaaaaccagcacagccagtgtaaacgatacccccttataccatgtcggaattcttttctgatccttgatccccagaaaacagaaccagcttaccagacaatggatagatggaaacaggttatctgccgcatcaatggaatacagccagccggccagcagatcccagatcccgtttccttcgatcaacggtcttgtattggtagtgggatatgccagaaatatgatcagacacacacaacgggatataatatccgcagtaaaaaaacggtaaacctgttcccgctcctgccttgccgcaaggatataattcactgcccagaatacataacagccaaaatagataatcaaaaactgcggcacaaatgggagccgcagatcaagattactttctatattgtgatgataccaactgcctgcgatcgcccttgaaccggaatatacaagacagttaaatacaaatgaaaaaacaagggggaaaagcccgtacgcaggtacgatccctgttacatatttccaaaaatgtttcataaattcacgcctcattattttattgatatcaggaataaaacatattcttctcctgctaacatctaatagtcacagtataacagtcggggcgtatggtttcaactaaatatggaaagtttaagaattgttaagatttgagttcagttattttttcttttttgttcatacttttttcagaatgacgtcacagaatgaccacaaaatatgagtatattattagatgtgcaaagggtactacctttgataacacttttttctttttcatactgccggggctgcctccaaacaaagccccggcctccttcctttttattttcccattttttaattatgccatgcaagacgtacactggatggatgtacttcttttgtcatccagtccacatcgttggtgatccagtccataatcccgagctggcgtgtctcccatgcgatggttgcctctcttgcttccggcgtttcttccacttccatagttgtgtcgatctcatcatatccaaaaatatatccgcctgcactccagatgctgaagttgctgtccgggcccggatctattgtttcgcctctctgcgccacaagtccgtcatgacgggctttatattcttcctcacagccgtcttttaattttgtcatgaacattctgtggcggatcagctctttgttttctctcacaacaccaaaattatgatacatcaggcgcatgtcttttccaggagtagagatccaggtaaaggtatctccgatcttttcagtcaatgctgcctttactttctcctcttccggagagatcacctctccgtctgcattttcgtaatatccgaagatcaggtctgccgcattccagatgctgaaattatggatgccgttacggtcaagatatgcagtaagctccggccagatctcgcctaaggtcttacggtaatcattcatttttccttcttttactttcattgcaaaagcatgtcgttccatttatgctatcctcctgttttgatgatcctgtgctatgttttccactatgagcagatgtagttcttctgccctcatatgatttgattctatcacttttattttgtttttacaattatgagggcaggatttccgatcactgttcacaggtaatatcagcaaagcatgttgcctgacacaaagttatccgtaacgattccctgagatgctcaggcaagatacaacatgaccatcagtggcatggttatgatacttaccagcgttgtcattacattgatggtgctggcatagaccgggtcctgatcgtagagctgtgccagctgtacaatcgttgttgccgacggtgtgatcactgccatcagactgataagcagaatggtttttccatcctttaccattgaagccaagggcagatacttcaaaaacaacagtataagcagtggagtcaccaccattttcaagatcgtgatcagatagatcctggaatggctgaaaatatctttccattttacctccgtcatggtcattccaagcatgatcatacatacaggtcccagggtggctgatatctggctcatggtgtttccaaggatcaccggcaatctgatctgcgtgaagaacagaacgattccaaggataatagcgatcagattgatgttgcagaggatttttttccagttgatgccggccttcgcctccatcagtgactgtccgtgggtccacatcaggatcatctgcacactcaggaaagcactggcatagatcacccatttttcaccaaggactaccgttacaagagggatcaccagatttccggaattggaatagatgatggattctttttctaccacacttaatttcagtggcttgccgatgatctgtacaaataccagaagaaaaatatggatcaggatggccgctgccactgccagaaggaagccattccggatgcttctggaatattcgatctgaaaagcattgatcattacgcagggcatgatgatgtagatacagatgactgaaagtgtcctgctgctttttgcatcgataagtccgcattttaccactgtaaatccacaggacatcatcagaaaaaatacgatgatctgctgcaataattgtaaagttatcattttttctcccctccgaacgcgtcagctctgtccgatctctttcagggctgtctgaagctgcgtgtcttctttatgtgtaagttctgtccagtctgtgatgtctccggaaagctctgcttccacatccggagtgattccttttttgttgatatcattgccctttggcgtaaaatattttgcgatggtgatctttaccgcactgccatcggtaagaggctggatggtctgcaccacgcccttcccataggtagttgttcctacaatcgttccaatcccgtagtcctttaccgcccccgcaaagatctccgatgcactggcactgtttccgtttaccagaacagccagcggcatgtccagttcattttttccgtcgcaggtttcctcttccctttttccgtttttgtcctctgtatagacgatcagtccttccggaagtatctggcggagtacgccgcagactgcagtaagaaggcctcccggattatcacggagatccacaaccagcttcttcattccctgatccttcagatctgcaaatgcttttttatactgatcgctggtcacctcagaaaattcggagatccggatatagccggtgtcttcggaaagcatctcatgggaaacggtctgaatctccacatcccggatctccactttgacatcccggggtttctcttcgttttcccgctgtatggtcagcgttacggaagctttctcactgtcacggaccatagaagcaatatctgaagtttctttgtctataacatcagctccatctactgccttgatcacatctccctttttcagtcccgcctgttctccagggccaccctcataaagctgtatgatctttgcccctccggtgtcatccttctgaagaacggcaccgatccctacgtaggagccttcattggaagtattcagctctttatactgttctgctgtgtaataggtggagtacggatccttcaggccggcaagcaggccagcataaagcccctcacgcaggttgctttcgtctttttcatccagatattcttcatcgatcagttcttccaggtaattcagcttctgaaccgttttcacatcggaaagcgcattgcctttcggaaacaatactttctgatagctggcaaaaccagcgcctgtcacaaccagcgttgctgccactccaatggctataccttttttgaattctttatttttcatatttttcctttcttctgcacagccggcaaagccgataagatcacagattttctgtactcctctgtgcgccgttcggtttttatataccgaaaacggctgccgatattccgacagccgctgtatatcttatgatcacacatcatgcggatacataagattctctgctatttggttatactctgagatgttttcttgttgtgaaaaagcttcccaaaagaccgattcccacaccaagtccaagtcccatgggaaccagaccctcataaatctgccagattggaatgaaatccacgattcctgtcaatacattgaattttgtcagaataaactctacagcggaattatacaggaaaaacaggcagatcagcggtatcgccgcaccgatcacaccgaggatcataccttccagaaggaatggcagtcgtacaaaagcatctgtagctcctatgtatttcataattccgatttcttccttgcggacagaaatacccatagatactgtattgctgatcaggaatatggaaatgatcaaaaggattgcgatcacggcaatcgacacataagaaaccagcttgttaatggaaccaagtgtcctggatgcctgttcagactgatttaccttccggacatgttccagtccctggatataattcaccagttctgtctgcttggtaatatcattgagatatacctgataattggatgaattggcaagagggttatcatctttaaatccatctgccgcatcttcatctccaaaatatttctgtttgtattcttcccatgcctgatctgcggactgataatccatcctggccacttccggcctggactgaatagcatcgccgatcgcctggatttcttcctctgaagtgccctcatcaaagaatactgtgatcggtacttcttcctccaccttatgggcaatattaccgacgttgttcacgatggaatagaaaatgcctaccagaaaaatgcaggctgccattgtgatgatacatgccagggaaaacatccagtttctttttatattcttaaatccctgcttcagggtataccagatcgtactaggcctcatgatatcctccctctttctcatcgctgatgatcttgccgttgtgcatggtgactactcgcttgcgcatggcattgacgatgtccttattgtgggtgacgaccagaactgtggttcctctgtcattgatctgctccatcagagccatgatctcttcggaggttttcggatccagatttccggtcggctcatctgccagaaggatgtcagggcggtttaccagtgctctggcaagagcaactctctgctgctcaccaccggaaagctcatccgggtatgccttatactttcctgcaagtcctacctcctggagaacctccggcacacgtttgcgtatcacacgggtaggtcttcctatgacacgctgcgcaaatgctacattctcatatacattacggtcttttaaaagacggaaatcctgaaatactaccccaagctttctgcgatacttggcaacgcgtctgtgtttcatcttctccagacgttccccgctgactgtgatcgttccgctggtagaatccagttctttcatcagaagcttgatcagtgtggatttaccggagccactgcttcctactacaaatacgaattcccctttatcaacatgtaagttcgcatgattcacagccggaagacccgggccgtaagatttgctcacatctacaagatcgatcatatatatcctcctctatattataaaagcataattttcttaattttttcgtaacattattgtaatatattttctgtttaaatgcaagaataaatttcccggtccctacaacggttactgttcactccgttctcagtaacacgcttcgcgatgcacagaatttatgctgatcgcataaattcgcgcgatatgtctcgggttttctgtgaccttcgctcacaaaaaacacctcgcgggacattaccagtgaacagtaagcaacagccctcttcaaattatttattttaacgtaaaaataccaaaattacaatagagtcatggatgttatctgtgaagttcatgtgaattcgttactgttcactccgttctcagtaacacacttcgtgaatgcttccaaacaggagggacatttacacaatattccatgatgaaaaacgctcatacaaaaactgccgcctattccgggaaggaataagcggcagtttaaaagttctaatatgttgccttaatgtatcaaactatcatcctgcattccgaatgctattagtactctaaggtctccatatatttcatatatcgaacaaccatcagcgcgatcttaaatgtaatggcatcctcaaacactctcagatcaaggcctgtactcttctggagtttatccagacgatataccagcgtatttctgtggatatacagctgacgtgaagtttcagatacgttcagactgttctcaaagaatttatcgatggtgacaagtgtctcctcatcgaaatcatccggagatttgttgtcaaagatctctcggataaacatcttacacagaggaataggcagctgatagatcaggcgtccgattccaagtgagctgtatgcgataacttccctgtctccgaagaagatcttacctacatcaagggccatacgcgcttccttgtaggaacgtgaaacttctttcaactcattgacaatggtaccgtatgccatgtggacatcctcaccatctttattcagatccagagtatccataatcgtatgagccagcttatccatctccggatagccctctccctcttccagttccttgactataatgatgctcttctcatcaacagcagtgataaaatctctgctctttccgccaaaaaggcttttcacgctctctacagagctgtgatctttctcctggttcagttccaggatcataactacacgacggacatctgcttcaatatgaagcttcttcgctctgttgtaaatatccaccaaaagaagattatcaagaagaagattcttgataaagctgtctttgtcaaaacgctccttgtacgcaacgatcagattctggatctggaaggctgcaagcttgcctaccatataagtatcctcatcatctccgtgggctaccaggacatattccaactgataatcatcacagaccttaaagtactgaaatcccttgacaagctggctgtccgcctgggattctacaaaagcctggatatctgccggctggatctcaaaatcagaaaaggtagacgcaagtaccttgccgtctgtgtcaatgacacaaaattccgtccttgatatttctttaagtccctcgagcgtattctgtaacacctgattcgatatcattccgttcaatcccttctcacttatgtgtatgcttatcttctgtctttccctctctatctatggctattttaatacaaaatcaccaaaaatgaaagagtaaaactgaaaaaatttacaaatttttgttgaaatccgcctaatttttctctataaaaccttctccatgaacttctcttgcatcggaaacgatcacaaaagcgttgggatcaatatcatctaccagctctttcagcttcacaatttcctttttgtttaccacacagaagatgatcgtcttctcctgaccggaatacatccccttgccacagatccctgtcgctccgcgatccaggtcttccataatgactctggcaacctcatccggcttctccgtgacgataaatgtttgtttggaaaacttcagaccttcgatcagactgtcggatacttttgttaccagataaaccgcaatgatggcatacagggcccgctggataccgaacacatacattcccacgatcacaataagcccatcaataaactgcatgatctgtgcgatggaataatgacttatatacttctggatcagtgctgccatcatatccgttccgcctgtggttccctgtccaaggaaaaccattccaatgccgattcccaggatcacaccaccgtatacagcagccagaaggagatcatctcccgcaatattccacaccggctgaatagcaagccaggttgagagggagatctcaccgaccagagctttttttacaaaggaaaagcctttgatccgccatcccagaaaaaacagcgggatgttcagcgtgatattggtaagccacagtggaaccccgccatctacgatcccaccggtccagtgcttcaccaggatcgcaataccggaaaagccgcctgttaccagcccggttgcatcaaacacggaattgatggcaagtgccatcagcccggttcctactatgatcagaagataatccagataccagtccttttttttcacaagactcataaagtgctcctttcattttttacagcaattcccggaatttctgtcttgaaatgtcctcaatatttctattccgctgtgaaaatcccgaaaatgctatagtatcatatgacaactgcatcagtttcccgcactgacgtgtcataaaaagaacgggaccgtacactattctgcgtccgttcccgttctccatgctatttctctgtctttttatttataaaatgaacaaattcatagctttccattatctgaaagtattttacgattctcggataaagcggttctgccttatctccgaaatgctctttcaccagcagggcaagctcctgcacggttttggctccatcgatctcaggccagataaaagttcccatttcatcaagatgaaccttggaaaaccttggcttgccaaaaaccttctgcgcgatggtattgaacatacccttattctctatctcaagaatgatccgctgcttcaggtcccggtgccaccggatcgactggtttgtttccgggatcagatcaagatagttgatatcctgtttcttatcctttttgttttttctcatcaggctttcttctttctccagatagagaatttaagcagtgacaggatcatgatgatcatcagcacaacaccgccgatatttccaaggtttacaacgccggacatatcaagactgataccgacaactgcaaagatcgcaagaagaattccaacaagaccctcgccggcgatcataccagcacagtacagagtaccatctgtagcctgagctgtcttggttttttcgtcaacgccttttctgcggtcaagtaatccacgaacgataccaccgatcatgatagttgcgttcaggtagattggaaggtaaagaccgattgcgaaaggcattaccgggatacggaggatttcaaggcagattgcaaggaatacacctacaaatacaaggccccatggaaggtttccgcccatgattccctcaacgatcatcttcataagctgagcctgcggagcagggatctctgctgtaccgtagccccatgctgcattcagaagatacagaacaccgccaatagcaagacctgaaacaacaacaccgagcatctcgcccatctgctgcttcttaggtgtagcaccaagaaggtatcctgtcttaaggtcctgagaggtatcaccggcaattgctgcgatgatacagataacagaaccaacagcgattgctgctgtcattccgtcgatacctgttttaccggagctcttgatcgcaaatgtggcgatcagaagagtagcgatagccataccggaaaccgggttgttggagcttcctacaagacctaccatacgggaggatactgttgcaaagaagaatccaaaaactacgatgataactgcaccaagaagagttaccgggattgccggaacgacccagatgataaataccattgcaacaacaccgagaaggatgaactgcatcggaagatcctgtgctgttctctctgtacttgtgttcttgcttcccttcatgctcttcatggagtcacggaaggttgtaacgatcagcggcagggatttgatcagagaaatgataccacctgttgcgatggcacctgcgccgatatacttaacataagtagaccagattgctgctgctccgccgtttgcgtaaagctgggcaattgttgttccctctgctgccgggtacatccatgtgtcaggtccgaacaggcagatcagcggaatgatgaccatccagccaataagagaacctgtaaacatgtaggatgcgatcttcggtcctacgatataaccaacaccgagaagtgcaggataaacctccataccgatctcacccttgaaggatttaaatgctgctgaaacatctgccggaagaagcttcagtccatcaacaacaaatttgaagatagcagcaagtcccataccggagaatactgtggaagcattggctcctccttcctcaccggcaagaagaacgtctgcacaggcagttccttccggatagagaagagttgcatgctccttaacgatgagggcattacgaaggggcaccataaaaagtacaccaaggataccaccgcaaagtgcgatcagagtgatctcaacgatgcctggcttgtctgaaagtccttcctctgcccagaggaacagtgcaggcatggtgaagatagcaccggctgcaagagactcaccggctgagccgatggtctggaccatattgctctccagaatggagtttctacgaagaatcacgcggataacacccatggagataactgccgccggaatggaggcagatactgtcataccaacacgaaggccaaggtaagcattggctgcaccgaagatgacagcaaggatacatcccataatcacagatgtaactgtgagctccggagtgactttctccgcaggaatgtaaggtttgaactctgtgtttttgttcatatttcctctccctttatctattaaattagtaacgtaatatagtatagcaaattccgcattattttgcaaggaattatatctgagatattatatataatttacaattttctgtataattataagcaaataattggtcactatgcagcttgtatgctaacatagtgaccttattcctttcaattgaatattatatatttttaaaaaaatgcttttttttttcagttgtccgcctccagctgttttgt

SEQ ID NO: 271 - DNA, 313 bp, Unknown
  gut microbiota DNA sequence
acagcggacttttgaaaaacaacgcagattcccgccgtccaagaatcagctcccctcctgcagaagcagagccagacagcatccccttccgcggctggtgcttccagcgagaaaaaatgtcgtttgacgataggttgtgggtcgtcagcgctgcgctggatgactgcaagggctgagtttgcgcctgtttgcagggagagtttgggcatcggcgctgcgctggatgcttgaagggatgtaagctgtgatgctgtgcaggatgtttgaggggatgtgagctgtgatgctgtgcaggatgcttgaggagatgtga

SEQ ID NO: 272 - DNA, 16816 bp, Unknown
  gut microbiota DNA sequence
gtttggagggtggtggggtgtgggagatttgggacgattgtgtgggaatgtgttggaaatgttttcggtgaagttaacctaaaaatattacatattgtggctaaaaatagttatcgtcatttttaatagaaaaaagatggtaatattgtacaatattaggggttgcgatttgtgtgttgcgatgatattatattaagcataaagagcgtgttcggacacgcaaagagattacattgggaaaataaatcaaaaggagatcaaaactatgattaaagttggtattatcggagcaggtagaattggtagagttcatattaccagtatcacaacaagggtgccggatgcggtgatcaagacggttgcagatcctttcttaaatgatgagactgctgcatgggctaagagtatgggtgttgagcacacgactaaggattataaggagatcatcaacgatcctgagatttccgcagttctgatctgttcttctacagatactcattctccgatttctgtagaggctatcaaggctggcaagcatgttttctgtgagaaaccgatcgatcatgacattgccaagatcaaagaggttatcgatgctcttgagggcacaaatctgaaatatcaggttggttttaacagaagattcgaccataactttgagtctcttcagcaggctgttgcagctggtaaggttggtaaaccggagatcatcaagatcacttcccgcgatcctgagccgcctagcattgattatgttaaggtgtccggtggcatgttcctggatatgacaattcatgatttcgatatggttcgttatcttgcaggctgcgatgctacagaggtttatgttcagagcgcaaatctggttgatccggctattggtgaggctggggatgttgatacagctgttatcactcttcagatggagaatggcgctattgctgttatcgataactgcagaagagcttcctatggctatgatcagagagccgaggttttcggttctgatggtatggctgctatttccaatgacagccagtcttccacagtgatcagcaatgctgagggtgttacaggcgagaagccgatgttcttcttccttgagagatacatggacgcttatggtaaagaggttgcagcatttattgatgcgatcgttaatgacaaagagacacctcttaatgtttatgatggtctgaagccggtattaatgggtcttgcagctaagaaatccagtgaggaacacagaccggttaagatttctgagattatggaataattcaaataaaaaaggagaattgaccaatgtttgataagaataaagtaaagcttggtattgcaccaattgcatggacaaatgatgatatgccggatcttggcaaagagaatacttttgagcagtgcgtcagtgagatggctcttgccggtttcacaggctccgaggtgggtaacaagtatccgaaggatcctgaggtccttaagaaggcccttgaacttcgtggtgttgagatctgtaaccagtggttctcaagcttcctgatcaccaaaccgtttgaggaggttgagaaggagttccgtgcacagcttactttcctgaaagctatgggtgcgaaagtgattggcgcatctgagcagagtcacagtgttcagggccagatggatactccggttttcggacataaatatgagatgaatgacgaagagtgggatatcttctgcacaggcatgaacaagcttggtaagatcgcaaaagaggagtatggtattgctcttactttccatcatcatatgggtactgttgtacagagccttgctgaggttgaccgtatgatggagaatacagatcctgaatatgtaagtcttctttttgataccggtcactttacatactgtggagaggatcctcttgaggttgtaaagaaatatgttcacaggattaaacatgttcatctgaaggatatccgtccggaagttgttgagcaggttaagaaagaaaacatgagcttccttgcaggcgtaagagccggtgccttcacgattccgggagatggatgcatcaactatgatccgatcttcaaggttctcgaggatgcaggctacgagggatatatggttgttgaggctgagcaggatccggctaaggctaatccgcttgagtatgcgatccgtgcaagaaaattcattgctgagaagacaggcttataattacgacagggaaataggtgcatgctgatgtacagttaagcggaataaagatgtccgctttgcatagaaaaagcggtatcagccagtagtgctttgacaccgcttttttctgtaagaagatgcaaacagtgtacgataaacaggacgggagggccgaatcatggcacttgtgaaaatgaaagatctgctgagacgtgccgaagagaaaaatattggctgcggtgctttcagtgttggtaatatggaaatggtaagaggtgcgatccgcgcagcagaagaactggatactccgatcatccttcagatcgcggaggtgcgtttgaaaaattctccgcttcacctgatgggaccgatgatggtacaggctgcaaaggaggctaaggtggatgtggctgtccatctggatcatggtcttacttttgagacggttgacaaggctctggagcttggctttacatcggttatgctggatgcttctacgcttccttttgaagaaaacatcgccagagtaaaggccgttgtggagaaagcacgtaaatacggcgctacagttgaggctgagctgggacttgtgggcggaagtgaggatggaagttgtgaccacggtatccgctgcacagatccggatgatgcggtcgtttacgcaagagagacaggtattgatgcgcttgcggttgccatcgggaatgcccatggtaattatccggtagcgccgacgcttgcttttgatgtattggagaagatccatgagaaagtggatattccgctggttcttcatggcggcagtggcatcaccgataaagatttccagaaggcgatctctcttggcatccgtaaggtgaatattgccacagcaagctttaacagcctgacagctcatgtggagaaatatatggaatcaacagacaagcataatttctttgatctcaatgaggttatggtccagggtacttacgagaatgtgaagagacatattcttgtatttaatgagccatatcaggagtaggtcaaggattttcttgtaaaaaaagaaaaggtctgataagatgttctcagtgaaaataactgggaacatcttttttgtgcccataaaagaggagagataaaaatggaacagaaagagactgtctgttcagttgcgaagaaatgcggcggttgtcgttatcagggtgtatcctaccaggagcagcttcgcaggaaacagagaattacagaaggccttctgaaaaaattcggaaaagtagagccgatcattggaatggaagatccctattattacagaaacaaagttcatgcagcttttggccgtgaccggaagggaaacgtaatttctgggatttatgaggagaagagtcataggatcgtttccgtagatgactgtatgatcgaagataaaaaaagtcaggaaatcatccgtaccatacgtggtatgctgaaatcctttaagatcaagacctatgatgaggatacaggatatggacttctccgccatgtgcttgtgcggagaggcttttccacaggagagatcatggtggtattagttacggtttctccaatatttccatctaagaataactttgtaaaagctctccgtaaaaagcatccggagatcactacggtggttctcaatgtcaatgacagacagacaagcatggtacttggagaccgcaatatcgtactttacggaccgggattcatcaaagatcgacttatgggactgaccttccgtatttctccatcttctttttatcaggtaaatcctgtgcagacagaagtactttacggaaaggctatggagtttgcggcaatgacaggaaaagagagggtgatcgatgcttactgcggcacaggtactatcgggatcatcgcttccgggaatgccagggatgtcattggtgtagaactgaaccgtgatgctatccgtgatgccagaatgaatgccagggaaaacaagatccgtaatgttcgttttgttccgggagatgcaggatggtttatggaaggaatggcagcagagggagagaaggtggaggttgttctcatggatccgccacgttccggaagtgaccgtaaattccttcactcccttttgactctttcaccggaaaaaattgtttatgtatcctgcaacccggaaaccttggcaagagatcttgcctgccttactaagagagattacctggtaaagaagatgcagccggttgatatgttcccgctcaccgattcagtggaggttgtttgccttctggagaatcgtaggaccagaccgggaagagcttagatttttggcagctcacagtgatatgcgatgccaaggggcgtaacaagaagcggatggaccggacggtataccggaagcttcagcctcttttcaaaaacggtagtaaattccttaaacatggaagaaccgccaactacataaacagccggaacctgatagccctttagaaatttctcggtgatcacagccattttttctacagtggccttgatcacagggaaaatttcgtcttctttttccggagtagttttcaatacttcggcttcctcataaggaatcttatagtgaccggcgactgtcatggtcatatggctgccgccagtagcctcatcatcggtgtagataacttttccgtctttcaggatgctgataccggttgtgccgccacccacatccacaacagcaccgtctgtgatcttaaggacagcagctgcggcagtaggctcgtccacgatatttgtaacctcgaaaccggcaccctccagaacatagccgatgcttttgacactgccttcagaaactcccggagggatggcagcagcaccgtaagtaagttctgtgccaagcctttcctccagctcatttttaagctttgtcacaagctggacagattcatagtaattgacgatcactccatcctggatcgcatgggatggtgcggaaattccggctatgggacggttattccggtcgacaacggcaagaacggtattggcagtaccaaggtcgatgcctgtcttcagacgaccgcggaattttttacattcacctgtttctacaagttctgcaaaattggacaaagttctgttttttaattccattcaaaatactccatttctttcagacagggacaaaaagaattttgcccctgatataaattctaataattgcggccggtaaagatgacaacggatctgggccgcatgcagaaatcgtgttcaatgcgtggctcctggcctttttcgtagaaataacggccatttccgtcaccgaacgtgttgacacagagataccatgcaccgggacgggcaagctccggaagtgtgaccgttacgtcctcccagtatgcgttgatcacaatgtagatcaggtcatcagtgcctttgctcttatcatagcctgcaaagcttacagcgaaggtgtgggcatctcttggaatggtcacatcccttgcgtcaatgttatgagtgtggatattttccataccgcatactgcgttgggaagcttccgggagataacagggtggtctttacggaaccggatcataaatttgaaaaattcaaaaagatcgtgatttttctccagaagcttccagttgatccatgaggtttcgttatcctgacagtaggtattgttatttccgtgttttgtgtttccgaattcatcacctgcaaggaacatcggggttccgcggctggacatcagtacagcacaggcatttcgtatcatgcggaagcggagggagagcacttcggggttggtggaatcgccctcttctccacagttccagctgcggttatcgttggaaccgtcggtgttattccagccgtttgcttcgttgtgtttttcattgtaggaataaagatcatacatggtgaagccatcgtggcaggtaaggaaattgacacaggaattgtatcctgcataattgtcattatgatcagaataaaagcctccgtacagatcaccggaaccggaaatactccatgcagcgtcccaggcattccagaaatctcccttcaggaaggaacggaggcagtcacggtaacggccattccattcagcccatctgcggctggcagggaaagaaccaacctgatacagcccgccggcatcccaggcttctgcgatcagtttgacatttctaaggaccggatcgtaagcgagaagctccagaaggggcggattgttaagtggagaaccgtcctcatggcgtccgagaatgctggcaagatcgaagcggaagccgtccacacggtagttgatggtccagtaacgtaagcattcaaggatcatctgacgtacaatgggatggttacagttcagagtatttccacatccgctgaaattgtagtaatttccctctggagtcagcatataataaaccttattgtcaaagcccttaaagcagaaggtttttcccagctcgtttccttcggcggtatgattgaatacaacatcaagaattacttcgatgccattttcgtggagctcacggatcagctctttcagctcagttccctcacagttatgctccggcttggaagcgtagctggtgtttggagaaaagaagttgacagaattgtatccccagtattccagaagccgtttgccatttacagtacgggcattcatattctcgtcgaactcgaagatcggcatcagctctacggcgttgatccccagttccttgagataagggatcttttcacgaagaccggcaaaggttcccgggtgcataacaccggaagaagaatcctgtgtaaagccgcggacgtgaagctcatagatgatcaggtcactgatcttacgggtggactgcggcatgtcttcccagtcaaaggaatcacgtaccacacgggcatgatagcttccgatcttttgctggccccattcacgctgaccggcaacggctttggcataaggatcaagaagaacctttgtcttatcgaagatgtgacccttttccggttcgtaaggaccgtcaatgcggtagccatactccagatcttcgatgtccagtcccatgacgatcatggagtagacatcaccgatacgacaggcattgggaaaaggaaggactgcgaagggttcctcttctccggagtggaaaagaagaagctcgcaggatgtaccgtgacgggtatgtgcggtaaagttgactccgttggaaagaggagtagcaccatttaattcaaaaaaaccgggacgtacaggaaatcccgcgataatatctgtgggtcgggatgtcagtgtattctcagaaagcatagtctgattctgtgttttcatttccggtatcctccttggtagaattttttacaaacaaaaaatattataactgattttcagaaaaaagtacaggctggggtcttatgaagttcgcaggagttgacagagattgcagaaatatggtaaaaacctgtacagagatgaggtgaaaaagtggaagaaaaaaaaagagaagagtggatggcagttttaagaaaaagccggctctgcagaaatctggaagaaacagagctactaagcctcatggagcgggaaggaacggtacggacttattccagagggaagcggatctttcaggaaacagaccggccggattcggtttatatgcttcttagcggaagtgtgatcattgccaaagaaacattttccggaaaaaggatccttctggctcaactggaagatccgggtgctctgtttggggaggtttatgcctttatgggaaaatcttcctatgatatgtatgtggagacgctgacgcagacttctgtcctgatcatgagcagcaggatctttacggacagggaagaaaatagtttaagccggaaactgcgggaaaatcttcttgaggtttttgccgggaaggcttacaatatgaaccagaagcttcggatcctgggaagtggcagtctccgtgagaggatcgtccgttttcttgtggaatgccaggacagtgaagggaagatccatatgaacctgtccagagaagagatggcggatcatttaaacatcaccaggccgtctctttccagagagctgggaaagatgcaggaagaaggaatcctggaacttgacaggcgtcagatccttgtgaaagatcaggaaaaaatggagttatatctgtaaggtaacatatgttaccgaaaaatctccgggatttttgtatgatgtcagtgaaaacaaaaaaacatttgcagaaatataaaaatcagggagagatgatatcatgataagaaagatcgtacacattgaggaagagaaatgcaacggctgcggtgcctgtgcagctgcctgccacgaaggggctattgtcatggctagtggcaaggcgaaactgatccgggatgattactgtgacggactgggagactgtcttccggcctgtcctgccgatgcgatccgtattatagagcgggaagccgcagattatgatgcggaggcagtggaaaaaagaatgaagtttaagaaaacagaggtttcgatgccagaagggatgccacacgtgtgtcccggaagtatggcaagaagcctgaaaaagaaacaggaaccgccggtgcaggcagagaagaaagaagttccccggaatataggagaacagataagccgtcttgcccagtggccggtacagatcaaactggttcctgtcaatgcaccatattttgaaaatgcacagcttctgatcgcagcggactgcacggcctacgcttatgcagattttcacgagaaattcatgaaagatcatgtgacgctgatcggttgccccaaactggatgagggagattacgcggataagcttacagagatcatacggaataattccatccggagtatccgtattgtccgtatggaagttccctgctgcggaggtatcgaaaatgcagtgatccgcgctatggagcgcagcggaaagatgattccatggcaggtagtgaccattgcctgtgacggcacgatcagggaggagctgtaaggaaaggaataaaaacagcatgagtgaagaaacattggagatttcttttgatgaaatagagaaggaacgggaaaaatatctcctggtagatacccgtgataaagtaactgtggaatatggaatgatcccgggagcgatttctgttccggaacaggaactggaagaacgggcagaagaactgaatggggataagatcccggtcctttactgtaccagaggacttttcagccaggaaggggcagggatgctccgggaaaaaggaattcccgcactgagcctgaaaggtggatatacaggatggctttttcagcagatgcagaaagaatccggtaaagaggacagtgaagaagaggaaaatgatgcaatggaacagcggcggaaggatatcgagctgagtatccgcaaaaagttccataagcagctgttttccagatttgccaggggaatcaacgattatgagctggtgaagccgggagataagatagcagtctgtatttccggtggtaaggattctatgttgatggccaaactgttccaggaactgaagcgtcataacaagtttccctttgaactggtgtttcttgtgatggatccgggatataatgagacaaaccgtgcggtgatcgagcacaatgccaggcttctcgggattccgatcacagtgtttgagactgagatcttcgatgcggtttataatatagaaaaatccccatgctatctctgtgcccgtatgagaaggggctatctttacagcaaggcaaaggagcttggctgcaacaagattgctcttggacatcactatgatgatgtgatcgagacgatcctgatgggaatgctttacggagcgcaggtacagactatgatgccgaagctccatagtacaaattttgagggaatgcagctgatccgtcctatgtatctgatccgggaggcagatatcaaacactggagagattataatgaccttcattttatccagtgtgcatgtaaatttaccgatacctgtactacctgccgtacagatggtaccagtgtttccaagagaatggagatcaagaatctgatcgcagaacttaagaaggtaaatccacatgtagaaagtaatattttccgaagtgtggaaaatgttaatcttcatacagttatcgcatacaaaaaagatggagtgaaacattcttttctggaagggtatgaggactgacagatataaataaaagctgctcaggcgttagcccgggcagcttttactttttcccgctgtttggtaagatcataatattcatcagagatgattccgcggctggaaagtgcttcgtaggttttctgctgtgcgggggtcatcttcattccgatagtggaattgacatcggtcagtacgcagcttgttttttctaccagccagaaaagtgcggaatcatcatcggggatcattttccagatttcgttttctgtatatggaagaagggacatgagagtttttaagtgtccatcctggatcagacggtaatccccgtccggcatgatgatgccatcgccatagagttcttttttctgttccattttctgcagaagtttttctgtgagtttcatgatcggctccttgatctttattattcaacagttttcaggcactgcttttttatgaagttaaaaaaataacaatcagcgtctattgtatgaagcggcgacaaaaatgtcaagaggttaaaaagattttcgatgcttatgaatgatttttgttgtgcaatttgtttgcttttgtgaggctaaaggttaaaattatgtaaaaattatcgtaaaataagatcttctgtggtataatatgaatattcaaaaaattcaaggaaggacgatgcagatgttgaaaaactggaacccggaacagattccggaaaaagaggatatcaaagtgcgtttaagcgctgcaagaaccagattatatgaattgcagatggctctgaaagagcataagattccggtgatcgtgctgtttgaaggctggggagcttccggaaaaggaagtaccataagtaaggtgatcaagaatatcgatcctcgtttcttcaaagttgcgactatgtcagcacctacagaggaagaacttcggaaaccatttctttaccgatatttcagggaaatcccggaagcgggcaagtttacattcctggattcaggatggatggatcagacctgtcgtgaacgtatggataaaaagctgaagggtgacaattattcaaaacggattgacagtatccggagatttgaacgtcagctgacggataatggatatgtactcctgaaattttttatgcagatcgaccggaaagaacaggaaaaacgtatgggcatccttctggaaagcaaggataccagatggagagtcaatgaatatgatctctggcagaatgatcattataagaagtgcagaaagattttcgaccagtatatgcaggataccaatacatctgcggctccatggtatattgtcgatgccggtgaccggaagtgggcagaactgcaggtactggaaaccatgatcagcaatatagaggttgccatggaaaacagcaaacatgcagtgccgattctgcagaatgtttttcctctggtggagatgcccagattaagcgagattcctctggatggaaaagaagtgggggatgaagagtacaaggcagagcttaaggaactgcaggcaaagcttggaagcctgcataaccgtctttaccgcaaaagagtacctgtgatcatcacctatgaaggctgggatgctgccggaaaaggcggaaatatcaagaggatcacggaagctcttgatccccgtggttttgaggtacatcctatcgcaagtccggagcctcatgaaaaagcccgtcattatctgtggcgtttctggacaaggcttcccaaggatggtcacattgccatctttgaccggacgtggtacggaagagtgatggtagaacgtctggagggcttctgcagcgagaatgactggagacgtgcctacaatgagatcaatgaatttgagaaggagctttctgactggggcgctgtgatcgtgaaattctgggtccacattgataaggacacccagcttgccaggttcaacgaccgccagagcaatccggaaaaacagtggaagatcacggatgaggactggagaaaccgtgaaaaatgggatcagtatgaaacagcagtagatgagatgcttcagaaaaccagcactgcttatgcaccatggcacattctggaatccgtagataagaaatatgcaaggctgaaggcgcttcggatcgtgatcgaagaaattgagaaagcgctgaaataagagataaaagctgcggcaggataacagatattctgctgcagctttttgtctgaagagagatgaatcaattccggagatagtttcgcatactgcgaagagcatgtttttccagtcggctgacctgagcctgggagataccaatctcatcagctacctccatttgggtttttccctcgtagaagcggagatcgataatgtgacgttcacgctctccaagccggttcatggcatctcgaagagaaatatcttccacccagttttcttccaggttctttttatcactgatctgatccataacatatagggtatctccgccttcggaatacacgggctcaaaaaggcttaccgggctctggatcgcatccatggcatagacgatcatttccttgtcgataccgatctcatcagcgatttctgcaatggtaggctctttgagatgctgccgcatatagttttcccgggtatagatggttttgtaagcgatatcccgcagagaacggctgacccgtatgctgttgttatcacggagatatcttcggatctctccgatgatcatgggaactgcataggtggaaaattttacctgaagagtggtgtcgaaattatcgatcgctttgatcaggccgatgcagccgatctgaaaaaggtcatccggattttcactgctgttctgaaaacgccggatcacgcttaaaacaagccgcagattgcctttgatgtacaattccctggcttcttcatcgccagctttgattcttttaaagagctccgccttttcttcctgatcgagaacgggaagggttgaggtatttactccgcagatttcaactttattcagtgccatcttagaatcctccttgtcttgtcagtacattaagatgattctcagagggcggttgaaatatactttttcagggaaaatataaaaaataaagggccttgacaataaggaggtatttattctccggacagcagtttttcattacggaaatcaacaaggatgatatcttcgccgatctggcggatgcagtcccatggaatggaatattcattttctttggaaaaacaccagcaaaatttccccggttccggcatgatcagggctttcagacgtgcggtttcacagcagaattccacatcaagagggcagccaagactgcggcaggtatggatattgatcacttctttttgtttcagctcacagatgcgcataaattcatcacctggtatgattttatggaaaatctgtaaaatttatgcaagtccgattattgacacattatgtgcatttattttataataaaaacgaatttagtaatgatttactgatccggaaagggggagagttctgtgagatgtccgttctgtaaccaggataatacaagagttgtagattccagacctgtagaggataccaattccatccgccgccgccgtctctgtgatgcctgcggaaagcgttttacaacttatgagaaggtggaaacgattccgctgactgtgatcaagaaggaccagaaccgggaaagctataaacgttccaaaatccaggatggtgttcttcgtgcctgttataagcgccctattcccattgagagagtggaagagatgatcgattccatagaaggagatattttccggtcagaagaccgtgagatcagcagtaccaagatcggagagatcgttatggagcatctgaaggatctggatgcggtggcgtatgtacgctttgcgtctgtatacagagagtttaaagatgtcagtacctttatggatgagctgaagaagctgatcaattaagagattaaatgaatagaccgcaaatgcaggagatttcaggccgattgtcaaaagacaaccggccttttttgaaacatgaatgtttgatttttcagagatcgtaaaagtggatacaaaaaaacaggaaccgcctgggaaaaatcctctgcggtccctgctataaatatacattaatgatgcaggaaacttaattaaacaataccctgagctttcatagcgtcaacaactttttcgaagccggcgatgtttgcacctacaacatagttgtcttccataccgtaacgtttagcagcgtcatcagctttgtggaagatatcgatcatgatgttgtggagtttctcatcaacctcttctcttgtccaggaaagtctcatggagttctggctcatctcaagtgcagatgtggcaacaccgccagcgtttgcggctttaccaggcatgaagagaacaccgttctcctgaaggtatgttgttgcatcaagagtagtaggcatgtttgcaccttcaacgacgtatttgcagccatttgcaaccagtgttttagctccgtcaagaccaagctcgttctgagtagcgcatggaaggtagatatcacatttgatattccagatgccaagtccctcagtgtaggtagcaccctcaacacggtctgcatattctttgatacgtccacgttttacttctttgatatcctttacgacgtcaaggttgattccgttcggatcgtagacatatccgttggagtcgttcattgcaacaaccttggcaccaagctgagtagctttctcaacagcgtaaatagctacattaccggaacctgttacaacgattgtttttccttctacggaatcattgtgagctttggcgatctcgttgagcatgtatacaacaccgtaaccggtagcctctgtacggatcagggaacctccgaatgaaagaccctttcctgtaaggacaccctcataaaggccacggattctcttatactgtccgaagagataaccgatctcacgtccgccgacaccgatgtcaccagccggaacatctgtatctgcgccgatatatttgcaaagctctgtcataaagctctggcagaatgccataacctctctgtcagatttacccttaggatcgaagttggagccaccttttccaccgccgatcggaaggcctgtaagagagtttttaaaggtctgctcaaaaccaaggaatttcaggataccctgatttacagaaggatggaatcttaagccgcctttgtatggtccgatggcgctgttgaactgaacacgatatcccttgttaacctgtacagttccgttatcatcgatccacggtactttgaaggagatgatcctctctggctctacaagacgctcaaggatagaaagtttacgatactcttcctcatttttgtcaattacgactttaagggaatcgagaacttccttaactgcctgatggaattctggctcgccaggattctgtgctacaactctttcataaacttcttctgtgtaagacattgttgtttcctcctcatcacatattaaattgcgttgaaaactaaattcgagtgctattatacattaacatgctaaaaaagggaagtgctaaatttaatttttttaaatttttatttcttgcgttgaaagcctaaatgtgagatgatatagaataaatattttttgactatgaaattaaaatggttaaataatagtgaaaattagaagaggagtggtttttatgagaacattcgggaaatcatcaaagcttgacaacgtgctgtacgatgtgcgtggaccggttgtggatgaagctgccagaatggaagaagatggaatggagattctgaagctgaatattggtaatccgtatccgtttgggttttcagcaccgcaggaagtgatcctggacatgctgagtaatgtccgtacttcccagggatattctgattccaagggcattttttctgcaagaaaagcgatcatgcagtatgcacagcttcgcgggatcccgggagttaccattaatgatatttatacgggaaatggtgtcagtgaactgatcaacctttgtatgcaggcgctgcttgataacggggatgagatcctgatcccggctccggattatccgctgtggacagctactgcaacactggcaggcggaaatgtagttcattatatctgtgacgaacagtctgactggtatccggatattgaggatatcaagagcaagatcacaccaaggaccaaggcgatcgttatcatcaatcccaataaccctacaggtgcagtatatccgaaggagatcctggaacagatcgcagacattgcaagagaaaatgagctgatcatcttttctgatgagatctatgaccgtcttgttatggatggatataaacatacttctattgcatcccttgcacctgatgtgttctgtgtaacgttttcaggattgtccaagtctcatatgatcgcaggtttccgcatcggatgg

SEQ ID NO: 273 - DNA, 3183 bp, Unknown
  gut microbiota DNA sequence
gggatactgttaaaaaatatccattataattataagccaaagaatatgaatagtgcttatctattactgtttcgaaacttcccaggggtggtattataatacttatgaaaaagttcacaaaaataactgctatttgaaaacccgcaggtatatgctatctcagtaacagacattgtagtattttgaagaagaaaaacagatttttccaaacgatagcgatttagatataccattggggaagtattcaaatatttctgaaaaagggaagtgcattttgtcttgcagcaatttcctgaggatgaaatatctttaagcataattttttggggataatttttctgcacatatccgatcattgtagtaagagccagagtatcctctgtatctttatcataatctggaaaatagttcatattttcagcaaggaggcgaaaaatatgaacggttttttccagcgtaataaatggctgtatttcatccgcatttttttggtaaagcatttcaaggtcacgaagaatagaattctgccacaggatagacggattcagtggctgatagggaaaatgaatattctgtatcaggggatttagacatttttccacaaaataagcatttacagaaagcaactgcggagataacagaatacagataaagagacattctgtatgagtatcggaatagccataatgaaagcagcggctgtttacaaaaattccttcacctgcttgcaaagaaatcttctgaccattcacatcataaaacatctgtccctctaaaatcagaataaattccagatcgtcatgccaatgactgactgcacgaaaatcaggatagcgtgaaagctgtcccttttttatatatgcaggaaagtctggattgttataggcaacattttcagatgcatctgaatttaaaacaatgcttggacatacttccatcaaaataatctccttttcgaacgtttgttatattattatggctgattatggtataaaaatcaataaaattggtttatttttatattgtgcacagaaaggaaaaattgtagatgggaaacgaattcacaaataagattttgaaacttgctctgcccattacagcacaacaatttatgttagcacttgtaagtgcatgcgatgcttttatgttgggaggattaaatcagaactctctgtcagcagtttcgctggcttcgcagatcacctttgtttttaatttgattttaacagcacttacaataggggaaaatatgtttgttgcacagtattatggaaaaagagattttgatggattacggacatcagcaggacttgtattaagatatgtattcataatttccattctctttctgcttgcaacattctttattcctgaaacgctcatgcgactgtttacaaacgatactatactgattgattatggtattaagtatttgaaagtgattggattatcctatatcttttcaggagttctgcaggttttgtagggaatcttgaaaaattgtggttatgcaggtagatgtaccataataagtgcagttgttgtctgtgttaatattatactgaatgttattctgatttacggatacatgggccttccaagaatggagattgcaggtgcggcactggctactgtcattgcaaatggacttggtctggttattacgatttatattttgcacctgaaaaaggaattttggattggagtaaaagacataaaaaacagggaagtccatataacgaggaaattctggaaacatgtttatccggtactttttaatgaacttgcctggggcggtggatttacgatgtattctgtcatacttggacatcttggttccgatgctatcgcagccaattctattgcaaatataaccaagaatcttttaatctgtggttgtaccggctttggatatggtggaagtattattgttggaaatctgcttggtaaagggaacttatctgaagcaaagaaaaacggaaatattttatgcaaaacttcggtatttttgggcgtggtgacggctggagtgatttttcttgcgacacctgtaatcctgcattttacgaatctgactgatatagcaacaggatatttaaagaatatgctgtttataagcagctattatgtaataggaaaatcgatcaattctatgacaataggtggtatttttcctgcagggggagatacaaaatttggattaatatgtgatgtggttactatgtggtgctttgcagttccactgggatgtatcgcagcatttgtatttaaattgccggtaatgatggtgtattttgtcttaaatctggatgaactggtaaaacttccggcagtatttaaacattataaacaatataaatggttaaaaaatttaacagaaatggaggattaaattatggatatgaaaaaaagaagagatatgcagcttgcttacatttcagatgaagcggttatggaagaacagaggataggtagaaaaattctgcaaaaacttaattttgcagatcggtcggattttgatgggattgcagaaatagtaaaagaacttttgggaaaatcggaaggtgcatggattaacccacctttttactgcgattatggttcgcatatagaagtaggtaaaaatttctttgcaaattataactgtacaattatagatgtggcaaaggtaaaaatcggtgataactgtcagatggcacccaatgtatctatttatacagcgggacatccaatttatccagatacgcgcaattctgcttttgaatacggaaaagaggttaccatcggggataatgtatggttgggaggaaatacagtagtgtgtcctggagtacatattggagacaatgtggtaattggtgcaggaagtgttgtaacaaaagacattccggattggtctattgcagccggaaatccatgtcgtgtgattagaaaaataacagatgaggacaggagaaaattgtttcacaatgaagaaattgatgatgaagcatgggatatgatatgtgcacaggcggaaaaataatgcatcttaatccagtccatcagaatgtgaaatcctgcgtcagatatctttgccgtgcgtcaaatcgagcaggaagcccccacttcaaaatcgtaagatttaagtggtgggagcatgtcacgaccaccatattcaaaggataggattcataaagcaac

SEQ ID NO: 274 - DNA, 5593 bp, Unknown
  gut microbiota DNA sequence
ccgaaacaagcctcactgacacggttcttctgcatggcgcggataaccttcatctggttgtattctgcagtcttatcaaatttctcaaaacgttctttcagggaatcttccacggatttaccgaaatcgtaaactgaggaagagattccaagctgtgcatataattctttcatgatcatttttccttttttattttatttggcatggaggattcccttttccctgcatacagaaagcatgtaggaaaggatcctgctgtcatcgtaatcaaagttatttttatctacccaggttacctcgccttctctgcggaaccaggtaagctgacgtttggcaaagtgtctggtgtcacgtttcaggacccgtacggcttcctcataagaatattttccgtccatccagtccaggatttccttatagccaagcccttgcatggaaaccattcccctgtggcagccaagctcccgaagttttttaacttcttctgtcagaccgtttttcagcatttcgtccactcttgtgtcaatgcgttcatagagaagggggcgtggtgcattcaggacgaaataagccagtgcatagggactggtatgctccttctgttcttcattatgctcggagattctggtaccgttctgtttataaaattccagggcacgtatcacacgcttgacattgttctcatggatatctttggctgacttgggatcgaccttggcaagcatgtcatggagaaatgcagaccccttctgctctgccagttcttccagctcactgcggtaatgttcatcctggtcggagctggtaaaatcaatatctctggtcacagactgaatataaaatcctgtgccgcctaccaggatcggaatccggcctttgttataaattttgtccatggcatcttttgccatctgctgaaaaaggacaatgttaaaatcttctgttggctccagtacatccaccagatgatgtgggacgccatccatttcttccggcgtgatcttggcggaaccgatatccatgtggcggtaaacctgcatggaatccgcggaaatgatctctccgtttactgcttttgcaagggcaatggaaagctttgtttttcccacggcagtaggcccggtaagcacgataagaggttttttcatatatttcctccgtttatgttaagtatcttacacgatacgtttgaattttttttcgatttctgtcttactcatggcaatgatcgttggtcttccatgaggacagttataaggatttttcagtgtcaataattcatcgatcagcttgtcagcttcctgaggcgacatagaatgattgccttttacagcagccttacaggccatggtcgcaagccttgaggcaaaaatttcaaaggcatccctggaaccgtctgcagtgaggtggtccagcatttctagaaacagctcttcttctgtcattcccagaaggctcgagggaaccgcactgatactgtactcccttccgccaaagggttcgatctcaaagccgaaatcccggaaatacttttcgtttgccttcagcagattctcctcctcaaggctgagtgaaacgatcagtggcggacttacatactgggactggatgttctgggactgaaacagctttacgaatcgctcataatatactttttcatgagcagcatgctggtcaatgatataaaaattatcctcgaactgtaccagccagtaggtgtcaaacagctgtccgatcagcctgtggcggcttctggattcaggagcaagaagccgttcttcaaacagttccagctgttttggcggttcctgttcctgagatttgatcggttcgttgtctacctcaggaggtgccgattcagcaggcttttcagaaatcacttcagaatctgctgtttctgcagcggaattttcatttcttccgtcttttaatgttccggaaaacatttcctcttcttcttttgtaaaaggctgtgatccatatacggggttttcccgcagagaatccacatgtttgtatttatctgcagaagaagcagaagaactgtgagatgtttcagctgagccataggaggcggtaccatttgtcgacttatcataaggcatcgatggaaccggcgttgtacgtacttcagaagctgccggtgcagtatgggaagctatatttgccgtccggttcgggtgaccgtacatctcctgacgccgttttacttcaaaaggctccggaatatttcctggctttatctgttctgtgcgggatgtcggttcgtcttttcccacagatacctgcgggatcagttctctgtgggtcaataccttgcggacagtttcataaatggccgtataaacttcggtttctctggcaaaacgcacctctctctttgcgggatgcacattaacatccaggtcattgccgtccatttcgatccgaagggagacaaacggaaatttatgctgcatgacaagtcccttatatccgtcctcaatggccttggtaatgatcttgtttttaacatacctgccattgatataataattctcaaaagtacggtttcctctggaaatctccggtttccccacaaagccctcgatcttcatgaaatcattttcataggaaacatccagaagcgccttggcaatctcacgtccgtaaacactgtagatcacatcttttacactgtagtttccggaactggaaagcttcacctgacggttctggatatatttaaaggagatttccggatgggaaagcgccagctgctccatcagagtattgatgtaaccggcttctgtcatatcggatttcaggaatttgctccttgcaggtgtattgtaaaagaggtttcggatcagaaaggttgttccctcgggtgcccccatttcctccagagactgttcttttccgccttcgatcacataccgggtaccactgatcccggaaggcgtctttgtgatcagctccacctgggagacagcggcaatactagaaagtgcttcaccacggaagccaagagaggcaatgtgagtcaggtcttctaccttttcaattttacttgtggcatggcggagaaaagcaagcggaacctgctctgcatccattccggagccattatccgtgatacggatcagcttttttccaccgtctgtgatctccacagtaatagcggtagcacctgcgtcaatggcattttccacaagctcttttacaacagaggaggggcgctctacgacctctcctgctgcaatcttatcaatggtattctggtctaaaactgcaatttttttcaagggtatcaccaccggttcttaattttgttctgcaggttatagagaatattcaaagcttccattggtgtcagatttccaatctccaggtttttgatctcttcaatgatatcattgtcctgtaccgtgtcaaacagtgacatctgtgccatatctacctgatcataggtgattttctgctttttctttggagcggtcagatcttttacagctgcggtgatatctgcatcactgagctcctctaccagttccttggcacgctggatcacggaatccggaactccggcaagcttggctacctggataccatagctcttatctgctccgccttttacgatcttacgcaggaatacgatgtcgtcgcctttttccttgacagcgatacagtagttgttgacaccggaaagcttgccttccagttcggtaagctcatgataatgggttgcaaataaagtctttgctccgcagagtttggtgttgctgatgtgttcgatcactgcccaggcaatggaaaggccgtcaaaggtactagttccacgtccgatctcatccagaatcagaagacttcgggaagtggcattacgaagaatgttggcaacctctgtcatctccaccataaaggtactctgtccgcttgcaaggtcatcggatgctcccacacgggtgaagatccggtcaaccacaccgatattcgcactgtccgcaggaacaaagcttccgatctgtgccatcagtacgatcaatgctgtctggcgcatgtatgtggattttccggccatgttcggtcctgtgataatggagatacgttttttgtggttgtcaagatacgtatcatttggaatgaacatatcgttttcgatcatttgttccacaaccgggtggcggccatttcgaatatcaatgaggccggtttcattgatcttgggccggacaaagttattcctctgtgcaaccagtgcaagggaagcgaaaacatccagagccgctactgcctttgcagtacgctggatacggacaacctcagctccaacctgatcacggatatctgaaaacagttcaaattctaatgcataaagtttatcttccgctccaaggatcagatcctccagatccttcagctcctgggtgatgtaacgttctgcgttggtaagagtctgtttgcggatatagttctccggcacgagatccttgaaagtgttggtaacttccagggaatagccgaatacacggttatatttgatcttcaggctcttgataccggtgcgttctcgctctcttgcttccagttcagataaccacttctttccatctgtccgggagcggcggaatttatccacatcttcgttataaccttcccgaatgataccgccgtccttctgggcaaggggcggatcatcagcaatggaattacggatcagagcggtaatgtctgacagtggatccatgtcttcgttgatctgcataagcagcggagatttaaattctgcaaggatctgctttatataaggcagcatttccagggaagaggcaaaggaaaccaaatctcttgggttggcggatttatagctgatacggcttatcagacgttccagatcgtagatcggatttaagtattcccggatctcatcacgttccataggttttgcgttcagttcttccagggcaccaagtctcttttcgatttcctctgcatcgatcagaggctgctccacataagaacgaagggttcttgcacccatggcagttttggttttatccagaacccagagaagagaacctcttttctgcttttcgcgcatggtttccacaagctcaaggttacgacggctggagctgtcgatgagcatatatttttcagcagagtacgggcggatgcttgccatatgggaaagtgctgttttttgtgtttccttcagatacaggaacagtgcaccggaggcaatgatcccgctgtcataatctccgatcccgagaccttccagatttcctacgtgaaaatgctctttcagggttttctgacacagctggtcgtcaaagtaccagggatccagagcaaatacacagatcccaagacgccccttcagatccgctacatccacaccgcttaaaagaaaggcgtcgttgcagatgatctctgcaggtgtaaacttattgatctcatccagaagcttctgtggtttatccagttctgtgagaaaacagtcaccggttgtgatatctgcaattgcacagccaaaatgatctccgatggagacaatggacatcagataattgtttttggactcgtccagtgacatggtatccagagt

SEQ ID NO: 275 - DNA, 3005 bp, Unknown
  gut microbiota DNA sequence
aggcgtgtgctgcctgtcgccggactctgcaggaggggagctgattcttggctggcggaaatctgcgttgttttacaaaagtccgctgtctgagcggctgcaagacgcgagttcggacttttgtaaaacgcttttagcagattcccggcagcctagaagccagcccccgacgaagccccggcggcaggcagcacacgcctcacgggcgtcccttttcaccaaaaaaagccgaaccagccacatcccgcagccagttcagctcaacccatacaactacaaactcactcaccatcaacccaggcaagcagcttcccggtaaaaaccctattaaagaaatggatcaccggccccagcccaaaagccgtcaccagtgtaccaatacccacaacaccaccagtcagataacagatcagcgcacaaagcacatcattagacatcctgtgccagaaataaggaatcttcggccatctctctgtcataatcagcgaaagactatcataaggcgcaaccccctcatccggcatctgatacatcgacagtcccagacagcagatcacaacacccacacacagtgccaccaaacgtaccggcagcgccacaagctccaatccaaaaacaccagtataaatattataaaagaaagtagtaatataagccagacaaaccgcattcacaaccgtaccgatcccaaggaaccttctgccaaaagcaatctcaatgatcagcaacacaatatttacaatcagctggaaattaccatacgccataccaatcatatccgcaaccgccatattcattccactgaacggatccgttccaagcccggcaagcttgaaaattccaatccccatacctgcaaaaacatttccgatacacatgatcagaacatgcttccagttaatgttcttcaaaaaatcccccataaacctcatacctcatcctctctgaaaatattgtcaggcagatatccacgatccaccttcactgcgcaaaatccataccagataataccttaatgaacagcctgctgcaacgcttatattctatcacaccacctcacccctgtaaaacacaaaagccccaagaaacaacaaaaagcaacaagaaaaggcatctagcagatcaggccggtataaatccccaaactcccaattatatgtcgattaatttttctaataaatgcattttttttttaaaaaccattgaaatccatcaattcatgtgatactctgtgttacagtgtttttctacacagaacgaatgaccgccactaccgtacacaaaaaggtcctggcatcattcaaaaataaaaaaactcaggagagtctcttcaaatcaaaagggaagagcgccgaaggtgtacgcagcacacaaaatgctgtaaatctctcaggcaaaaggatggaggaaagagtaatgtttacacaaatcaacaactttatcacatggtttgacggagtcgtttggggacttccgctgatcattctgatcctgttcacaggaattctgttaaccactcggttaggtcttttacaggtaagacacctcggaaaggcactgaaattcatggtaaaaaatgaagaaggcggcgatggtgaggtcacaagcttcggagctctgtgtactgcgctttcagcaactatcggaaccggtaatatcgtaggtgttgcaactgcgatcgcagccggcggaccaggagcacttttctggatgatcgtagccgcattcttcggaatggcaaccaaatacgcagaaggacttctggcgatcaagtaccgtaccattgacaaagaaggccacgttctcggcggacctttctactacatcgaaaacggtatgggaaaacagtggagatggcttgccaagatcttcgcatttttcggagcaggtgtgggacttttcggtatcggaacctttacacaggtaaacggtatctcatctgcagttaccaatttctttgacccggataaagcacacacagtagcacttttcggaaatacatattcctgggcaactgtagttgcatgtctgatacttaccgtatgtgtaggacttgtcgttctcggcggaatccagagaatcgcaaaggtatcccaggtcgttgtaccgtttatggcagttctctatgttgcactggcactgatcattgtgatcacaaacatcactgcagtacctgcagcgatcgtaactatcgtaaaatctgctttcacaggaagcgcacttgcaggtggcgcaataggaaccatggtcgtagctatgcagaagggtatcgcccgcggtatcttctccaatgagtccggtcttggtagtgccccgatcgcagccgctgcagctcagacaaaggagccggtacgtcagggtcttgtatccatgacaggtacattcattgatactatcgttatctgtacaatgacaggtctttccatcgtcattacagaaacatggaacacaggtcttgagggtgttgccatcacaacagccgcattccagaaaggacttcctttcccgccggttgtagcatccttctcactgatgctgtgcctggtattctttgcattcacaacaatccttggatgggattactacggtgaaagatgtctggaatacctgttcaacagaaacaaagccgcagttacaacataccgctggctgtacatcatctgcgtattcatcggaccatatatgactgtagcagctgtatggaacatcgcagatatcttcaatgccctgatggcattcccgaacctgatcgctcttcttgccctgagcggtgtggttgtaaaagaaacaaaagatttcttcaaaagacataaaaattacgagttctgatcccggacatcgtaatcaactgaaaacacgcacaaacccataaaatcccccctaatatcatacaaaaaagacgcgtacccttttatcatccgataaagagtcgcgtctttttcattattctaattttaatgaaacttctctgatcatgcacctgactttttcacctgtatgatgat

SEQ ID NO: 276 - DNA, 5597 bp, Unknown
  gut microbiota DNA sequence
tgagacaaagagaagcatacagaaggagacaataagaaaaccatgaacataaaacgagcaaagcaggagatcagagattccatagaagcatatctttcaaaggacgaattcggtgagtaccggatcccggcgatccgacagagaccgatccttcttatgggccctccgggaatcggaaagacacagattatggaacagatagcaagggaatgcgggattgctcttgtttcctataccattacccaccacaccaggcagagtgctgtgggacttccttttattgtaaaaaagaattatggtgaggaagaattttctgtcacggaatataccatgagtgagatcatttcgtccgtttacgacaaaatggaaaaaacaggtctgaaagaaggcatcctgttcattgatgagatcaactgcgtatctgaaacactagcgccgatgatgctgcagttccttcagggaaaaaccttcggaaaccagaaggtgccggaaggctgggtgatcgtcacagcaggcaacccgccagaatataacaaatccgtccgggaattcgatgtggtcactctggaccgtatcaagaagatcgatgtggaggcagactttgatgtatggaaggaatacgcctatcagcagggaattcatccggcggtgatctcctatctggagcttcgcagaaaaaatttctacagggtggagaataccgtagacggaaagatctttgccacagccagaggctgggaggatctttcccgtctgatccaggtttatgagatccttggaaaaaccgtagaccgtgaggtggtcagtcagtacattcagcacaggataatcgcgaaggatttcgccagctatctggctctttattataagtacagaacggactataaagtggaggacatcctgaaaggaaagtgggatcccattactctgggtaagatccgcacagcctctctggacgagcatttgagcattgtaagccttctcaacggaaagctcagcgagctttttacagaatgctatcttaccgatgcctacctcacgaaactgtatgattatatggtgtacttcagagaagatcagaacagcctcacagcaaaaaatctcatggaaaaagcagaggcggatcttgaaaaggacaaaaagagtgagcttcttacaaaacagcaggagcgtatacagaaacgtgttgtgtcattttttgaaaatgcgtccggatcgaaatcaacctcgggatcaattggatcgaaatcaaccggatcagataaaaccggatcaggttcagagctggcaggaggcggaagtgccgcagtagaatcggaagttccatcatcaaaccggaactatgagtttgtgaaagccctctttgaatccgaaaccgaagcctacgaaaatcgaaccgatgaaatatctcttactcttcagaacgtcttcgacttcatggaagctgcttttggggacagccaggaaatggtggcatttatcacagaactgaatgccaactattatagtctctggttcattcgggagaacggttctgaccagtattacaggcataataaaggtcttctttttgacgaccgccagaaaatgcttctgggacagatggaggaagtggaaaacattctcaataatggaataaaataatatgtcttaccaatttattatttactattgattaaattggggaattatcgtataatatttactataaaagtccggaaaatagagagggcaaatagtcaaaatgcacagactggctgaatggctgcagagcgattatatggtgcagaactgcatgatgactgagaatggtgaatatccacttgtctatattccgggatttttatgtaaaggaaggcaacacaataataaaggaaggcggccgaaacggacgacatgtttacaaagattacagaagaacgagcatttgacggaatattagtgcagatcatagaaaatatccggcggggagaactgaagccgggggacactttacctgcggaacgtgttatggcagaatcactgggagtttccagacctgctgtccgtgaagtcctgcgggcactggagctgatgggaattgtcacaacggtccgcggcggagccaactatattaccgagaatatggatcagtggctttctgcaccactggcccttctttttcagctgaataacagccatgtacagcaggtacaggaacttcgttctgcgttggagcaggaggctgcgcttcttgccgccgggaattgtacggagaaggatgcattagatctgcgttccatcctggcacagctggagagctcagaggacgagaaagcccgtgcaggtcttgataagaagcttcatacgaagattggcaggatcgcagggaatcctatgatctacaatgtactggatgcggcagcgcagctgactgaggagatcatttccggcacccgagcctatattatgcagaaacataattccgctctggaggtggatgagcagcacagaaggctggtggaagccattatttccggagaccggaaccaggcggagaagctgatgcgcgaacatatggaaaccattgagaaatatatactggagattgcgcagcagcagggggagaacagccttgtatttcatcgctgatccacctgaaaaaattaaataaaatttcagtaaaaatcccgttaatctggtaagaccactattgattttggtaagaccgcgtgctataatagggactgtattggtaataccaaaaaagtttgatattatggcagcatcctgaaggcttcatgacgagacagcataagatgagacagcgtaagttaggacagcatgagactagacagcgtaaggtaagatagcatgaggcaggacagcataagacgagacagcacaggatgaaggttactgtacccctgcagtatcatataaaatatgcagcaggccacagcgtgggcggtaacctgccggaaatatcaggagaaaggacttgcgattatgggatatgtaaaatggagttatgacacactgaaccatttctgcggagacgtttttaaagcgtttggcttttctgaggaagaaggaagcatcattaaagatgttcttctgactgctgatctgtatgggatcgagagccacggaatgcagaggatggttcgttaccataaaggaatcgagaaggggactattcatccccaggcgaaaccggaagttgtttttgaaacaccgatttctgccgtgatagacggacataacggaatgggccagctgatcagccattttgccatggaaaaggcaattgagaaggcaaagacaactggtgtgggaatcgtaagtgtacgaaattccaaccatttcggtattgcaggatattatgcgaacatggcctgccatgaaggccttcttggaatggcatgtaccaactccgaggcgatcatggtaccgacttttggaagaaaggctatgctgggctccaacccgatcgcagtcgctatgcctgcagacccgtatccgtttttctttgactgttccacaacagttgtaaccaggggtaaactggaaatgtataataagatgggcaagcctcttccggatggctgggcacttgacaaaaacggtcatgccagcaataatgcaccggatgtacttgcaaacatcgtagccaagaagggcggcggaatcatgcctcttggtggaaacgaggaagtcagcggaagccataagggatatggctatggaatgctctgtgagctgttcagctctattctttccatgggcgttacctccgacaaatgctgtacattcccggataagaccggtatctgccatggatttatggcgatcaacccggcggcattcggagatccggatgcgatccgcaagcatttttcagaatatcttgaggcacttcgggagagtccgaaggcagacggtcaggacaggatctatacacacggcgagaaagaggtagctgctgaaaaagacagaaaagagaatggcattccggtcaacgacaataccatggtagagcttgctgatctctgcagttatctgaagcttgattttggctcttattttgaaggctatgagcttccgaaggacagtaaattcttcaatggtaattattaattcaggtaatccttttgaaatgaaatatatcataattatccaaggaggaaaagaaaatggattatgcaaaagagtcattaagactgcacggagattggaaaggtaagatcgaggttgttacaagagtgccggttgagaataaagacgacctttctcttgcatatacaccaggtgtagctcagccttgccttgagatccagaaagatatcaataaatcctacgagcttacaagaagatggaatatgtgtcttgttgtaacagacggttccgcagttcttggtcttggtgacatcggaccggaagccggtatgcctgtaatggaaggtaaatgtgtacttttcaaagcattcggcgatgtagacgcattcccgctttgcattaagagccatgatgtagacgagatcgtaaatactatttacatgatctccggatccttcggtggtgttaaccttgaggatatctccgctccgagatgctttgagatcgagaaaaaactgaaagagaaatgtgatattccgatcttccacgatgatcagcacggaactgcagttatcacacttgcaggtttgacaaacgctctgaaggttgtcggaaagaagaaagaggatgttcgtatcgttatgaacggtgcaggtgcagctgctatctctatctgcagacttcttctgaaagcaggcttcaaggatgttacactctgcgatagaaagggtgccatctatgagggacgtacagaaggaatgaacccggttaaggaagagatgagcaagctcacaaaccttcagaagaaacagggatctcttgcagagatgctggttggcgcggatgtatttatcggtgtttccgctcctggagcagtgacaacagagatggttaagaccatgaacaaagatgccatcatcttcgcatgcgcaaacccgacaccggagatcttcccggatgatgcaaaagcaggcggagcaaaggttatctccacaggaagaagtgacttcccgaaccagatcaacaacgttcttgcattccctggaatcttccgtggtgcatttgatgtaagagcaagtgatatcaacgatgagatgaagatcgcagcttccaaggctcttgcagatctgatcacagatgaggagctttctccggagtatatcattccgaaggcattcgacaagagagtcggaccggctgtcgcaaaagcagtagcagaggcagcaaaagcaacaggcgtagcacgtatctgatcttaagcgcctgatacgaaccaaaacagcccttcattaagaagaatatatcagacacccgtactctgtaacccggtacgggtgtctttttgtttccaggcaggtggtattaccctttgacaaatgtcctcgcagtgagtacaatagcaaaagaatatgataggaggttaagcacagcatgaaaccatgggaagctaatatacgaaaagtagtgccgtatactcctggcgagcagccaaatgagag

SEQ ID NO: 277 - DNA, 13486 bp, Unknown
  gut microbiota DNA sequence
ccatatgtttccggttcttcagaaatgtgcgaacttcttacagagggaacaagaaaatggacaggtgctgcttacacagtagagacagacatcgagaaattagttgatcttatgatcgagagaattgaagagaagagaacagcattaggaatctaatccgttgcgatctttaaaatgttataaaaggtggaagacgtaaaatgaaaatagcagtaaccggtaaaggcggagtaggaaagacaactttcgcagcaacacttgcaagactatacgcagatgagggaaaaaaagtccttgcggcggatgtggatccggatgcgaacctgggtcttgcccttggatttgacgaggaaaccttggattctattgttccaatctcaaaaatgcgtaagctcatagaagaacgcaccggagccaacagccagaatcagttttataaactgaacccaaaggtagacgatattccggatacttatggaaaaacctgtaatggcgtaaagctgcttgtccttggaactgtggaaacaggtggaggcggatgcgtctgtcctgaacatgtgatgcttaaaagagtgatcaataaccttgtgatccacagagatgatgtggtgatcatggatatggaggccggcctggaacatctgggtcggggcaccacggagagcatggatgaatttattgtagtgatcgaaccaggggcaagaagtgtacagacatataagaatgtcaaacgtcttgcaaaggatctgggagtttctcaggttaaggtcgtggccaataaggtaaggaatccggaggatgaggaatttatccggagtaagatcccggcagaagatctgcttggaatgatccactacaatacagaagttatagatgctgatcgtcagggaaaatctccctacgatttcagtgaaactgtaacagctgaaatcagaaaaatcaaagacaaaattgatcagaattcaattctgtaaaaataggaggtattacagtgactttatttgatagagtattcggcggaaacgatgctgtatatggtttaacagagggtgctattgacggcgcgatcgctcagtatggcgaagacaaagctgtcagcttcccgaataccgcttacagccttccttgctactatgctgtaacaggaacaaaagttacaacattaaaagaattaaaagaagctcttggcgttgtaaaaacacttatgacaagagagaaaagactgaacgatgcattcatgtccggtgttgctacagcactctgcgcagagttcatcgaggttctgaaatatatcgacggagcaactccttacgaagagccatgctatggacatcttggtgatgctgttatccgtgagctcggtgtaccgcttgtaacaggcgatatcccaggcgttgctgttatccttggtgctgctcctactacagaagagggtgttgctcttgtaaagagctatcaggcacagggtatcctggtaacacttgttggcggaatcattgatcaggttgcagaagccggaatgaagacaggtgccaacgttcgtgttattcctcttggaaaagatgttacatctgttgttcatgtagtttccgttgcgatccgtgcagctctgatcttcggtaacgtaacacctggagatgcaggaacacttatgaaatacacaatggatcgtgtaccggcatttgttaacgcattcaaacctctggatgatgtgatcgtagcatgcggtgcaggcgctatcgcacttggattcccggttgttacaaatgagacagagaatatcttccgtgtaccgaagagccttatcgttcaggaggacgtaagcaaatttaacgctacttctcttgaggcgcgtgatattaagatcaagatcacaaatattgatattccggttgctttcgcatctgcattcgagggtgagatcatccgtcgtaaagatatgcaggttgagttcgatggctcccgtgtagactgtgcagagcttgtacagacctgcgatgcttctgagatcgaggatcacaagatcacagtgatcggacctgaagtagatgagatggaattcggcagcaagaacagcattgcatatgttgttaaagttgcaggtaagaacatgcagtctgactttgagccggttatcgagcgtaaattccacaactatatcaactgtatcgagggtgtataccatacaggacagcgtgatatgcagcgtatccgtatcagcattgatgcatttaatgcaggcttcagaatcaaacatatcggtgaggttctttatgcatctgttaagaatgagttcgatgcggttgttgataaatgtgaggttgttatctatacagatcctgctgagtgtacaagaatccgtcatgaggttgcaattccgatctttgacaaacgtgatgagcgtcttgatactctgacagatgagtctgttgacgtatattacagctgtatcctttgccaggcattcgcaccaagccacgtatgtgtagtaacacctgagagacttggtctttgcggtgcggtttcatggctggatgcaaaagctacacatcagcttgacccagctggcccttgccagatcatcacaaaagagcgtccgatcgatgagaatcttggttcttatgaggacgttgatgaggcagttcagaaattctcccagggtgctctggagcacgttacactgtactccatcatgcaggatccgatgacttcctgcggatgcttcgagtgtatctgtggtatcgagccattctccaacggtgttgttattgctaaccgtgagtatgcaggcatgacaccacttggaatgacattccctgagatggcatccatgacaggtggtggagttcagacacctggattcatgggacatggtaaacatttcatttcctctaagaagttcatgaaggctgagggcggtatcgagcgtatcgtatggatgccaaaagaactgaaagaattcgtagctgacagacttaataagactgcaaaagagctttacggaatcgataactttacagacatgatcggtgatgagacgatcgcagaagatccagagacactggttgcattccttacagaaaaaggacatccggctctcggacttgatccgatgatgtaatttatccgggagaaaggatgtgcggacatcctttctcctgtaaactgttaaaaagtttgttgattttttaacagaaatatagtgctgcatcttgccaataactggtgctatgtagtataatataagaagctctgtagtttttaattattatttttaaggaggctaacgaaaaatgccgtttaatcagaaaccacaaaagttcaatgcaaagattaatgctgtcacaatcggaagcggagataagactgtgacaattggtggggattgtacattcccattttattcctttgacgcagagtcagagaactgcccgaagatcggtgtagagatctctgatatgggtcttgagggcgtatctgaaggtatcaaagcttactatgaaggcgctactacaatggctgacattgctaagaaagctgcagctatggagggtgctgactttgttgcacttattcttgagggcggcgacccgaacggtgttaacaaatctatcgatgagctgatcgcagttgttaaagaagttgcagatgcagttgactgtccactggttgtagagggctgcaagaatgttgagaaggatgcagagctccttccgaaggttgcagaggctcttcagggcagaaatgcactgatcctttccgagaaagaagagaactacaaagcgatcggtgcagcagcaggtcttgcttacaatcagatcgtaggcgctgagtctgccgttgatatcaaccttgctaaacagcttaacgttgttactacacagcttggtgtagatgcaaagaagatcgttatgaatatcggtagtgcagcagttggttatggatatgagtacgtagtatctactatggaccgtatcaaaggtgccgctttaggccagaatgataacatgctgcagatgcctattattacacctgtatccgctgagacatggaatgttaaagaggcaatggcttctgaagcagacatgccggcatggggaccacaggacgagcgtggaatcgacatggaagttgagacagcagcagctgatcttgcagctggttctgatgcagttatcttaagacatccggaatctgttaagacaatttccaagctgatcaaagcacttgcgtaataaataggaggataaagagctatggcactgaatggtattcagatctttaaattaacaccaaagaaaaactgtaaggaatgtggatgccctacatgtatggctttctctatgaaagttgcacagggcgctatgaaaattgagcagtgtcctcatatgtccgaggatgcattagcatctctttctgaggcaactgcaccgccaatgaaaactatcaagattggaacaggcgatggagagtttacacttggtggagagactgttcttttcagacatgagaagacatttgtaagcaaaacaagatatgccgtatcactttgcacatgcatgagtgatgaagaagtagaagcaaaacttgcagagatcccacacgttgactatgatcgtatcggtgagagaatgcatgtagagcttgtgtatgtaaactgcgatgagaatgcagatgctgcaaaatttacagcacttgtagagaaggctaaaggtcttggaagaacactgatccttggctgtacagatcctgagatcgcaaaagctgcccttgaagtatgtaaggacggcaaaccggttcttaacggagcaaacgcttccaactacgaggcaatgagcaaggttgctacagatgcaggcgtagttctcggtgtatccggtaaggacatcaatgagttatatgatactacagcagctattgagaaacttggcaacaagaatctcgtacttgatacaacaggagctgacatcaaagagacctttgcaaatactgtacaggttcgtcgtgcagctcttaagaatcaggacagaacatttggttatccttctatcgttaaccttgttaaacttgcgaagggtgacaaacatttacaggcagcacttgcttccatgtttactatgaaatatggttctatcatcgttatggagcagatgacatatgcagaggcacttccgctgtttggtcttcgtcagaacgtgtttacagacccgcagaagccaatgaaggtagaaccgggcatttatcctctgaacggagcagacgagaattctctcgttgtaacaacagtagactttgctcttacatatttcgtagtatctggcgagctggagcgttccggtgttccgcttaacctggtgatcaatgatgcaggcggactttccgtacttacatcctgggcagcaggtaaattctccggaaacagcatctccgagtatatcaaagagaatgttgagccgaaggttaaatgcagaagactggttattcctggtaaagtagcagttcttaagggcgatcttgaggctaagcttcctggatgggagatcatcgtaggaccaagagaagcagtacagcttgtgaaattcttaaaagaccttgatgcataaacttaaggtttaagaaatcagctgtccggcaatatcgccggcagttataaacggctgtgcaggtttgctgcacagccatatcctactaatatgtaaaggagaacacgagtatggcaaaatttgtaacaattggggagagactttcaacaacagcaccggcagtaaataaagcatttactgagagagatcctgagccgatcatcaaaagagcaaaacagcagcttgatgcaggcgctacatatcttgacgtaaacatcggacctgctgagaacgatggcgaggaccttatgaaatgggcagtacagctccttcagtctgagtttgacaatgttccgcttgctctggatactacaaaccagaaagctattgaggctggtatttccgtatacaacagaagcaaaggtaaaccgatcgtaaactctgcagatgctggagacagaatttccaatatcgaccttgcagcagctaacgatgcgatctgtatcgcactttgctcttccggtatggttgcatcagacaatgacgagcgtatgatgcactgccagaacatgcttgagagaggtcttggccttggtatggaagcagaggatctctggtttgatccgcttttccttgttgtaaaaggaatgcaggacaaacagatggaagttcttgaggcaatcaagatgttctccgagatgggtctgaactccactggcggtctttccaacaacagtaacggtatgccaaaacatatccgtccgatcatggactctgctcttgtagctatggctatgatgaatggtcttacatctgcaatcgttaaccctaacgaccttcgtcttatggagacaatcaaatcctgtgacgtattcaagggtaacacactttacgcagattcttaccttgagatctaatttggcgtgtgaacaaaacaggagcgctgtttcagaggctgggggcttcggccttcagcctcttttttactaatatagtttagtctaactcccaacgccacaggtggaagacgaataacttttacgaggcgagaaaggtggttgccgaatgtttaaggtgacttttgcttttgaaaatggcagtacggtagaagcatttgccaatgcgggggataatttactggaggttgctcgtagtgccaatgtggctatcgatgcaccatgttccggaaacggagcctgtggaaaatgtcgggtacagttaaaaagcggagaactggactcaaagaaaactcttcatatttcggatgaagaatatggcgcaggctggcgtctggcctgtatgagcaagatcagtgcagatgtggaggttcttgttccggatattgcatccgcatataagagccgaatgaaagtggctgatttgagctcaaaagaagaaatcgctatttttgaaaatgccaagcatgaagttgagatggctggcatagaacttacaaacagtcttgatgttgtggaacttcagatggatattccatcactggatgataccatgccggataatgaaagactgacccgtgcacttcagaagtttatgaacctgaagcgtgtcagaattccgtatgcggtgcttaagaagcttccagatgtacttcgtgagagtaaattttctgtgaagtgcgtggttcgtacagcaccaaatgacatgtatgtttatgatatttttgacagtaagaaagatgttgtgatcggtggtcttgctgtagatatcggtaccacaaccgtttcggcagtcctgatcaatatggaaacaggagagatcctggccaagagttcttccggaaacggacagatccgttttggtgcggatgttatcaaccgtatcatcgaatctcagaaacctggcggaaagaagaaacttcaggatgcggtgatcaaagagaccattaacccgatgatccatgagatgtgcagaagtattcatttcccggagaaacagatctaccggatgtgtgttgcttctaatacaaccatgaatcatctgtttgcagggatcaatgcggatccgcttcgtatggaaccgtatattcctacgtttttcaaaacaaattccttgtttgcatcggatgtgggaattgagatcaatccggatgcacatattatcatggctccgaatatcggaagctatgtaggtggagatatcactgccggtacactggtaagtatgatctggaacagaccggaattttctctgtttatcgaccttggtactaacggagagcttgtattcggtaattccgattttatgatgagctgtgcatgttccgcaggtcctgcctttgagggtggagatatcagctgcggtatgcgtgctacagacggtgctattgaggcatgtaccattgataaagaaactatggagccgacatataaggttgtaggtgaacctggaaccaaaccggtaggactttgcggttccggtatcattgatgtgatcagtgaactttttatgacaggaatcatcaatccgaagggaaaatttgtccgtgagggcaaaagaatccgtcacgatcattatggcatgggaagctatgtgatcgcgtttgaagaggaagccggttctgccaaggatgttgagatcacagaagtagatattgataattttatccgtgccaaaggtgctattttctctgcaatccgtactatgctgaattctcttgatttcgatgtttccatgatcgatgacgtatatgttgccggtggaatcggaagcgggatcaatatggctaatgcagtacatatcggaatgttcccggatatccctcttgagaagttccattacattggtaactcttctctgacgggtgcttatctgatgcttcattccacatcagcagagaagaaaacctatgaactggcttcaaatatgacttacctggagctttctacagttcctacctatatggatgagtttgtaggtgcatgctttattccgcatacggacacaaatctgtttccgtctgttatggaagaacagcagaagagataaagcagactaaaacagcagaggtaaaacatggcttttagtataaatgacttgaattatgaaaaagacagcaaagaaagaatgccctgggagcattatacagaggagttcgctaaggtagacccggcagaaattgccggacgtctttcacttccttatgacgaagagaagaaagaactgactctgaaattcctgggaagcgtttattatatttcctggccggattttcaggtaactcatgaggaagatgatgcgggattttatcctcttgaggaaatgcattatgcaaagatccttgctatccgttttctgctgaacgggaatgtatctcagggaagcggaaggtttaaaacatacagggaaatgccctggggagaggtttatctccgtcagtttgatggcaggtgcatcaaacgcctagctttcacatacggaaacagacttaaggatttcaaggaaattatggaacacatccatgcggttcccgtggatcatggagatattgcataccaggtggagatctttccaggatatgtagttcagatgatcctctgggagggcgatgatgagttcccgccgtcctcacagatcttgttttctgataattttccggtttcctttgcggctgaggatatggccgttatgggagacgttatcattgggtctttaaaggcatttctgaaatgtctttaaaaatgaaaaatagttaagaacaggatgggacctgtttttatagagatgcagttttaagggattaaaaactgtaaaaatacctaaagggaggtaacattatgggatttaaaagtgacatcgaaattgcacaggagtgcgaaatgcttccaatcacacagattgcagagaaggcaggtattgacgacaaatatctggagcagtacggtaagtacaaagcaaaaattgattacaatctgttaaaagagagtgacaagaaagatggtaagctgatcctcgtaacagctatcaacccgacacctgcaggagagggaaaaacaacaacaaccgttggtcttgcagatgcaatgcagaaaatgggcaaaaaagtaatggtagctcttcgtgagccatccctcggaccggtattcggtgtaaaaggtggtgcagcaggcggcggttatgcacaggtagttccgatggaggatatcaaccttcactttaccggtgacttccatgcgatcggtgcggcaaacaaccttcttgcagcaatgatcgacaaccatatcttccagggtaatgacctgaacattgacccgagaaagatcacatggagacgttgcgtggacatgaacgaccgtcagcttcgtaatgtagtagatggtcttggcggaagaacaaacggtatgcctcgtgaagacggatacgacatcacagttgcatctgagatcatggcagttctttgcctcgcaagtgacatcaaagacctgaaagagagactttccagaatcatcatcggatatacctatggtaaagtttccgagcagaaaccggtaacagctggtgatcttcatgcagagggtgctatgacagcacttctgaaagatgccctgaaaccaaaccttgtacagacactggagcatgttcctgcaatcgtacacggcggaccattcgcaaacatcgctcatggatgtaactccgtaacagctacaaagatggctatgaaacttgcagattatgctatcacagaggctggattcggtgctgaccttggtgcagagaaattccttgacatcaagtgtcgtatggcaggccttcatccaagcgcagttgttatcgtagctactgttcgtgcattgaaatacaacggtggtgttccgaaggcagatctgaacaacgagaaccttgaggctcttgagaaaggtcttccaaaccttctgaaacatgtaagcaatatcaaaaatgtatacaaacttccatgtgtagttgctatcaatgcattcccgaccgataccaaggcagagcttgacctggttgaggcaaaatgtaaagagcttggcgttaacgttgcactttccgaggtatgggcaaaaggcggcgaaggcggcatgaagcttgctgaggaagttattcgtcttgttgaggagccaaacgatttcacatatgcttacgagcttgagggatccatcgaggataaactgaataacatcgtacagaaagtttacggtggtaagaaagttgttcttacagcaaatgctcagaaacaggcaaaacagctggaagcacttggatttggcaactgcccgatctgtgttgctaagacacagtacagtctgactgatgatcagacaaaacttggtgcaccgacagactttgaggtaacagtacgtaacctgaagatttccgcaggtgcaggattcatcgttgctctgacaggcgagatcatgactatgccaggtctcccgaaagttccggcagcaaccaagatcgatgtagatgagacaggtaagatcacaggtctcttctaatcggaacataagatcaaaaacaaccggagggggctttttataaagcccccaatgggctctaaagagtgctaaaataagaatataaggaggagagtcctatgggattttctaccagtacatgtactgaatttgtcgaggtattaagctccaaggcaccggttccaggcggcggcggtgcatctgcccttgtagctgctgttggtacagctcttggaaacatggttggaagccttactgtcggtaagaaaaaatatgcagatgtagaagatgaaatgtgggagctgaaaaagaaatgtgatcagcttcagaaagatttccttcatctgatcgagagagatgcggaagtttttgagcctctttccaaggcttacggaatgccgagagagacagaagaagagaaggctgagaaggctcgagtaatggaagctgccctcaaggaagcatgctctgttcctatggagatcatggagaaatgctgcgaggctattgaacttatcgttgagttcggagcaaaaggttctaagcttgcaatcagtgatgctggtgtaggtgctgcattctgcaaagcagctcttaagggagcaagcctgaatgtgtacattaacacaaaatctatggctgaccgtgcgtatgcagaggaattaaacaaaaaagcagacgctatgcttgagaaatatacaaagatcgcagacgagacatttgacagtgttctcggaagactgaaataggaggaaccagacaaatggcaaagcagttattaggtaaagaagtaacagcggctctcaatgaaaagatcaaagcgaacgttgcagagcttcaggcaaaaggtgtagatcctacactttgcattatccgtgttggtgagaatccaagcgatatttcctatgagagaggtgctacaaagcgctgtgagactcttggtgttgcatgtgagaaaattcttcttccggaggatgtttcccaggatgagcttcttgcaaccatcgataaagtaaacaaagatgacaagatccatggagttcttctgttccgtccgctgccaaaacatctggatcaggcagtgatcgagaatgcacttgcagcagagaaggatgttgactgtatgacagatctttccatgtctggtgtatttacaggcaagaagatcggattcccgccatgtacaccgcaggcatgcatggagatccttgatcactatggaatcgactgcacaggcaaaaaagcggttgttatcggaagaagtcttgtagttggtaaaccggctgccatgatgcttgttaagaaaaatgcgacagtaacgatctgccatacaagaaccgttgatatgccgtctgttgcaaaagaggcggatatcgtcatcgttgcagctggtcgtgctggtgttgtcggcgctgattatgtcagagagggacagactattatcgatgttggtatcaatgtcaatgcagagggcaagctttgtggtgatgttgattatgcggcagttgagccaatcgttgatgcgatcacaccggttcctggcggagtaggaagtgttacaacttctgttcttgtaggtcatgtggttgaagctgcaatgagaaaagcgcagtaataacagtaataaaggattgatcatttatatatgtacagattccgaattagtttttgtttacggatgatggtacttgcaggcgttctggtgttcggaacgcctgcaggtgttttggcagaggaagcggatcattctatggagggtcagatttcgaagcctcagtcatctggagagagtgatacagagggttttgtggatgattccacagataatacttatggatattatacgatcatggggtgtaccacagtggatgcggaggatatggtagtgcagtatgaggcgcagaatgtggagtatccttccggcatcctgatggagggtggtgcaccggatattgatacgttttgcacgattgtgatagaggaagcggatgcggagggcgtccgtggagaggttgtttttgagcaggccatgcttgagaccggatggcttcagtttggtggggatgccagtgtggggcagtttaatttttcggggctgggaactaccggtggtggtgttgccggtaattcttttcctgatgtaaggacggggatccgggcgcaggtgcagcatctgaaggcttatgcttcttcggaggagctgaaccaggcttgtgtggataaccgttttcagtatgtgacccgggagagtgcaccttatgtggaatggcttgggattcaggagaatccttacggcagcggttgggccgccgggagaagttatggatataagcttaggagtcttctggcggagttgaagggggaggagtatacctggccggagagtacggagacggtggagaagtagtggtggtgggctttgccctgtcctggttgataaaataa

SEQ ID NO: 278 - DNA, 1568 bp, Unknown
  gut microbiota DNA sequence
ttataaaataggtaattttacaaagtctattacttgttgttaattcataatttatgtataataaaattcatataagaaatacacgctcagcatgcggcctggaacataaataatccgcaagtttagcgatatacgaggaggaaattctcatgggtaaacaatccaccagggaaaacaaaacaatttaccagctttgccgagaagcagcaggacttacaagagcagaagccagtgaaaaaatggatgctgtctctgattcaaaaattgaaaaatttgaatatgaaacacaagaacctacgccttatgatatcctccagatggcagatgcctataaaagaccagatctttgcaattattattgctctcacaaatgcgaaatcggctatcgttatgttccagaaatagaaatgaccgatctgtcaaatatcattttggagacaattgccagtttaaatgaaatcaatcctcttaccggtcgtctgatccagattgcccgtgacggtaagatcagtgatgatgaaatgaaagattttgcttatatcagtaaaaaacttgatgaaatttctttagccatagactctttgaatctttgggtagataaaacagctggagaacaagggctcaatcttgaactcttaaatgccgaaaaagaaaaattaaaataatccataacaccacgaaaggattacgactatagaataaccccaaccgcagtcagtgtctttaaagttgaattaatctatagaaactgctatcatatttttatcagaattttccaagtaaaggaggacatgagtggatcatgaacgtaatgcccatttccgaaatcatcgaaaaagtaaccatgatttgcaaaaaaaataacgtaaagcgccttgatttattcggttccttcgccacaggcactgcgacccccaccagtgatattgattttgtagtatacggctgtaataatctaatgcagttagaagatgatcttcagcagattgaaacgttaaggaaaattgatatttttgactttgacagtataaaaaatgagtatttattggaggatataaaaaaatatggaaaacaaatttattaaccgctataacactttctgtaaaagtctctccaatcttgcaaaaagcaaaacagccgaccccaagaccgattttgttctcgaaggaactgttctcaatttcagtcttactttcgacatctcctggaaagttatgaaagatattctgatcaaaaaaatgggaattcttgattttgcagttggctctccacgcgaaactctgcagcaggcatttaccaatggtattattgatgatgacacctggctgcaaatgctgaaatccagaaatcatttgtctcatgattacgatggtactttcgccgcagagaaatttcaggacattataaatatttattatcctctttttgaaaaattcaaaaacgatgttgcgaaatattataagcagtaaactgtgtttcgtagaagaatcaccttcagactattttgtttattatagcctgaaggtgattttaaaattgtcaatatacatccgctttattagattttc

SEQ ID NO: 279 - DNA, 2041 bp, Unknown
  gut microbiota DNA sequence
catatagtgtgtaaaacaggttcttttcgactatgcaacatcaatacggtttgttgagtagacatttgtaggagcagcaattactacaaagtcagcatcggcgtatgcggtcttagcatccagagttgcagtcaagttcagttccttctctgcaagatacttttcaatataatcatcctgaatcggagacttccggttgttgatcatctcgaccttctccggaatgatatccacagcggtctcatgatgatgctgagaaagcaatgtggcaattgacaagcccacataaccagtgcccgcaacggcgattttgtacttcttcatgttatttactcctccgattctcatcgggcatatcctctaatttttgcacttatgtacacatcctgtatttcaggatggtatttcattttcataatctcctgtgtcatatctcacagttctattaaaaataacttcgaatacactccccagcttaaagccggcacattcttcgccgtgcccacaccttcttcaggtacacacacgacaggcggtattcaacccgacggtgtttatcactgatatacaccgtgttttgctttcgctttctttttgtcagcacggcaaagccgatgcactgaccttatgacatctgttttccgacatgccataaggtcaatccacctgcgctcttttcatactgatattctgttctgtttcttttgttcttctcttcaaactctgcgtccaaactgtgtcaggcactttttcccgagatttctcacagcattcagataccgattcgtctggtgtccgttggcacagcagcatagttctgttctggtgtcagtccgaatgatttctgcaccgcactttgcacaaattttgctgatgccggtggcgtgaacttcgataacaatgattccgtttttccaggctttgtagtccaggtactggcgaatcctggtgcttaagtggagcgagccccagtttcctgagcctttcatgacgtttctggaatattcctggttataacgtggaagtacgatcacagaaacgtcctgctctacggcaaaacggaggatctggcttgtgacctggtgtccatagtgttcagaaagatgtttcagatgcatccagtatttctgatcaactctgcctgtctgtctgcctccggttgcttcctgggacttctggatcttttccagaagctttctgcaatggtggctgtattcctttccgcctttccagaacttcactgcgatctcctgaccggttccgtccagaacaacgcctgctgcaaaggcatcactgtttgtaaactgaatacagagtatcctgcatcctgcctgcatcctctgacgtacggttgctgtattttcattgttctgacgtactggaacatgcagcatgtcatatttgtattcaaaaactacggatggtgacatgagtctgacgttttccggaaagtctctgcctgacagccggcaatgcatccaagtccatgtgtctcctgtccagacacgcaacgtgatctctttagcggaaaaatcctgatacattcctttgtaataggtaactgctgcatttagtttctctgctctgccgctcttctcatcctgggcaaaacggctgatatagcttttggctgaagcaattccttcattggctgctgctcttcgaaaatacagtggaaccttttgccaggggaggggatctgatggtatgcgtccgcctcgccccggaatgctcatgatctccaactcgcgtaaagtctgctggcttcccatttcccagagatccgtatgatccagaagcaggttgtaataaaattcagcgatccggttataaaattcctgtgtggtccgcagccattccggatgtctgcaccagagatgcagtcgccaggttgtgatgctgtagccgttttttccggtcttttcttttttgccagtttccggttctttcattttggttctccgttttttgcaaagaaaaacattataatataacttatctaaattattatttttgtcacttatcatttccataagcgaca

SEQ ID NO: 280 - DNA, 21550 bp, Unknown
  gut microbiota DNA sequence
tgcaccctgtcactgtcaagatacgaaaaatgcaccactttcgaccaaaaatgcagtttttttcggttaaatttttttatatacgacaaatttttctttttttcgcttattagtggtcacaaaaatggtcagacttttgctataatagtgcgaaaaggagactacgattatgcctagaaaaggggaaaatatcagaaaaaggaaagacggaagatgggaggcgcgctatgaaaaatgtcgtgaccagaatggacggatccagtacggatatctgtatggtcgtacatacgaggctgtaaaaaagaaaaagctggctgttttatgtcagaataatcttcaaaactctccgggaaagtgttatgtatttcgaaacctcagtgaagaatggatgttatccatgcgttatgctgtaaagctcagcacctatgcctgctacgaaacacttcttgatacacatatccttccggaatttggtgatatgccgttgaaatacatctcttctgcttccgtatatgccttctctgaaaagctgaaacagcaggggctttcgccacgtaccatcaaaaatcttctgatcctgttccacagtattttacgctatggtgaaaaacaggggtatctgaatctttcacagctggaatttcggtatcccaaaataaataccagtccttttcagcttatttctcatgaacatctcacaaagctgatcacagttctctctgctgaggactcagaatttcccatcggtatcctgctatgtatttatacagggatccgcgttggcgagctcagcggtatccggtgggaagatattgattttgatgaaaagctgctacatataaggcgaacgatctcacggataaaaaatcttgattattctggtgaatctgatgacgaacccaaaaccgttttaatgataggtcctcctaaatcagtctcatccatcagggatattccaatccctgattttttattgaaaaaaatgaagcggattgctgctgaacctgattcatacctgctgacgggtacgaatcgtaaatgtatggagcccagaaatatacagcgtaaattccagaagctccttcagcaatgtgaaatccccagtatcaacattcattctctccggcatgcttttgccacccgttgtacggaaatgggatttgacagcaagacactttctgaaattctgggacattcgtccgtcaagatcaccatggatatttatgtgcacagcagcataaaacaaaagcagaagtgcatggaaaagctgaactattagcagtcagaattatggtcaaagcaggccggaagtccgcatttatacgggtttccggcctgtttgtcgcttatggaaatgataagcgacttttttaccctcaaaaaaacaacacggcagacatccctccggggctgtctgccgtgttttatatcgcttttatgtttttatgtaattaggctttctgttccttaagcctcatatccattagggttctggctctgccatctccaggagtctgcacacatctcgcggattccgttctctgccttccagcccagctctttctccgctttggttgcatcggagtagcaggttgcgatgtcgcctgggcggcgtggtttgatcacatatgggatcttaacgccggtagctgcctcaaagttcttaacgatatcaagaacactgtagccttttccggttccaaggttgtagatgcttaatccggaattgtcttccagcttcttaagggcttttacatggcccttggcaaggtctactacgtggatgtagtcacggacacctgttccatccggtgtattgtaatcgtttccgaatacgccaagttctttcagcttgcctactgctacctgtgtgatatatggcatcaggttgttcgggataccatttggattctcaccgatggttccgctcttatgagcaccgatcgggttgaagtaacgaagaagaactacgttccactccgggtctgccttctggatgtctgtaaggatctgctccagcatggatttggtccagccatacggattggtacactgtcccttcgggcactcctcggtgatcgggatcattgccggatctccgtatacggttgctgaggaagagaaaataatatttttaacattatgttttctcatcacgtctacaagagtaagggttcctgcgatattgttctcataatactcccacggcttggcaacagattcaccaactgctttcagtcctgcaaaatgaatacaggagtcgatctcttctttgtcaaaaacttcatttaatgcttcgcggtccaggatatctgctttatagaatttcaccggtttgcctgtgatcttggatactctgtccagagccttctcactggaattgcataaattgtcaactactacaacatcatatcctgcgctctgcagctctacaacggtatgacttccaatgtatcctgctccacctgttactaaaattgccatagtttttctcctcctctattggatctaactgttcctgtttattttagcactgttcctttgtttccacaatagcagaaaaccatgtttactacttaatcccagagtccctgcggataaagtccctgatccttcagattctggatcgcggctaccactaccggtttgtcctctttataggtcactccgtaccatttatcctgtgtggtaaggactttgactgctgcctttttttcctgaaggagctcgtcaactacaaacggaagaaaatattcgcatttcagaggattttccgggatgctcttttcaaggaataccgggaagcgttttaccagctctttcataaatccaccggtgaatccccacatgttcatggataccggagtctctcccgggagacttgtccaggtttttccatcgtcctctgtgtaggctgctccgccgtcacgtttctcaatgtgtgttcgctcattgatatctgcaagatatccattttcatctgtctcacagacacctctggaaacgtagccgttgtctgtcagggtattctcaagacggtagcctaccatcatatactgggcaggtacggtgtcctcctgggcctggatcaggaaatcatacgccatcttaaaggcatgggttccataataatcatctgcattgatcaccacaaacggtccgtcgatctctccggcacagcttaataccgcatgtccggttccccatggcttcacacggccttccggaacctggaagccttccgggatgttgttgagatcctgatacacataaacgatctccaccttgtcacttaagcggtcgccgatggcatcgcggaaatcctgttcattctctttttttatgatgaatatcactttcttaaagcctgcacgtacggcatcataaatggaaaaatccataatgatatgaccttcctgatctacaggatcgatctgtttcagtccgccgtagcggcttcccattcctgctgccattactaccagaaccggctctttcataatcttgttcctcctgattttttagaaatacagggattttttcccatacatagtttaagccggtcagattctcatccgaccggcctttgaacctttttttattatactacacttcaccgtgaaatcctactgattattttcagtttattttcggtcagaagtattctccgggaaaacgatctccatcctggttccaactccctgttcactttccacgttgatctgtgcatgatgaagcgttgctccatgtttcacaatggaaagacccagacctgttccgccggtctgtctggaatggcttttgtctacccggtaaaagcgctcaaagatccttccctgttcacttttcgggattccgatcccgtcatctgccacacagtagaacggatgccctttccggttgcctaccatgatccgcacatgaccattctgttctgtatagcgaactgcattgtctgcaatattaaaaagcatctcatagagtacatggcggacgccctggatcttctctgtacttccggcaagttcaagagaaatatttttctttccggcaggatgtctgagattatttcttacatcttctgcaagctcataaagatccacctcttcaaaaggaacctcactgttgctttcatccagtctggaaagctggatgatatccgctaccagattggaaagtcttattgattcatggtagatccttccggaaaattcctgtatatgatctgccggaaccatgccgttcatcataagctccgcataaccggaaatggacatcagcggagtcttcagctcatgggaaacatttgcagaaaattccttccggatctcctctgcctccttcagttcttttacctgctgccggatctgccggttctgttcatccacccgcacaagaagaggacgtagttcctcatagcacacattgttcagtggatgctccagatccagatcgttgaccggacggatcagctctctggtctgtctctgtgcaaaaacaaactccaggatcagcaccagtagcatcagaaatcccagcactgcaagacttgagatccatgtggaatatatggaatctacggtttttcccacccggagcacgtttccgtcatccagcttcaccgcataataaaaggtcttttttgcaaaggtttctgaataacggatactttcgctttttccgtttttttctgcctgtataaattccggacgatcactgtgatttgccagttttttcggagaggcctcagaatcgtagagaacggttccgtctttacggatgagagtcacacgacttgatgatactgtctgaagcttttttgtgagaaaggaatctccatactcatccatggcaaggcagatatactgcgcttcctcacggactccacgctgcatgtatgtgtttaatttattgtaggtgaccacacttgctgccagaaacgtgacaagaacagcaaaaatgatcataatgcttgtatgatgcagaattttctttttcatacatgatctccgatccggtatcccacgccacgcactgtctcaatcagatttccggcttcccccagcttttgtcggagagtccgtacatgaacatctacagtccttgtttctccgtcaaaatcatagccccacacatggcacaggatctggtttctggacatgaccagtcctttgttctccataagatattccaaaagctcgaattcctttctggtcagctccttcacctcaccctgatagctgacttcgtgacgggacacattgacacgaagacccttacagtgcagctccctctcttcgctctgccttgcgcagcgccgaaggaccgctttaaccctggctacaaattccatcatcccgaagggcttggtgatgtaatcatctgcgccgccctccagaccttttaccttgtcaaactccgcttctttggctgtgaccatgatcaccgggatatcccgggtcctggtatcacttttcagtcgtttcaaaatattatacccatcttcacccgggagcatgatatccagcaggatcagttccggcatattttttttcatggctgtgtcaagttctgccccggtttcaaaaccttctgcctcaaagcctgttgtctccagggtatagacaagaagctctctgatatttctctcatcttccacacagtagatcattctatatcctctctgttcgttttttgccgttggcacttcataatcgtctggtcttttttgttccatgccttcagtataactgctttctttttactgcacaagccctggccgtctgctgatacagataaccagggcatagcattatttcgatatctttttattggctgcctgccgctgccatctggactgccgccggctcatcctttatttccggaagctgatactgactccggatcacctccagcgcacggtagaaggtttcgtccggcccatgtttgatctgcttcaggtgctgatgtgtatcaaaagcatcttcatgaacctgtgtcacacaaacaccaatattggaacagtgatctgccacacgctccaggctggtagtcacatcggacaggatgaatcccatttcaatggtacattctccggcgcgaagtctctggatatgccggtacttcagttccttgctgagttcatcgatcacttcctccagtggctcgatctctctcgcaagctgcacatcctgattttcgtaaaccttgtaagcaatatctacaatgtcttccaccgcatgctccatgacacgtaactcttccagcgccttatccgaaaacttcaggcctttttcataaagctcctgtgcggattccatgatgttcacaccgtgatcggaaatcctctcgaaatcaccgatacagtggagcatgatggaaacactgtgactgtcatgaacggaaagatccttctggttcagttttacaagataggttccaagttcatcctcataacggtctacctttttctctgcttcttccaccagtgcctttccttctgcgctgaaattcttcagaaggtccagggcggtaaacagagttctatgagaatcctctgccatttttttcgctgcattcctgctctgctcaactgcaaatgcaggtttctccagaaaacggctttccaggatcatgaaatctggatctgctgccaccttctcctcctcttccttcctgtcgcggatagtaagacaggcaagcttctccagagcctttccaaacggaagaagaacaagagttgccgtgatattgaaggcactgtgcaggatcgcgatcccggccggagtcgctgcctgtgccataaatgaaaaatgtactgctgcatttatcgcataaaatactgccatgaacagcatggttccgatcagattgaaatacagatggaccatagccgcacgttttgcgtttttgctggctccgatggctgaaaggatcgcggtgatacaggtaccgatattctgtcccatgataataggaagtgctgcactgaacggtaccattccggtaaggcacagtgcctggaggataccaaccgatgcggaggacgactggatgatcgctgtcagcactgctccggccacaactccaaggatcggattggagaatttcaccagcattccggtaaactccggtacctctgcaagaggttccacagctccgctcatggcattcattccatacatcaggatcgcaaagcctacaaagatcgctcccacgtcctttttcttctggctttttgtaaacatgatcagaaccacgccgatcagtgccagtatcggtgaaaatgacgtcggcttaaaaagctggataataaagttatcactctggatacctgtaagacttaagatccatgaggttacggtagtaccgatattggcacccatgatgattcccacaacctgggacagcttcatgattcccgagtttacaaaaccaacgaccataacggtagttgccgaggatgactggatcactgcagtcacacccagtccaagaagaacggctctgatgggattggaggtaagtgtctccaggatccgctcaagctttccgcctgcaaccttcgcaagcccgtctcccattaagttcattccataaaggaaaatagcaagtccgccaagcaatgccagtacgctgaaaaagtccataatactctccttcactttctctttttgatatgtttgatttcctttgttctcatttcaacgattttcataatagcggcctattgtaaaattttccccactggaatgtaaaatctgtgtaaaaaaaataaaacagaggatcctgttacgggaaaccgatttcccgtcaggatctctctgtcctatatatcgtacagtggtttttatccttatgatgtgttttgtgctgcggatattctcattccgctgagctgcatgctcatgagcagagctgccctgcgatctgtgatcagaatccgcggatctcctcatcctcagatccggtcttgtcgatggattttattacaaggtaatagctgtaatcatcattgacctttacttccacccggtctcctacacgatgaccgcgcagtgccttgccgataggcgattcaatactgatacggttttccatggaatttccacggatggaagtaaccagcttgtacttctccacctcattatcttcttcaaaaagaacttccacgatatcgtccattcccacttcgtctgatctggaagcatcggatacaatggaagcagtcttcagcatcctctccagataacggatgcggctctcattctgattcttatgcttcttggctgcataatactcaaagttctcacttaagtctccctgggcacgtgcctccttgaccgcctcaatggcttccttacgtactaccagtttacggtgttcgatctcctgctctattttttcaacatccttgcgggtaagctgttctctcatttctctggcatctccttttctttataacattcagactgatcctggatctgttctccacttcctgtgaagcttctgtcacagatacaggatttctggaaggttaccggaaataccatagcagatacgctctgctttgtcaaacagcgcatacctgttcttcggcttcctcctgctggtgtactcgctgttcaatataatctgccatatgttctttggggatatccagtaacatggaaaattcagaatagagatgatcctctgcaagcttcagataccgctcgtctgtagcggttgtttttttgccatgagataatctggcctgttttctgacgtagatcgtcttgatgatccgaagaagatctctgcattcacaggtacggatgcatttcttgtagctatcctcccggaatttctcattctcaatactcagtgtctcaatggatgggatctcatcgataagcctctccgcttcttccctcgtaatgattccgcgaagcacctgctttccaccttccaccggtgtaaatatcttcccatctgtttctcctccgggcctcagtacataataaagcttctcgccggaggaaccatccaccctcattgtggtaactcctgttacctggcagatgccggtacgaccatacacaacatattcgcctgtttcaaacatttttccacttcctttcatttttttacttttcttttgttatcctggcgcttattgtgctctaatgaaagctccctgccaggttatatatccagacaaggagcttctcactgaggattctatccttattttactacttttcccatttatttgcaaaagaattcaaaaagtttttttatttttgtgaaatatgcccacaatgagggcatatattttttgttataattcttcttttttctttcttcccagacggatgtcttccatatgagatttcagttccggtgtcatactgtcaaagagataggttttgctgttgtccctgcgctcctgccattcttctctcatctgctgttttgcggaagcgatctcatctttgaatccgcgcgctgagatcctggcggctccctgtcccataatgatgatctgctccagtccgtctgatgtggcaactgtcacgttatgcttccgtccgattttatggacagtgcgttcaatatactggtctgcagtttccgcttcttttgtatagacaacatgaatgttatgatactggaaggtttcctccggatggccctccacacggtaggcatcaaataccaggatcaggatgcagccattgatcccctgataatcgcttagtatgtccattaacctggactgtgccgcatgaaagtctgcctgtgccagatctcttaaatcctcccaggcaaatatgatattgcagccgtccaccagcaaatagtcctctctgtggatggccggactgctgtttctccaggcgccgtgaccggtttttgccggaaggccggaatctgctgcgcctttgcctccctttccggaaaagctgcttccgctttccggatttccgaagcttcggctgttactgctgtatttctttgagctcaccggaccaaaggttttctcaaagattgccttcagttctttttcttcttcgtagcttccatacatggaggtatattttccacggccggcattagctgttctgtgatccggactgtttttggccgttccctgaactgaacgcactcctgcaaagctgttgtcggaatcctcataggcatcattactgtccggaagctgagctccttccagatgcatatattcttctacctcataccagggaaccacgaagcctgctccatgggcacagaatacagaacctgtaggattctcaagatctctctcggaatcatatccgatctcctctgcgatctgctcctgatcctggcagggttcatagcccttcagagtacaggtcagatgacctctgcctcttgtgtaggaaactacctgactctgataatccctcatttttgccaccggcgcacttcctgtgatcaccgatagctctccctgggtttccggcccctgaacggttccctgcatcctttggatatccgtcatggcacgtcctacattttctgccggaacctcaagtcggaagctgtaatagggttccagaagaagcgtctccgctttcttgaggccctggcgcacagcacggtaggtcgcctgccggaaatctccaccttccgtatgcttctgatgtgcccgcccggtgagaagtgtgatctgcatatcggtgatgggtgatccggtaaggactcccagatgctctttttcctccagatgtgtcaggatcagccgctgccagttccgatccagctgatcttcatttgccgcagtaaaaaactgaagtccgcttcctctctctcccggttccagaagaagatgcacctctgcataatgacgaagcggttcaaaatgtcccacgccttccaccggtgcgacaatggtttctttgtatacgatattaccggtcccaaattctactgccacgtgaaaacgctcccagatcagatgcttcaggatctcgatctgtacctcacccatcagcatggcgtggatctctcccagctgctcatcccacatgatatgaagctgcggttcttcttcctccaactccttcaggcttttcagcatcctgtgggcgtcacagccctccggaaggatgatctgataattcagtaccggttccagcaccggcatggcagaatccgcctcaatgccaagtccctctccaggatatgtttcggtaagacctgtaactgcacagacggttcctgcctctgcctctttgagcatttcaaattttgcaccggaatagatacggatctgatctgccttttcctcccagatttcctctgccggaataccatttcttcctgcattggtcagcgtctccttaaccttcaggctgccgccggtgatcttcatataagtgagacggtttccctgctcatctctggcgatcttaaagatcctggctccgaattctgcgggataggacggtactgccatgtaggtctccattccatggataaaagcatctacgccttccatcttcagggcagatccaaaaaagcatggaaaaagctttcgctccaggatcagctctgccacgtccttttttgcgatcattcctgtttccaggaagctttccagaaggttctcctcacacatggcgatattttccagaaaatcatcagttccatttattttatcagaagcgccctgcgttccagatatattctctttttctgcttcactggcgttgtctttcagctgcattccttcagctgacggagatttcccggagttatccacaggattctcctttttccctgctgcttctgcaccggagcattccagttctccactaaaatccacacagcatccgcttaatttcttcttcagctcctcaagaagtctttccctgtccgttccttcctgatccattttatttacaaaaagaaatgttgggatcttatactgtgtcagcagtctccacaatgtctgtgtatgcccttgcacaccatctgctccgctgatcaccaggatcgcataatccagcacctgcagggtacgctccatctcagcagaaaaatccacatgccccggcgtatctagaagtgtcacttccatatcccccatggaaaaaactgcctgctttgaaaaaatggtgattcctctctccctctcaagctcataggtatccagatacgcatccttgtgatcgactcttccgattttccggatccttccgcatttaaaaagcaggccttccgataatgtcgtctttcctgcatccacatgggcaagcacgcccaagcttatatgtctgtgttttatattctgaggtttttctcccattgaaaatacccctttctgttgtaatgatatccaatatcataacatagaaaggggtataagtcgaattttgtttcggtctgtgattcaggaatccaggtaggctttcagcttctccagatcctttttcatatctgctcttcctgtctggtagatccgctccagattactctcatcacgctcgatcatcgccgcctggatgggactgctcggacggatgatatgaatgcgcccctctttttccagagaagccagttcctccagtgtttcattataatggatatgccgttcctccagatccttcagaaaagccggatatttatgtaatactgctttcagaaaaagctgcatcttcgggtttgctttttttcggtacttcacatctctggtaagcaccactacgtttttttcgtatcccctggaaagcatccacttaaccgggatcggatcagacacaccaccgtccagaagtctctttcccccaagcttcaccggtcgggaggctatcgggatcgatgcagacgcacgcatccattcaatatcctccacatctccgttgggacattcatgatacaccggttttcctgtatccaaatccgtacacaccactgtaaatttcatgggattttctgcgtaggtctgacggtcaaaaatatccagcttccagggcagttcataatatccgaattcccggctgtatacatctcctgtggtgatccagttccggatgcttgcaagtcttttatccttgcagtactttttgttatagcgaagaactcttccgatctgcctggacttataattgcatccaaaaacagctccagccgatacgcccaccgcactgtctgcgtaaatctcattttccatcagaacatcgatcacaccggctgtatacaaacctcgcataccgccgccctccataacgatactgaattttttcaattgtgtttcttccatttatttgtcctctgtattctgtctggcagactctgctgcccttatgctgtcatcttttatgtccaatttattgtacttcttgaattatatctgtcttttctgacatatatctatatccattatcagaatatcttggttgtccacctgctcatatcccagacttcatttaccacatcctggtaaaattccggttcatggcagatgagaaggatacttccgcggtattcccggagagcttttttcagctcgtcttttgcatctacatccagatgattggtaggctcgtccagaagaagaatattggtgtcacggttcaccagcttgcaaagacgcacttttgcctgctcaccaccgcttaaaactcgtacctggctctcaatatgcttggtcgtcagcccgcattttgccagcgcggaacgcacttcatactgggaaaatgacggaaattcctgccagagttcttcgatacaggtagttcgattctcacctttaacttcctgctcaaaatatccgatctcaaggttctcgccctgctccacgcttccggaaagaggcttgatcagtccgagaagacttcgaagaagtgttgtttttcctattccattggttcccaccagtgcgatcttctgtcctcgctccatcgtaaaattcagtggcttggaaagcggctcatcataaccgatcacaagatcatgggtctcaaaaagcatctttcctggtgttcggccataacggaatttgaactccggcttcggcttctctgctgccagctcgatcacatccatcttgtccagctttttctggcgggacatagccatgtttcttgtggaaacacgggccttattccttgccacgaaatccttcagctcactgatctcctgctgctgtttgcggtaagcagcctccagctgtgccttcttgaccgcatagacctcctggaaatgatcgtaatctcctacataacggttcagttcctgattttccatatgatagataatgttaactacagaattcaggaagggaatatcgtgggaaataaggataaaggcattctcataatccagaagatatcttttcagccatgcaatatgctcctcatccagatagttggtaggctcatccagaagcaggatatctggcttctcaagaagaagcttcgcaagaagtaccttggttctctgtccgccgcttagatccgtaacatcacggtcaagccccagatccagaaggcccagagctctagcaacctcctccactttggcatcgatcgcataaaaatcgtgaagtgtcagttcgtcctggatcgttccaagctcttccatcagaccatccatctcgtcaggatctgcagttcccagcttgtcgcagatctcgttcatccgttcttcttttttgagaagaggatcaaaagcggatttcagcacctggccgatggtcatccccttttccagaaccgcatgctgatccagatagcctgcgtggacattttttgcccactctacctttccctcatccggcatcagttttccggtcacgatactcataaatgtggactttccttcgccattagcgcctacaagtccgatgtgttctcccttaagaagccggaaagatacatcttcgaaaatcgctctgtctccaaacccgtgggtcaggtgttctacatttaaaatactcatttgttatattcctttatcattgtggtttttctgttttcccggaagggatttttaataatgctatagtattatacttgatatttttctctgctgtaaagtcaaatctctgtatacactgcgatcggctgactggcagttgctggtacaccgtttttatttcataatgatcttcttcagtttttccaggtcgtccgtatcaggatgagacaaagcacagtcaaaatttttgatcaacagatcaagattcgcagggtgttccggattttctttcatttttatatatcgttcacgcacagactggggcatctttccctgacacatatactctccgataacaacattacccggagcaacagactgtctgacctgaccgaggaccttttcaaaatatgccgcacttgcaccaaaaccggctgttccaaacagaaaaatcttcttcccttttaatttggataacaattccagggtcttcttatctgcattccctttgtccgtccaaaatccgatatacagcagatcggatccgggtacctgtgatccggtctccccaaagtaatcacacttatcttttggcagcacttcatagatcgcctcagccaacttttttgtattaccggttaagctgctgaatactattgaataattttccatcttcctacctcattatcttctgtaaaaatcctgatctcatttattatgccatctgatctcaccgtttaatatgatcggataacggatcagattgtctgaatcaaggttttccgcatacatatctactgcggttatttgatgattatcatatgtggtgtaataatagattccctttgtcgtgttgcagcatgaagtatagatcgtgatctcatatgcgccctctgatacctcacagcatccccgctgctgatcaacagagcctaaaatatggaaaaactggctgacactttcgttttccccatctccggatattgcatttaattttgtaaatgcaacctttacaaatcttgactggcttgaaagatctcccggaattcccattccgcccattcctctgctgtatggatccagctccagcactcctgcaaatgtactttccggctgctttctggatacacccgcataattgttaagtgcaaacatctgaccggggaatggaggattatttgtaagtacgccaacaggatcatcatagatgtgcattccgtctttcatggattctacaacgatgcattcctccttgtctgcgatcatccagtgaagctgtgccgttggaagctgttcactgaagggtgttcccataagcttcatattggaaagcagcctccttgcttcagccaccgaagcacactgggtaagtatccatggaataaattcatattgcgccacctggataagatccttatctgtctctgtcacttcatctgcatatgccgcattccccacaaagttaagtcctgccatacccagtcccttttcattagccgcatcataataaagcggataatctcctgctacaaacgccattcctatgaaagcataatgtgtttttgcttttcctgcatatcggaaatcgaactcataatttcttggggttatggtcacctcttccccataggaaaactcatagtcaagagttcttcccatataaaaatcctttgtctgatacgttgctgctgtacacatagatttacacctctttcttacaataatcctgcaaataatctcatgaaaagctgtcccagacgaagatatgcactgcgtcctgtacggtattgttctgttacttcccgacattccttcattgtttcttccaggtcatttcttatggataacacagccggactgtctgccataaagcatccgttttcaaaatgatgataaagacttctgtaatccagatttatggttccgcaggttgccatacagtcatctgccacgctcatcttggcgtgacagaagccaggtgtccactcgtagatccgcactccatttttaaccagtccatgataaaaggaacgtgtaacactgtaaatcatttttttatccgggattcccggtgtaatgatcctgacatcaactcccctctttgcagcaagacacagcgcatgtgtcatttcatccgtaatgatcagatatggcgttataaaccagcagtatttttcagctttgttgaccatgctgatataaacttcctctcctacctgttcatcatccattggactatctgcataaggctgtacaaatccgttctgagctgccttatattctgatcttataaaatatttgctgaaatcctcattattattcctgtcattggctgcattccacatttcaaggaatgttgctgtcagcgactgaactgcatcgccttcaagacggatcccggtatccttccattgtccgtaaggattggtgtaattaaaatattcatttgccagattatagccgcctgtgaaagctacttttccatcgatcacggttatttttcgatgatcacggttgttcagaaatacattcagtcccggcataaacggattaaatacccggcagtggattccgatctgctccatcttttttacaaaatccgtattaataaatccaatagagcccatatcatcataaaatactcgcacttccacgcctgcctgtacacgctcctccagcactttctggatctttttccaggcctctgcatcttctatcgcatggtattccataaaaataaacttttcagcctttgacagtgccgataattgtgcttctaatccctttaccgcctcatcataataaacaatatccgtattctggtatacgggataacctgcatttttccaaatatactcactgatatttcctgctttggggattttatttttgatattttccagtttttcccgattgtccggcagaagcggcagaagctttctgtcgatatccgcatatcgttctcgcattttacgggttccgccatttaatccgatcagcagatatagtgctacacccatgattggaaacacaagtatcaaaatgatccatggcattttcatggaagaggtctgatcggatgcatatagtgccagaaccagaattcctgcaaagactctagtcagcagattaacgatctccgcatattcattcagccttgtgatcacgataatgataaaagctgcttccaataaaatacaaagcaccgaaaagcataatcgaatgacaccgtttttcgtttttgctctgccctccagtgtatcctgcttcataaaaccgcccctttctgcattgagtgggaattttctgttgtgcgtaagcctaactgaatattcctgtttcgtagtaaactcaacaattatcttttgtactgcaaacagcgcagctcttacctggtggttacttatccactgtaataaaaaatgaaatacgaagaaagccctggaagctgcaacttcgagggcttttgctttttctgttataaacactttaattcttttttgcctgcgagcattatatcatatgcgatttttcttcgcaatatactctgtatattttttaagatgttttgtgcggtggtgtggagtattttcatgggttgccctcctgtaaaaacgtattttccgtttttattctctgattgttattgggtcaagtcaatcaaatccttgctgacatgcccttgtctgttcaaatatctatattaaagtgtctcgtacattgcttttaattcttccagaatcttctcctttgttctgccaaccagccccaactgtttaatatccacgttttcatttttcatacgctggacaaactcttgaatatcggcataaactccttggggagccactaccttggcggtgggatcaatcaactccgtcagacggaaaacatcattcttatgtttcttgatatttttgctatcaacgtgttctcctgcggccttacgatctgtcaaatccatccacgcttttgccttaaacggaatcaaatatgccgcatccaagacagtcactcctccgtcatcataatgtcacacgcagttccaccaatgatagcatattgttcttcactgcccttgaaccattccttaaagctatcaattcctgtaaccatctatcttcctccacagttcattcaacatttcttctactgcttcttcaacccgttcatctgcatcttctctcaatgccaatgccagcgaaagctcatctacaatgtttcgcatggacaattttcgtggattgtatctccacatctctacggccacttgcacctgcgaattcagcaagctattggtcataacatctttccattgagagattctttctgccgcataacatctgacattcggtgtgttcagcatggaatactctgccaacgccgaatatccactttccaacagctctgttcccaccaattctttcggaatataaaccgttcgttttattggattcagcaacttatctcctgctttttggaacagtgttttcggagaatcctcagattgcatgatcctctgcacaccgactttcctgatatgcagcaatcccatttcttcaagctgtcttgatgcccttgatatagaagtaggtgtcagttccaagtccttcgcagcttgacttgtagatagttcctgtgcgcctccataaatgaaatgcagtagaagcatctgcgccgatggaagtatttcctcccgtgtctttttttcggcgctgcaccgttcctgcagatacactgccataaagggcaaataaatttgctttccatctacaataaatggaatcttctcacgaatcaaatattctttctggcgaaagctaagttcttttagcaccagcacaacaggcaagttctcattattctgtatccgagcaatatgttttttcagtacttcaatctgctccagttctgtcttaggataaagaaaaatcatcttctgttcattcattgacaccatctgtaaacggtaccttgtggctataaaattgggcaaatgcttaaactctacatcatcataggtaaccttgactcccagaactttatcgagatattccatgtcatcacctgcaatcttaactttttttctgtattataactctttttgagttaagatacaatatttgagttaagagcagttaagaatcaacattgttaaaaattatttttacaaaaaacccgatgcaacatgagcattacacccacactgcaccggacattccatgccccgctcttgctgtatcttttgaaacacttgtgcgttgaccactgcggctcgtattttcagccggttacggatgattccggagtcagcttgcagagccatcaatttttcttcgctataagatgccactttccgtaaatcaaacccgtcaaaagcacggcgaaacgcttcccgtttatttaagacacattcccaggtgagacctgcctgaaaattctccaaaatcaacatttcaaacagtatatggtcatcgtggaccggtctgccccattcctcgtcatggtatcgcagataagtggtattagtcgggttcacccaatggcatcggatttttctatctgtccattgcattccttactctgcctccaagagaaaaataacaggccggacgccgtctggacatgcaaacacaccaatcgtatcatcattgagccaagtcccagacggctgaaccagttcccccaaggataactgacgcgccatgggagcaatcacctgccaagcaacgccacacatcccatccggtggattgatgccatcgctgtacagcacttgacctttctgatgaaaaggacacttccccaaattaggaattgcatactgttctgccagttcctgataatattccgtccgcagcacggtgattttaacctttttatgcatttgtatagtcattttgaatctgctccgaaatcgtcatgcctcgcacgcctcccggagagcaggcagcagctcatccagtcgcccgtccagtccgaaggacttctctttgatattgtccacaatgtagatctcacccagattgatggtcacataagtagcgtttggctcgctggccaccaggcgcatcattggggccttgatcagctgattacgccagccaatgccaagctccagaaccaccagtttcttcccgtggtaggttttcagaaagttttggaaccgtgcctgggctgcggtatccggaatcattctctgacctgcgcccatgtggatgtccatgggaccgccgcattttggacagcgcggcaccaattctgcaggcacatggccgccctgttcggcagccgataatttttcggccacctccagactaggatagagggtgtcgtggcaggggcgggcacactgcatcgtaaaccagttgccctcaatctcatagattttcgtcggatcaaagccacacagttcaaagtgaccttctccgtttgatgtgacgacaaagtaatctttctctcccacaatggccttcaaatcgttcatcaccgacgtaggctggtactgcccgcagtaatgatggatgagccgggtccagaaggcccacttttcctcctcgctgggccatccagccatcctgccctgcaaaatgcactcaag

SEQ ID NO: 281 - DNA, 165 bp, Unknown
  gut microbiota DNA sequence
atgagataaaataaacgagctgtctgagagacagacacaataaaccttgataactaaacagtgaaacacatacgattctcgaaaatttctttacatttaaagaacggtttaaacaaaccaaaagcagtaaaaacgagagatagccaaacggttgtcttgagtaaa

SEQ ID NO: 282 - DNA, 3507 bp, Unknown
  gut microbiota DNA sequence
taatgagatcatgaaagcgttgaacttgaatgcctgtcgttccccacgtgggaacgtgaattgaaataacaaagaggaaatcaaacggtgtggtatatgggacattccctatgcggggacaaaaaccggaaatcgcaattaatacttgcatttaacagacattggtgttacaatgaacgaaactaagaacttgttggcataggagtgggcgagagcccgctcctatttgctgagaaggaatttgttcagaaataggcagaaataggaaaggcaggtgggaagcatgagcagacgggaagaatatgaacagaagacagaggcgatccttacaccaatcgtggagtccaggggctttgagctggtagatgtggagtatgtcaaggaagccggaacctggtatcttagaggttatatcgacaagccgggcggaatcacagtcaatgactgcgaggacgtaagccgtgcattcagcgatatactggatgagcaggatttcatcgaggacagctacattatggagatcagttctccgggacttgaccggcctcttaaaaaagaaaaagactttaagagaagccttggcaagctggtggagatccgtacctaccggcccatcgagaaacagaaagaattctgtggtattttaaatgcatatgatagtaacagtgtgacaatcgatgaagacggcacagaacgtacctttgataaaaaagatattgccctgattcgtctcgcaatcgaattctaaaagagaatcgaatctgtaaaattcaggaggaaaaaagaaaaatgagcagagatttaagagatgcgctggacgttctcgaaaaagagaaaaacatcagtaaggatacactgctggaggcaattgagcagtcactgatccaggcatgtaagaaccatttcggaaaggcagataacgttcacgttatgatcgatccggagacctgtgacttcagtgtttacgctgacagaactgttgtagagcatgtggaggatccggcgctggagatttctctggtggatgcacagaaaacaaacacgaacgcagagatcggtgatgttatgaaggttgagatccagtccagggaattcggacgtatcgcaacccagaacgcaaagaatgttattcttcagaaaatccgtgaggaagagcgtaaagttctttacgatcagtactacggaatcgaaaaagaagtggtaaccggtattgttcagagagtaatgggcaaaaatgtcagcatcaaccttggtaaagcagacgcagtccttacagagaacgaacaggtaaagggtgagaccttccagccaactgagcgagtaaaagtttacattcttgaagttaaggatacaccgaagggaccgcgtatcctggtttccagaacacatcccggtcttgtaaagagacttttcgagtccgaggttgcagaggtaagagacggtactgttgagatcaagagcattgcccgtgaggcaggctcccgtaccaagatcgctgtatggagcaacgatccggatgtagatgctgtgggagcatgcgttggtatgaacggtgcacgtgtaggtgcagttgttaacgagcttcacggtgagaagatcgatatcatcaactgggatgagaacccggcgatccttatcgagaatgcattaagccctgcaaaggttatcgcagttatggctgacccggatgagaagaccgcactggtcgtagttccggattaccagctttctcttgctatcggtaaggaaggacagaacgcacgtcttgctgcaagacttacaggcttcaagatcgacatcaagagcgagacacaggcaagagagtccggtgacttctacgatgattacgatgaggaacacgaggaagcagaggaagaaatgacagaagaggctgtttccgaagagcttgaagaagcagaggaagatacagaagagacagaaacagaagctgaagaaacagcagatggagatgccgaagaataatgaaaacgagaaccaagattcccatgcgtcagtgtaccggctgcagggaaatgaaaagcaaaaaggaaatgatacgagttctcaggacatcagagaatgagatcatcctggacgctacaggtaagaaaaacggacgcggcgcatacctttgtttctcagaggaatgcctggaaaaggctatcaaaaaccatggcctggagcgttccttgaaaatggcagttccggatgaagtgtatcagaacctcaaaaaggagtttgaattaattgaaaaacaataaggttttatcactcatcggacttgcgacaaaagcaggaaaaacagtgagcggagaattttccacagagaaatccgtaaaaacaggaaaaggtttcctggcactggtggcagatgatgcctccgaaaacacaaaaaagaaatttcggaatatgtgtacctattatgaagttccgttatatttcctttcagacaaagagagcctgggcagagcaatgggcaaagaattccgtgccagccttgccgtgcaggacgaaaattttgcaaaggcgatcatgaaggcgctggaaaaagaatccggcagataacctgcatgatacaggcgtctgtaaggaggtttgacgttagaaatgataaaagataaattcaacagatcgggaaaggagcaatatagacaattggatactccaaaaacagaagaaaagacaacaacggtgaatacagagggtaacaagtctgaagcaccgaaaaagaaaaaaaatatcatccgtgtatttcatgcacagaatgccagcgatggcggtaaaggaagaagaaaaccggcagcaggcgagagaaagggaccagcacgtccacagaacggcggtcagagaagcgcaggagcaaacacaagaaatggtgagtccggtgagcagagaaacggtcagagtggccagaatcgtactcagggcggaagaccgcagggcaaccgtccggaaggaagaagagacggaaatcgtgacggaagaaccttcgagggaagaagagacggcggaaatcgttttggcggaaaccgttcccagaatggtgagggacgtccggcaagacagggtgaaggaaacagaggaccacgtcagaatgacggaagaggcggaaaccgtttcggcggtggagcaaaccgtggccagggcggtcagggcggacgcttcgaaggcagagatggcggaaaccgtatcggcggcggagcaaaccgtggccagggcggccagggtggacgttctgaaggcggaagaggcggagataaccgtttcggcggtcagaaccgcggcggccagggcggagcacgtccgggacagagaagaagcagttcttccgattccgtatttactccggagctgaccaagacatccaaggacagcaagcgtgagcgtgacagagagaacaagaacaagaagaaagatttcgagaaaggcggccagggcggacgcagaccaaatcagggtggacgcagaccgaattccagaatcccgaaagcgcttcagaaaccgaat

SEQ ID NO: 283 - DNA, 1102 bp, Unknown
  gut microbiota DNA sequence
gaggaacagttccatgaccatagctacggattcagaccgaatagatgtgcacagcaagcaatcctaacagcacttgatatgatgaatgatggtaatgactggattgtagacattgacttggaaaagttctttgacacagtaaatcatgataagttgatgactattattggtagaacgattaaagatggagatgtcatctctattgttaggaaatacctagttagcggaatcatgatagatgatgagtatgaggactctattgtgggaacaccgcaaggaggaaacctttcgccgctactggcaaacatcatgttgaacgaactggataaggaaatggaaaagagagggcttaattttgtacgatatgcggatgactgtattatcatggttggaagtgaaatgtctgcaaacagagttatgagaaatatctcacgattcatcgaagagaaactagggctcaaagtcaacatgactaagagcaaagtagatagaccaagtggacttaaataccttgggtttggattctactttgattcaagagcacatcagtttaaggcaaaaccgcatgcaaaatcagtagcgaagtttaagaaaagaatgaaaggactcacctgtcgtagttggggcgtcagcaacagctataaggtagagaagctcaatcagcttatccgaggttggataaactacttcaagataggtagtatgaaaatcttatgtgcgaaattagatgcaaatattcggtatagacttcgtatgtgcatatggaaacactggaaaactccgcagaatcgtgcaaagaatttgatgaagcttggaattgacaggattacagcatacaaagttggttattgttcaagagcctatgctcatgtatgtagctgtggtgctgtaaatatagcaataacaaacaagagattagcctcatttggactaatctcaatgttagattattacactgaaaggtgtgttacatgttaagttgattgaaccgccgtgtaccgaacggtacgcacggtggtgtgagaggtcgaaaattcctcatcaagaggaattttctcctactcgattgtaaaagtatattattctaataagcgcaacggat

SEQ ID NO: 284 - DNA, 15832 bp, Unknown
  gut microbiota DNA sequence
aaaattgcgcctgtctggatcaactcccatttcagagcttctgtattaaccagatttccgttgtgcgcaagtgccagacttcccttgatataagaaagtaccagcggctgtgcattctctgcgacagattctccggtggtggaataacgaacatgtccgattccgatatcaccattcatattatgtacaacatcttttcgtaaaacttcgcttaccagtccgagatctttatggaactgtacgtttcctctttctccgtccgtccttgaaacggccattccgcaggactcctgtcccctgtgctgcagcgaggtaagaccataataaatagatggtgcaatattccctccatccagatcataaatcccgaatacgccacattcttcctttactcctgacatatttccctccatctgttctttccgtattgtacatctttgtcactggtcaaaaagcttcttttgcctcgatcacttatagcgatcgctgacttttcgactgtataactacgatatcagattataataaaaagacaagatttgtcaaccctgcctattttccgacagtcccatcgctccggtcgattttttagatttttttcaaaaagctcttgacattattttattttggtgtatactgcatcacataaagcaaaggcgctttggatacgacaagtatctgaagcgctttttttgttttcggtccgtttatacccggttcttccggcggcggcccttataaaataattaaaaattataatgaatgagtgaaatcgaaaggagtgtacctatatggcacagagtatccctgaaatgtatggcagccttgtattcaatgacaaagtgatgcgaagtaaactgccaaaggacatgtacaaagcattaaagaaaacaattgaaaacggaactcatctggaactggatgttgcaaattccgtagcagttgcaatgaaagagtgggctactgaaaatggtgcgacacattacacacactggttccagccgatgacaaacgtaactgctgaaaagcatgacagcttcatctcccctacaggtgacggacaggtgattatggatttctccggtaaagagctggtaaaaggtgagccggatgcatccagcttcccgtcaggcggacttcgtgctacttttgaagcaagaggatatacagcatgggatcctacttcacctgcattcattaaagataaaactctttacattcctactgcattctgttcctacagcggagaggcactggataagaaaactcctcttcttcgttccatggatgttctgaacaaagaagcggttcgtattcttcacctcctcggaaacaaagaggttcgtcacatcgacacaaccgtaggacctgagcaggaatatttcctggttgacaaggatctttacaaaaagagaaaagacctgatcttctgcggccgtactcttctgggcgcttctgcaccaaaaggacaggaaatggaagatcattacttcggagccctgaagcctcgcgttgctgcttacatgcatgatcttgacgaagagctttggaagcttggcattccagccaaaacaaaacataacgaggttgctcctgcacagcacgaactggctcctgtatttgataccacaaatgttgctgttgaccacaaccagctgaccatggagatcatgaagaaggttgccgacaagcacaacatggtctgcctccttcacgagaaaccatttgagggaatcaacggaagcggtaaacacaacaactggtccatgagcacagacacaggtgtaaaccttcttgatccaggaaaaacaccggcagaaaatacacagtttctggtattcctggtagctgtcatcaaagccgttgacgattatgctgatcttctccgcgtatccgttgcaagcgccggaaacgatcatcgtcttggagcaaacgaggcaccgcctgcaatcgtatccatcttccttggagatgagctgacagacgtactgaaatctattgaaaacgataccttcttcagcaataagcatgcggtacagatggatatcggagcaaaggtacttccgcacttcataaaggataccacagacagaaaccgtacttcaccatttgcatttaccggaaacaaatttgagttccgtatgcttggttctgcagcatctgtcgcaaacccgaacatcgtactgaataccgctgttgcagaggttcttgcagaattcagcgcagctcttaaggatgttccggaagaagaaatggaaagcgcagtacatgcacttcttaagaagaccattgaagagcataaacgcatcatctttaacggaaacggatatacagacgaatgggttgaagaagctgagaaacgtggtctctacaatctgaaaacaactccggatgcacttccgcatttcattgctgagaagaacattgcgctgtttacaaagcatggcatttttacaaaggaagagcttttctcccgttacgagatctggcttgagaactattacaagaccatcaacatcgagtccaacactctggctgagatgatccagaagcaggtaattccttctgtatatacatatgttgaaaagcttgcagatactgcagctgcaaagaaatccgtagtagctgatatttctgtagcaagtgaagctgctctgatctccaaactgagtacacttgcagataccatggcaaaagatctggaaactctgaaagcagatacagcaaaagctcttgcttcttctgacgatgtacttgcatgctccaaggcttatcaggaaactgttctggaagacatggaaactttaagaaaatctgcagatgaggcagaggctctgatcccggatgagttacttccttatccgacctacgacgagctgttattctccatctgatcacggatatcagataacaatttcatacggtaaatacaggggatatcccttatgaattctacttcataattcattatcgatttcctcatccattaatcacacgatacagatatcccctgttttacatatactaattttgatttcgtaaaggcgcggaagagaatttcctctctcctgcgctttttcgttatactgatactggataaattctgtctgtttttttctgtccggtattacaaaaattctttctatacataataggaaagaaaaaaattgggaaagggagtgttactatgtattcttcagtaaacacaacttgggtcctcgtcggtgcagcactggtcttcttcatgcaggctggatttgcaatggtcgaaacaggattcacaagagcaaaaaacgcgggaaatatcatcatgaaaaacctgatggacttctgtatcggtacaccggtcttctggctggttggatttggcatcatgttcggtgcaggaaacggtttcttcggcaagatcggcggaatcgcctcagaggcaaactacggaaacgcaatgcttccggatggagttcctttctgggcatttctcatcttccagactgtattctgtgctacttctgctaccatcgtatccggtgccatggcagagcgtactaaattcatctcctactgtatctacagtttactgatcagtctcgttgtatatccggtatccggtcactggatctggggcggcggctttatcagccagatgggatttcatgatttcgcaggttcctgtgccgttcacatggttggtggtgttgctgcactgatcggtgccatcatcctcggacctcgtatcggaaaatattccaaatccggtaaatccagagcgatcccgggacataaccttacagttggtgcacttggtgtattcattctctggttctgctggttcggtttcaacggtgcatctactgtcagcatggaaggcgatgccattgtaagcgccggaaagatctttgtaacaacaaaccttgcagctgctgttgctactgtaacagttatgctgatcacatggatccgctacaaaaaaccggatgtttccatgtccctgaacggttctcttgcaggactggtagccattacagcaggctgtgataccgtatctcctacatctgcagctatcatcggaatcctctccggattcattgtagtatttggtattgaatttgttgataaagttctcaaaattgatgacccggttggtgctgttggcgttcacggtcttaacggtgctttcggaactcttgctgtcggtcttttctccgacggtgcaggtaccgagtggaagggtcttctcacaggcggtggtttccatggcttcggtgttcagtttattggtatggctatcacgatcgcatgggttgctgttactatgacaatcatcttccaggtaatcaaacacacgatcggacttcgtgtttccgctgaggaagagatcgcaggtctggatatgaaagagcatggcctcgcaagtgcatacgatggattctttgtacaagataccatgacaaaggctccgactccaatgggaacttccgtacaagcccctgttgtaaaacatgctccttctgctcctgctgaatctgttcctgagattcctgcagacggcgtacacaaactgacaaagattgttatcatcacacgtcagaacaagttggatgagtttatgcaggctatgaacgagatcggcgtaaccggtatcactatcacaaacgttatgggatgtggtgttcagaagggtgctccaacctactatcgtggtgttgaggttgacatgaacctccgtccgaaggttaagatcgaaatcgttgtaagtcttgtaccggttcagaaggttattgatactgcaaaagaagttcttcataccggtcagatcggtgatggtaaggtcttcgtttacgatatcgaaaacgttgtcaagatccgtaccggagaggaaggcttcctggctctgcaggatacagacgcatgattctcttatgagaggaacagataaaatcttctacgcaatataaaccaaataaaagccaaaaagctccggaacattattccttaaatgttccggagcttttcatatttttttattctcttctcagtctcggcagattccaccggtaatgtgccgccaggtaccggatcaggatcactactaccgttccgatcaccatggccggcactccgccccacagcctgtatatccaaacacaggcaatggcccctacaatagacgcacaggcataaatatggcgcacaaaaatatatggcggtactcctgccatcacatcacggatcagaccgcctccaactcctgtgacagtcccaagaaatacaagaaaaaatgttcttcccatatatccctgggaaatccccttatcaacacccataacggtaaatacgccaagtccaaccgtatccatcaccagcatcaccttatcatagaccagccggttcccgccttccagaagctcctgtttccagtacatcactgcaaaaacaatacaggacgtcacggttgccacaatggtatacagcggatcctgaaacattcctggtggcacgattcccagaataatatccctggtagctccacctcccactgcagttaccacgccaagaacgcagactccgaaaatatccattcctctctgcgctcccaccatagctccggaagcagcaaacgcaatagttcctgccatctccagcataaatgtaaacatactctgataatccatttccccctccatacatatccggccgtattttttctcaccctcatatctgcatcctgttttccctgtctgcacatttccacaaggtgcacatttccacaaagtgcacatttccgcagggtgcaagaaggaaccctgccatgcaggattccttctcctattttcgtgatcactatattttcatattaacagaattttctcattctgtatatcttttctttttgtatctgacttctgctattctgcttcgatcagaaatcctcgtcgtttcagcatatcctggatcatatccaggatttcctcggattctgcttctactttatgataatgataatccgatgtgatattcttcagaggactggacttgccgcttcggatatcctccataaaattctcaacctggcgcctggagctgatattcagttctgcctcgatatgcccgtaaactctgtgattcaccattacattgatcacttttccgccgagatccacaatcccgcagagctcgttctccagatccgcatctgtatgatgcaccttgaatatccggctcacagtatggggagcagtaaaaatatatcctctgttggtggagatcacatcattcccctccgcgcgtatcagcgcaatatcctgcacgatcacctgtctgctgacctgaaatgttctggccagagcacttcctgagaccggccgttcactgtttttaatttgatccatgatcgctgtcctgcgttctgaaccagtcatttaagttcccctttcctggctgtgcctgtactttttattccgatacctctctccttcattctcgcgatctctcccacccggcccgacatcacctgctatgcctctgcttccggcaattcacgcttcttttctgatattcgggtatttcctgtcacagcactcggtattctgtaaaatcctgcatttttcaggaaagcggatgaagattcttaagcgaaatatcaaggatcggtgcagaatgcgttaatgcaccacttgatacatagtctacaccaacatccctgatctttgcaatgttttcttttgtaacatttccggagcattcagtttttgctcttccatcgatcagctgcaccgcctctttcatcatctccggagtcatgttatcaagcatgatgatatctgcgccggcctcaacagcttcttttacctgatcaagagtttctacctcaacttcgatcttgcggacaaaaggagcatactcctgcgccatttttacagcattcgcaacgcttcctgctgctccgatgtgattgtctttcaaaagaactccatctgaaagattatatctgtggttctgtccgccgcctacacgaacagcatatttctcaaaaatacgcatattcggcgtcgtttttctggtatccagcaatgtgatccctgttccttcaagaagtgacgcaaccgaatgtgtataggttgcgatcccgctcattctctgaagataattcagtgccacacgctcgccggaaagaagcacccggatatctcctgtaacttttcccattttctgacctttttttacttcatcgccgtccttgcagaacagctccacttttgtgtcaacatccagaagcgtaaatacacggctgaagatttccagtcccgcaatgattccatcctctttacagatcagatctacctctccaggaactgcttctttcataacagagtttgtggtaacgtcttcacttgaaatatcttcctttaaagcctccaggatcaggtgatctacctgaagtgtcattgtgatcttattcattttacaatcccttctctttcttaattatcacagcagccctgttctccaaagcaaggctgctcctgtctttcataatacggatatttatattccggctgcatttatgccgcacctgcagcacttttcttttctactgagattgctttggctgcacgttttgcaaatacaaggctctccagcagggaattacttgccagtctgttcgcgccatgtacaccgttgcagctggtttctcccactgcataaagctgatccatgctggtcttgctgtcagaatccacccagataccgcccatgaaataatgctgagcaggaacaacagggatgcattcttttgtcacatcatagccttcttccaggcatctctgataaatattcggaaaatgattcaggatcgtatctttatcaatattttccatggatagccatacatggtctgttccttcttttttcatttcttcccggatcgcatttgttactacatctcttggaagaagttcattgacaaaacgctcttttttgctgttataaagtactgcaccttctcctcgaaccgattctgagatcaggaatctacggcccggtttcttggaatacagcgttgtcggatggatctgcacataatccagatgttccagacgtacattgtgtttttttgcaatatcaagggcatcccctgtaagatgcggatagttggtggaatgctcatatcttcctccgatcccgccgctggccaggatcgtatcctgtgcataaatctctacctggatctctccgcccggctggatctcttcctgggttttcactgcttttccggcttccatagcttcaagacgtgccctgttcgcttctgcggaaactgccttcaggcctgtacatttgccattttccacaagaatatcctgcatggtagtatattccagaattgttacattttcaagcttcagaacctgctggagcagtttttcggaaatttcttttcctgtgatatcctcatgataaaggatcctcggtctggaatgtgcaccttctcttgtataggcaaaatcatctccatccatcttgaaatccacgccatatccgacaagatccttaatgatatctctggagcctcggatcataatgtctactgactcttttctgttttcgtaatgtcctgccttcatggtgtcttcaaaatagctgtcgtaatcgttttcatcacgaagcacacagattcccccctgcgccaggaaagaatcactactcctcatatcctcttttgtgatgatcacgatctttttgtcccgcggaagcttcaaggcactgaacatacctgcaacacctgttcccacgatcactacgtctgttttaattctcattgcttttcgcctctctgtcttgatttctcttttcagccaactcagacaaatcttttatacaaatgtgttttatttattttgccagttccagcatccgctccagcggtctcttcgcgttttcacgtgtctcgtctgttacatgaacctcattctccccggttttcagaacgtggagaactttttccagaaatacttttttcatgtttttgcagaccggtacggtttctgtgaagtagaattttttatccgggcaggtagtttccagcttgtactgaacgccacattctgtgcagatgataaactctttattgtcactttcctgtgcatatttaatgattccggatgtgcttccgatgtaatcagcctgtttcagaactgtctgaggacattccggatgtgccagaaccagtgcatccgggtgcgcttcttttgctgcttttacttcttccggatccataaattcatggacaatacagaaaccttcgttataaataaagttcttctcaggaacctgttctgcaataaaatgtgcaagatttctgtccgggataaaaaagatgtttttgttcggaagcgcttttacgatctttactgcatttgcggaggtaacacatacatcagaaagctccttcaatgctgctgtggaattaatgtaacagacaactgccacatcgtcatattcctctcgcaccttgcggataccttcttctgttgccatatgagccatcggacagtctgcatccatggcaggcatcagaacagttttatccggacttaagatcttggcgctctctcccataaatcctactccacagaacacgatcgtcttctctttcgcgctggctgcgatcttgctgagataaaaggaatctcctatatagtcagctacatcctgcacttcaggacgcacgtagtagtgtgcaaggatgatagcatctttttctttttttaatttctggatttcttctgcaactgtcattatctttcacctttcctgcaggatttcttttttgagttcctgcttttgctttctagtacagcgaatattaagtaaccgccatattgacttgtctgatttcttcatctgctgcgtcaatatagcagaaacttaattttcgctgtactagtctttattatgcagatgcttctgatctgcttttttattatcatgtaacttttttcaaaacatcttacacataataccacagtcctttacatgtgacaagacagttgtttgatatatgtaaagtttttttgtaaagaaagacatcaaaaaacacggtttccacaatgaaactttcatcctggaaaccgtgtttctgcacacattcattattttatcagtcttattcaccgttctgcgtactgtcagctgctcatttattacagttttctttctgatctgccgcaatcacccgatcatttccccagcagttctctctcaatccgctctcttgcttccggggcctgcttatccatcttttccggaaaaccaaacatggaaacgcaggcaatgttatcgccgccggctttcggtgcatccggtttcagctgcttgctggcaaaatccatttctctcaatgtttcaaaaataccatcaaaatccacatcaccctcacccattgcaagatgctgatgcaccgtcacatccgcttttccacggccattcagccacggcggatttaaaatatatctgcagtccatggtctggttaaaggtatccgcaaaaagtacatgggtcagttcatctcccgcatatttcagcatggaccgcacatctcctttgccctcatcatagaagaagccgtgaggagaagaatacacataaccaaggtttggagaacggaaggatttcaccatatcacaggtctcattattcagctcacagaaatcataaggatgagactggatctccacacggataccctcacgctcgatcagcggaagcaattcctccatggatctaaaccacattccattgcagatctcctgctggttcggatcacccgaaagctctgtattgataaccttcactcccatatctccggcgatctggatcatccgtttccagtttgcaactgcaaactgtctctgttcctccgtcggaccagaccagcgatacaccacgataaaggacgaaatctcaacaccagtctctttaagagcctgtctgtattcctgttcacattcttttgaaaacaacggatgcttatagaacggattgatcctcggatgcggagactgttcaatatatttatatccccagtctgccacctgatggaccatacggttgatatccatctgtttcgcaagaacatctacgtcaaatgcaatcttcatgatgcattccctcctttttcctcttctttattccggatataatccaggatcaggctggccgctccggctacacctgttttggatacattgatcaccatatcgtaataatggggatcgtctctgcggattccggtaaacttctcataatattcatttcggatctgatcacgtttcttcagttctccaagagactggcctttataatattcctggccctctttttcccggtaagcatcatctgcataaacgaaaaagctgtatgtatgcggctctccacgaagcacatagttggcacatcttcccaagaatacacctggtcttctctcagaaagctcacggatgatccggctctgcacctcaaacatctgaacacctgtataatctgctgccgcacctgccgatgaatgtccatacggggaaaatgtaagctcagaatcctcataattgtaggaatccagatactgccttacactttccagatctgctttttccataccgaacttttctgccataagacagatgatctgacgatcataaaccttgcagtccagtgcttttgcaacatcctcggcaatctttcttccactgctgccatacagtcttccaattgccacattgatccggtttccggaagcttccggtaacggcatggactgaatctcgcccggcacagagccgctttcctctcccgattctctctgaatcagttcacgcatcattttgtcataaactttgtccagctggtagcatgctgcgatcacaaacatcactacccagattgctatcggaacatacagataaaatcccttgatcacgcggattgcctctgcagactgctctgccgctgtcgcctttgttccgtcaaagtatgccgccgaaagaatcccgcccataatagcagaagtcagtccggaaccggccttctggcccatgctcatagatgagaacatcaggccctccacacgcttgcctgttttccactggccatactcaattgcatcgcttggaagagaatactgcacaccatagaatggggcgattccgatacctctcatgatacaggttacaacaccaagcgaaacactggtaatattcatcaggaacagcagctgtcctgcaacacccaggatgcagccggcacagatgagatttctttttccatagcggggaagcaccttcggcagaagggcaattcctgccacagttgccagtttctccgctgcggaaagaggcatgacgaggtctacatttccgagtacatactggcagtaataggtaaggtccgttccgataatgatctgatatgcggtataaaagatcatcagccccagagcgataaggaaataccggttggtaacggttgctttaaatgcttccacaaaaggaatatcttccttttcctgttttgctgcagaaacacgctctgtacagaccatataagtattcacaagtacaccgacagaaatgatcgcatagccggcagttaccaggatccaggccatctgctgattgccggtaatattcgctacgatattgatcagcggcagtgtgaacgcagtaatgatcatacttgctgtgatcgacaataccatgcggatgttacagatcacatcacgttcacgacggtcacggctcatcagagatcccagtgcatggaatggctgactgatagcagtgtatacaaccgtattcatgatattataggtaacaaaagcatagatgatctttcccatatttcccattggcggcatggtgaacaaaagcaccgctgccagcgcataaggaaccgcaagtcttaagatccagatcctggcttttccatacttggaatgagtccggtcgataatagttcccatcagcacatcggaaaatccatcaaaaacacgggacaaaagcatgatcattcctaccgcacctgctgatattccaacaacgttggtataaaaataaatcagcagagttgtagtcatggtatacatcaaggtcagtgccggatcaccaaaacagtatgccagcttttccgacaacggaaccttgatgaattcattcaagtctttccccttctgcttgtaattcaacaattcagggattcccttaccagccatagtatctacctcctatcggtttaaggtcggacctttctgaatgaattatccgaaatatttctgcacaaagtctctggtaacttccgcagcctttttcacgttgtcctcatggctcattgcatagtattccggacggaactcttcaatggtgcaaacgccatcaaagccgatctccttcagtgcagctgcgattcctgcatgatctacaacaccctcacccggccacagtctcttgtcatctccgcaggagccaagcggaagatcctcacagtcatttaaatggtatgcaaaaatcttcttgccatcagcagctctcaggtcctcaaggcgggagcacatctcatggaaatggaaggtatccacggtaacgcctacattatctctgtctactgcttttaccacatcataggctgttccaaactggttgatggagcagttcggtgcaccacagaactccaaggagatcttcatatccgcgccaaccttatcggaaagataacgaagacgtgcaactgcttcttctttgatctcactgacagatttgtcttttacatcaaagcttggaacggtgatcagcattttcattccgatcgctttggaaaccttcaggataaaatcaacttcttcgtcaatctctttttcccctgcctcatctctctggttaaagaagatcagagtgttgtatgcccatggtttcagatgatgattcttaaaccagtctgcaagttcttccagtgtatgctctttgagatagtcctttacgcagtcaaagcggagctcaatataatcaaaaccatatttctcgcacatctccaggtctgccataagagactgtcctttacattccagtgcagttgcttcattaaatcctaatttcatcttcaataccctccatatgtttttacttttcagccaatttttccagttaatctcaccggcaggttttccactgcagtttcaacaaagccgaagcggaatcggatcctgccggtaactgccgccgcagactcattggggaagtctgtagcaataagttggtatgataactcacacttgatgaggtggagctcgtaaaatatatttatttataaaattccggcttctcaactgctgaaacgatcttctcgatctgtccggtttcctgcgcttttacaagagcatctgctgtgatcgctgccaggtatccatcccatgcattcggtcctgtgatcactcctgcctctgcgttatcaacccagtcctgaacctctttatcataagcgtctttaaatcttacgaagcagtctgtgtcaatagcagtggacactgccgcattcttgcggatagacggataagccggctgtgccattttcagtgcaccgtcctcacatacaacttcacagttgatgtcatatccaaacttgcagtttacaaatacttctacatcaatgcatacaccttttttagtacggagcatcatgatctgcggatccttcagctcagagtgggaatatttcgtcactcttggcattactacctgtgctgattcatactcatcatctacaagccagtgaaggacatcgatctcatggattgcggtatcgtgcacagccattggtgtgttgtaattggtacctacctccggatttctgtgtgtgcaatgaaggatcagcggctcgccgtattctccggttgcaagtgcttccttgatctgctgatatcccttgtcatagcgtctcataaatccaagctggatgagatgtttgccggctgcctcctctgcctttactactttcaggcagtcctcagcagttgtacataatggtttctcacagaaaatcctcttgccggcctcgatcgcctgaagaagagaatctacatgtgcgaagcccggagatacgataaatactgcatctacgttctctgcattgatgagctccttactgtctgcatagacttttgctccgcagatctcggctgctttcctagcactttcctcaaatacatcggaaacagctactacttctgctccctggatcttctctgtcagtcttctgatatgatctcttcccattccgccgcatccgataactcctactcttaacattttaaattcctccgttcattttttattgttttctgtttttgtgttctttttgatgatgttatattatcattttgtgcacgtgaacgcaatatcttttttgtacaaaattttcattttgtttttatgcgattttcactatttgttacttcattcacatattttgtttgttttacagtatttttttcggcattcgctcacattttcgcatctataaaatgacttaccatgctgattacaaacgttgatcatatagcgttttattatgtgcaccagaacgcaacatttcatttcccttatactctagtagagtttatgtagaatattattgtatttcaacacataaagagttatacttatatgtagttttatttaaaatacacaaatgcatttttcatactttatttaaccgaactttaaggatcaaagcttctctcagaaatccctgaaacgcaggcaggcttccctgattcggttaaatt

SEQ ID NO: 285 - DNA, 1335 bp, Unknown
  gut microbiota DNA sequence
gaaaggacttatccctatgagcgactataatttagagactaaatgtatccactccggctataccccatccaaaggcgagccctgtgcacttcctgtctatcagagcaccacttacaaatatgacaccaccgacgaaatgggccagttatttgatctgaaggcagacggatatttttacacccgtctccagaacccgaccaacgatgccgtagctgcaaagatcgcagatctggaaggcggtgttgctgcgatcctgacttcttccggacaggcagccaacttctacgcagtatttaatatctgtgaggcaggcgatcacgttgttgccgcttctaccatttacggaggaaccttcaaccttcttgccgtcaccttcaagaagcttggcattgactgcacctttgttgataccgatgcaacagaagaagagattgctgccgcatttaaaccgaacacaaaggttctctttgcagaaactatcgccaatccggctctggtcgtcctggacatcgagaaatttgcacacgttgcacaccagaacggcgtgcctcttattgtggataatacctttgccacaccggtaaactgccgtcccttcgagtggggtgcagatatcgttacccactccaccaccaaatatatggacggacatgccgttcaggtaggcggcgccattgtcgacagcggtaacttcgactgggatgcctatggccataaatatcacggcctgacagagccggatgaatcctatcacggtgttgtctatacaaagcagtttggaaaaaaagcttacatcactaaggctacttcccagctgatgcgtgatctgggctctattccgtctccgatgaactgcttccttctgaacctcggcctggaaacgcttccactgcgtgttgaacgccattgctccaatgcccagaagatcgcagaatacctaaacgcacacgaaaaggtttctcatgtaaattacgcaggacttccggaggataaatatcacgcactggctcagaaatatatgaaggatggtcgtacctgcggcgttatctcctttgaactgaccggcggccgtgatgcagcagtccgttttatggatagtctgaagcttgccaccatcgcaactcacgttgccgcttccatcactatggtccttcacccagccagccatacccaccgtcagatgaacgatgagcagttggttgaagcaggagtttctccaggaatgatccgtctttccattggtatcgaaaatgtggatgatattatcaaagatctggatcaggcactgaaaaatgcataaataaccaagtaaagcggacattcgcaatccgcttc

SEQ ID NO: 286 - DNA, 3679 bp, Unknown
  gut microbiota DNA sequence
atcgacatttacttcgaagccaatatccggaacaacccaaacggatattgcggagataaccagataatggctggttgaccgaatgcggatgattttatccgcctgacttaaaactccaaattgcacattgcatttgtttatataaatgaatataaccccctttttttttcacccctctgccaatgcccggcagaggggttctttacgtttcagcctgaagtacagaggtgaattctgattaactttacactccctccccactctgttatacttggaacaggtaaacagcggaaattcggcaatactataaaactggggaaagagtttttacagaggtgaatatatgggagataagatcaaggttatcatggactgtgatcccggaatcgatgacgggatcgcactggcatatgcggcagcacatcaggatgaactggagctgcttgcagtgacgacatctgcaggaagtaccaggatagaaagagtgaccaaaaatgcactggagctggtggatttttacggactgaaggttccggtggcaggaggccaggatcgtcctcttgtgaaagcggcaatttatgcggaagaatttcacggagagacagggcttggccattgcgtactgtcggaagcaaaaacagaggctgcttctgacaatgcagtgctttttatccgtgatattctgaatacccttccggagggcgagcaggtagtaatgattgaaactgcaccaatgactaatcttgcacttctgttgaaggtttttcctgaaataaagaataagatcagaaaaattgtatttacaggcggtgcagcaaaaggcggaaacatcacaccggcagcagaattcaatatctacgcagatccggaggcggcaaagatcgtattcgattccggaatcccactgatcatgtgcggactggatgctaccctgaaatgtaatcttaccagaaaccagatcatgaagctgtgccagtccggtgatccggcagccagagcctgtggagatatggccggctacgtacttgaaaatttttccaaatatcgctgcgtggcaagtatccatgctgctgtaccgtttatgtatctcatccatccggagttctttaaaacagaaaaagtattcctggatgtggactgttcagacggtgccggacggggtgctacattatgcgatttccgctggtggctacacgaagaagatgaaatgaaagatatgattctgacagatgcagatacagaaagcttccagcaggagctgtttgaagcgatttattctgtttctgagtgcagaaccgggaaataaccgggatcagaccatgaagcagttgcgttcataagatatagaggagcagaacacagtgcctgctcttcataaagatatctgtgcacactgtcagataagaggacagaaaacccatgaactatattgtatttgacctggaatggaaccagaatccggatggaagaagacatccggatagtcggctcccgtttgagatcatagagatcggggcagtaaaattaaatgaaaaaagagagatcgttgatacctttcagtgtctgatcaagcccaaagtgtaccattggatccacgacagtatccacgaagtgatccacgtggattatcatgaactggaaaaaggcatcccttttccaagggcgatccgcagatttctggaatggtgcggggaggagtatcgcttttttacctggggagaccaggatgtgatggaacttcagcgcaatatgaaatactataatcttctgaagctgatgccagggccggtgcattactacgatgtgcagaaacttttcagcataaaattcgaggatggaatatccaggcgttccctggaatatgctacagactacctgcagcttcccaaaaaccgggattttcaccgggcactggcagacgccagctatactgccaggatactcctggagatcgatgaagcctgcatgatccgccatccgtccctggatgtatatcagaatccaaaatccagagacagcgagatctatatttcctatacagaccatgacaagtttgtgtccagggaatttgtatcaaaggagcgtctgatgaaggaccgtactatggtaagtaccatgtgtcccatctgcagatgccctgccaagcggaagatccgctggttcagtaccaacaattccaaggtatattacagccttgccctttgccatgagcatggacctgttgccggaaagatccggatccgaaaaaccgatgagggaaaatatttcggggtgaagaccctgagagcagaagatacagaagcggcggatgagatccgtgaaaagcacgaatctctccgccgcaggaaaatgttacgaagtcaggagaagatctgatacgatgtttcgttcgtattgcattccccatccgaccatttgtttcttataataatatttgcttttcagacgcagtgggccgacagcattctgaagaacggcctggcgtttgttaagctgtgattttttgataccttttggaagagtcacataaacctttgtctgataataaaacggataggtgtttccgttattcttaaggatatatttgtcacaagggagtaccttaaacgggactggctccatggacaccttcatatccaccttttcaaaattttcaaaaccataattaaaaagagaagcggtatcgctgtaagcatttgccgcggaagtagaattcaggatcacggctaccagcgttatatttcctcgtttgcagtaggtgacaagtgtgttgccggatgcatccgtgtagcctgtttttccgccacggacgccttcataataatattcgccgtttttcatcatcttgtgatgattgagcagctggcgggcttccgcaaatttattggtaggcgggatctcgtaataacgtttggtgcagtatcgccggaaaagaggattcagccaggcggatttggcgatctttgccatgtcggaggctgtggtgtaatgattctcatccggaagaccgttgggattgttaaagtgtgtgttcttgcagccaaaaagcttggcgcgccagttcatgagttctgtgaatttctttacagagccggaaacttcttccgcaacggcgacagacatttcattagcagactggagcatgacagccatcagggcctgatccctggtgaatttttcaccgggagcagcataaatactggaatctccggcagttacactggtggaagctttttcagatacgttaatgtttgtcttagcgttcagattttcgcaggcaagcagtgtagtcaggatcttcgtgatgctggcagggtagagctgtgtgtccgcatttttggaataaagaacggcttctgtatttacgtccataaggactgcagcctgtgcttcgatgccgggacctttgggccacccgtcaatggaatcggtgtcggcagcctgtgaataatagctggagtgagcaggcgtgactgctgcggcctgaccatcaggaaccggtgtggcagtgacgataggatcaccatattcatcgtatccataggcagccgccgcgcagggagctgcgcctgtgagcaggatccctatgccgagaatgcctgcaaagatccggcgcaaggattgttttttcatatttttcataacaagatacctttcagtgataaatccgggcgagaag

SEQ ID NO: 287 - DNA, 2209 bp, Unknown
  gut microbiota DNA sequence
ttattgttgggacttcttttatttcagtccctgtaatggattctgccgacgtatccgtcacagtatccgatacagcttctgctgactcctccgcactgaatgtatccgctgcaaaaacactttccatccatatcccgcaggtcagcatactgacagctgtaatccctgcaagtatttttttatttatcctcatttccatgcctctactttctgatccttactgcttttaccttgctccaggaagaataatatttctttgttcctgattttttgtatgtgcggatccttacgtaatacgttttgtttttctgaagctttgtcagcgtgtatttcgttttggatactccggacactgtttttttgctgccggatctgaaatttttgtttacggaatactggatctcatatccggtcacatatcggtttttcttccatgtgatctgcgcttttctgccggacaggttctttgccgtcatcagggtagttcctgccggattgactgtaactgtaatactctttgtggcggcattgtatcctgctgtggcggaagaacggatcgtgatccttgcactgccggtgaatttcgccgcaatggtaatccttccttttttgtctacctttacagatttactgctggaagaatatttcagcggagctttcccataaacttttgcattgatgctgatcttccgggcttttgcataccaggtccgtcggatattggaggctttgatggtattgctgcgttttgttactttgatggtgcagaaggtggagccggcggtataattggttccctttgcagcgtatgccatgatcgccgcggttcctccgcctttgatggttactttaccggtggccggatctacgacaacagctttggggttgctggagctgtaggttatggttccgtctgttgttttttcagacagtgcacagaggaatggttttgtgccatattttacagttattgtttttttgtcaaattttaggctcggctctgtctgttcgataaggaatcctgctttgtaggttccgctgtaatttccggctcctgtgatctccagctctgcatttcccgcattgatgttattgctgcattttacagtgtaatctgtgtttttctgcagtgtatagtttccatccatgatgatcatttccggtgttttttcggttccgtcataggtgtatttctgctctgcaatcctgatatcgcacagtgcaaggcttcgttttgccgggctgcctgtttttggattccatggtacccaggtaatatttccgccgtaatcccggaggatatccaaagaccaggttttgtctgtgtatggatagtatacagttgcagttacatttttgaagatgttatttccgagtttcgggctgttgccgtagaaatagatattctgcagatttttgctgtctgcaaatgcgttgtcgcctatttctgttacgttttctttgatattcagattcaccaggtttgtacagttactgaatgcgcccggttcgatcaccgttgcattttccggaagtgatctccggatctcaaaggttattgtggctgttcctgtataatcactgtcggttttggcgatcacggtgatctttgctgttcccggatttacattatctgcgaaatatacctggtagtcttttccttctgtcagtgttttttcgttgtaagtgatggttactgttggtgctttttcgattccatcgtatacataggtctgttctgacaactgaatgctgcaggctgacagagcgatcttcgctttttccagtatcgggagctgacggtattctttgtgtgatgcatttcttctgcaaactctttctgcctgtcccggttctgtataagttgcagcctttattgttttccactctccgtaatcatgacctaacgctgctgttgtggtctgggctttgagcacggttccgcagacgctgcagtgacttccttcggtttttcccgcggtctcacaggtggctactaccgccgcgtcttttactgctttgtggcctgtggctgcgatggtttctgtgcgtgttttcttgcagcgggtgcaggtgtaggtcttcgttcctgctgcggtgctgcaggtcgctgcttttgttacctttccgctgtcccagttgtggccaagcgctgctgttgtggtctgggacttgagtacggttccgcagacgctgcagtgacttcctt

SEQ ID NO: 288 - DNA, 2089 bp, Unknown
  gut microbiota DNA sequence
atcgctcgtcttgcagcagcacaggcagcaatcgctaagaagaacgcataagtaagaatacatttcaggctgaagtttcagtctgagcatatataaagcttctggcagtctgtagaaatacagattgtcagaggctttttttctttatgatattttttgaagtattccgacggtttacgaaaaataggattcatggtatcatgaaagaaacagggcagataaagccggaggataaggagaattttatgaatcaggaatcacagacacctcataagagacgtgtacgatataaaggaaaatatccgaagaaattcgaggagaaatataaagagcttcagcctgaaaagtataaggataccattgaacatgtgatcagcaagggaaacacaccggctggaatgcatatttccattatggtaaaagaaatcattgattttttggagatcaggccgggacaggttggatttgatgctacacttggttacggtgggcatacaaaggccatgctggaatgtctgagaggtcagggacacatgtatgccacggatgtggacccggaagaatctgccaagacaagaaaacgtctggcagagcagggattcggagaagatatcctgacaattaaacttcagaatttctgcaccattgatgagatcgcagaggaagttggaggctttgattttatccttgcggatcttggggtgtcttctatgcagatcgacaatcccaagagagggttttcctttaaagtggatggtcctctggatttaaggctgaaccaggaaaccgggatcagcgcagcacagcgtctggataccatttcaagagaagagcttgccggaatgctggatgagaattccgatgagccgtactgtgaggagatcgcgaaggccatcacagatgagatccgaagaggaaaccacatagataccactacgaagcttcgtgaagtcattgagaagacattgtctttccttcctgaaaaagagaggaaagacacggtgaaaaaaacatgccagagagttttccaggcactgcgtattgatgtgaaccgggaattcgaggtcctctatgattttatggaaaaacttcccggagcgctgaaaccaggcggccgtgtagcaatccttaccttccattccggagaggacaagctggtaaagaaagccttaaagcagggttataaagacggcatctattccgactattcaaaagatgtgatccgtccttccgcacaggaatgtgcacagaatgggcgcgccagatccacgaagatgcgctgggctgtgaaggcctgagtgaagagtgaaagagcagttctgatacaaatacagaaacagaaaaatcctggaatgcgttgacattcgggattttttttgctatgttatataagtttacatatgataaagctacggcttaaactgaataggagaaaggatatggatgtggaggaaaagaaggacatttttgataaactgatgcatcttccggtgctgaatatatttgaacctttttataagaaacataaggaagttctgatgtatctgttctttggagggctcacattttttctgaacattgcattgtatgcatggctggataaggggctgggtatgaatgcgctgatcgccaatgtgatttgttgggtggtctgcgtattgttccagtattttacaaacaggacatgggtattcgacgggcaggtggattctgctgccggatttttaaagcagatggcttcgtttttcggaggccggctctttacgctggttgtggaggaagcgatccttgcggtatttatcacctggcttggatttaacagcatggcagtgaagcttgtagctcaggtggttgtgatcgtattgaattatgtgatcagtaaattaattgtttttaaaaaataaaagatatttatatttgcaggaaaggagttgaactgaaattgacaaaggacaagacaaatgatatgactgtagggaatccggtgagcctgatcatccggtttatgattcccatgtgccttggaaatatttttcagcagttttataatattgcggattccattgttgcgggtcagttcctgggagta

SEQ ID NO: 289 - DNA, 570 bp, Unknown
  gut microbiota DNA sequence
atataacccagatcacttttttctgcaatagtatcaatatttattactccgatgatctgtttccgctcgtcctccgtcagcttaccaacataccatcttgaacccagcatatatttctcttcgcccgagaacaggatgaattttatattataaggtatctctgtatcttttaaaatccttgccagttcaagcactgctgccactccggaaccgttatcattggcgcccaccgaatcttctgcactgtcataatgggcacttatgatcagattttttgtagtatcaatggatgagttttttgtcacaatgatattttcaccaatgccgtcaacaattgcatcctcggctgttgatgccagaaacacatccgcctgcgaggaatgccttattgcattctcattgttttcatcgttatattcgaatttctggtattctatattgtcatatcccagattgccaaaatattcactaatatattcttttacattctgtattgcatcagaatttattggacgcggttcagaagtgatttcatcgatgatctgttcaatattctgttccaaaggctct

SEQ ID NO: 290 - DNA, 1017 bp, Unknown
  gut microbiota DNA sequence
atcttggaaagaagatgggcgcaaaactggtttacattgaggtgtttgatcgtattgacaagccgacaatgaccggcaagatggtttatcccattgtagataagtttattgtgcagtgggaagaacagaaaaaggtttatccgaaagcaattaacctgggcagcatattttaggtaggggacgaaaacgatgatttttgtgacggtaggaacacatgaacaaccatttaatcggttgctcaaaaaaatagacgaattgaaaaaaaatggaacaattcaggatgatgtgattattcaaacgggatttagtacatacaggccccaatgttgccagtggagtaaattactcccttatcagcagatggtcaaaaatgtggcagatgctcgtattgtgattacccacggaggaccagcgagttttattatgccactgcagattggaaagacgccgattgtcgtgccacggcagcatcagttcaatgagcatgtcaatgatcaccaagtggagtttgcgcgtaatgtgtcaaaacgtatgggtacgattattgatgtagaagatattgaaacgctaggagatattataacaaactatgacaagattgttgctgggatgggtcatggcatgatcagcaataacgagaagttcaacgaggaactggaaaagctggtaggtgaaatgtatggaagatgagatgatagctaaagtattagtaataatggcaacatataatggagaaaagtatttacaggagcaactagatagcattttacggcagaaaaatattcaagtcgatattcttgtaagggatgatggttcgaacgataaaacaaaagaaattcttgagtgctattcaaaaaacaataagttgaattggtatacaggagagcatttaaatgttcaaaaaggttattttgatttgatgaaaaaatctgcaaaattcgagtgggattatattgctttttctgatcaagatgatgtttgggatacggataaattatatattgcagtgcaatcgtt

SEQ ID NO: 291 - DNA, 1453 bp, Unknown
  gut microbiota DNA sequence
actgggattatctacagccggtaaaaattcatttcggcaaaggcagagtaaaagaaatcaaagaaatagccagagagcttggctgcgaaagaggccttctggtggcaggaccgtttttctttaaaagcggtcttgctgaaaaggtcataaaagagtcagaaggaatgatcattgcttcttttggagatgtttctccaaacccggacgttgcagaggtagatgcctgtgcggaagtgatccggcagaaaaatatcggatttgtggtagcactgggtggaggcagtcccatggattgtgccaaagcagctgccagtgtagctctgactccggattccatccgtaagtatcatggaaccggagtagcaatgccggagaaacatcttccactgatcgcagttcctacgactgcaggaacaggaagtgaagtgacctgtgtatcagttctttcggatcatgcaaatggaaaaaaagcgccgatcgtatcagagggattttatccggcagcagctatcattgatccggaacttacttatacaatgccaccgcaggttacggcaggaacaggaattgatgttctttcccatgcgatcgaaggctattggagcaaaggtcatcagccgatctgtgatgtacttgcgatgcatgcagcagaactggtatttaaatatgtttacagagcatacaggaagcccgatgatgaggaagcaagggagaaaatgtgcgaagcatctttgatcgcaggattggcgtttactttaccgaaaaccacttcgtcccatgcgtgttcatttccattgaccaatatttatcacatcccgcatggcgaggcgtgtggcctgaccctggattattttataagaatcaatgcaaaaggcgaaggtggtgaacgtgtagaggaatttgccagaaggattggattcaaagatgcagaagagatggcagatgcagttcttgaattaaagaaaaaaatgggattgcggtgtgatctgaaggatctggagcttgatgatgatcagattgcggagctggttcgcatcagcagacacccgaacctttataacaatccggtagagatcacagacgagatgctggatgagatgtatcgatatctggccggaaagtgaaagattttgattgaatattgaaaaagataatgataatatagaaagagacgatggagtccggatactttggtatctgggctctttttgtatttatggatgggagatgaaggattatgaaactgatcacagcaatcgtaagacctgagaaagtgatggacgtcatcaaagcactggagcaggaaggatattttgctttttcaaaatgggcaatttcaggaagaggtaaggaaaaaggaattcaggtaggggatgtcctttatcaggaaatggcaaaaaacatgctgtatattactgttggggacaaagaaaaagatgaggttgtagatatt

SEQ ID NO: 292 - DNA, 1895 bp, Unknown
  gut microbiota DNA sequence
gaatggagcgatagggcattgtatcctgcgaaacgtattattttatagagaaactattagaaaacagaacgaaatccacagactgtcagccggatttcgttctgtttattgttttatgaatagttatttgttcacatttgtattatccataaaaatcagcatttctcagcaatatcataaatcagccgttctgtatcttcccatccgaggcaaggatttgtgatggaacagccaggagtcatatgatcactgatatcctgacggccctccagaagatagctttcaatcataacacccttcaccagctttttaagttccggattataattacgactgtgaagtatttctgagacaattcggctacataagctttagatttgcctctgagtggtatgcagggggagttggagaaagcagagaatatggcttaacatatcgtcttaaagacggaaagaagttggcggttcaagatgttgcgtctggaaagaaaagtaatgtaaagaaaaatatagcaacagcatattcgaaaaaactttccggccaggggtattcttatgttatgaaaatgaagtattcagactttcagttttatattaaacccggaaaaaagtcgttgtatgttttggtccatatggagcattgggagcacatggaaaagttgtggttgaaataaaaggcaaattataaggattgatcagctgcaaattctgcttgaacggtacgcctattctgaaatcggcggtacattcattctgatttagcggtatgcgttttctctttagagctgacagcaccaaacaaaaatatcctgacagttgcagagctttctggctctgcaacctacaaagtctatgaaaaaatcttccccagtactttctcatccaccatctcgcaaacccagctaaacccaatccccaccaaatacataagcagaaaacagaccacggcataaacataagcatttgctccaatggtggtatgctgcagcagggccataggcagtctctgcataatatacaatccgaacagatgctttccggtgaattctaggagtgaatttccaagctgcattttcatggtaaacatcacaaccaccagtgcgaatacaacagcgccgatggcatacatacagatctgctggcgggttttgtaaactacgaggagcagggccaggagtataagggctgcaaggatgtaattctttgtggcctttaattttacatcaattttttccttaaagaatccgtaccacatgccggcggggtagcagagcatggtgttgtaccagtagtcggttttgtggagggacaggatgtacatgcttatcacggtcagaactgtgatgaaaagcagagagggtacagggttgttttttaagatctggaatgcgagccaggtgatgaggtacaggatcaacatgacaaaaatgtaccagttgctgttgccgaggctttcccagcccagcagtgccaggagaattttttgcagggaaaaggttcttcccatgaaagaataggctgtcagataaagcagtacagccagatcaaaatgaaccagtgtccgcagcactcggtgaactgggatgcggcggacgtagggcgtgccttttttcatgatggagacgaggacaccgtatccggaataaagcaggaacagggtgactaccagttggccggagtgggggcgccagaactggaagatccggtctgtggggccgttcatctggatgtactggcagaagtgaatcatgaataccagcagcagaaaaaatccgcggatgatgttggtctgtttcatcgagatatattccggattgaattccacaggcctggatggaatgagcagcagaaggattgctgcctcgtttgtatacgcaggttatacagaaaaacttt

SEQ ID NO: 293 - DNA, 5637 bp, Unknown
  gut microbiota DNA sequence
ctacagtgatttcagcactttaacaagccgtgaattatcctccggcatcataatacagaatcgtacaaattccccgtccaggcactggaaggaagaacagtcacggatcatcatgccttgtctgatacaggcttcaaatacgtcataggaggtcagtccgtttttcaggatccggagcaggataaagtttgcataggcgggatagattttgtaggtgtctgtatcccttagctcccggatcatccggtcgcgttcggaaaggaccagatttctggtttctttaatataatcttcatcctgcagcatgatctctcctgcaaaggcaccaaggctgttaagtgaccatggtgtctgtttttcgcgcatttttgcaagaaattccatatttccggtgatgccgtagcctaggcgcattccgggagcagcgaagaatttggatacgccgcggagtaccatgagattggtgaattcccgtgtcagcggaactgcggtgatggcgttgatatccggggcaaattccacataggtttcgtcgatcatcacaaagatatttttttctgcacagaaaccgataagtctgcgaagctcttcctgggtgatggcagaggaggtcggattgttgggattgcagaggatgagaaaatcatagccctgctccagcttccggcagagatccggaatgtccggctcgaaatcattgctttcctgaaggtggtagtattcctgggtacttccggagaaagagagctctctggagtattcagaataggtaggcccaaggatcagagtatgcttcggggcacgctcctggatcagaagggagatcagctcactggagccgtttcccggaaggatgaaatcagcgggaatattgcagtagctggaaatcgtattccgaagggatgtgtattctctgtccgggtaggaggaaaggatatccacgtgttctgcaatggctctgccggcttttggggaaagtcccagaggattgacatttgcaccgaatttgacgatgttttcttttttcagattgtagtagctgcagatcttttctatatcacttccgtgaaaaacgggtttggtatccatttttgtcacctcacatttttatttttttcgtaaaaaatttatatccagtatacaccagaatccgggacaaaaaaagacgggataaaaagtttctgtatttttttcgaacaggatattactgaaaattgatttctggaaatgtatgggaatatttgatacaatgagcaggtagtgaatgcggattgtgaatatccatgctgtttgtcaatgtgaaccgtgaatatccatattttttacggggagggtaaatcctcagtgagaaacagcaggaaaggaaacagaaaatatgaatacagaagagaaaaagatcgcggtgatcggaattggtggtgttggtggttacatagccgggctgctggcgaaggcgtatccgcatgtgacgatggttgcacgtggcgccagggcagagagcatccggaaaaaaggcctggtgcttcacagtgattataagggcgagatcgtggcaaagccagagcgggtagttccaattcaggatatgggacagcaggattatatttttatctgtgtaaaaaattattctctggctgaggtgtgcgaaagtatccgggacatggtcacggataacacagtgatcattcctgtgatgaatggtgtggacccgggagaaaacatccgccgtctggttggtaagggaacggttgtggattcgctgatctatacggtggcttttgccaatgaggatttttccatttcccagcaggatacgtttacgtggctttgtattggaatcaaagatgcggatgaacggcagcagaagaaggttgcagaagtggcagggatcctgaaaggtgcggatattgactataaggatcagggggatatcgaggtggagatttggagaaagtatatcctcaactgtgcctttaatgtgatgactgctttttatgataataccatcggggagctccgcagagatccggtgaaagcgcagcagtatgagaagcttgtatgggaagctgccagtgtaggtcaggccaagggggttgcgttgacggatgagcacatcaatgaggtgatccataaattccgccatgtacatgcagataatgcaaccagctccctgcagagagattttcgcatccggagaaaacagacggagctggaaaccttcagcggctatattgtgaaagaagcgaagagacttggtgtttccattccgctttccgaaaaaatatatcagggacttatagaaatagcagaaaaattctgaccgaaaagggtgagtttttctggtggaatcctgtatgctctggtacaatagggatataaaaaatcctgtattgcaggttgaaaggttatctgtgatatcggaagggaggaaaagagatgaagaaagtatttttggctgttattgcagtgatcgtggtccttgccggaggacttatgctcagttacaacgggcttgccggaagtaaagaagctgtggaaactgcagaggctgatgtggataccatgctgcagagacgtgcagatctgatcccgaatctcgtcagcacggtaaaaagttacacgaagcatgagacgggggttgttgacagggttctggaggcgcgggaccagctgatgaatgcagataccgtggaagagaaatctgaggcagatcagcagatggacagtgcactttccggtctgaaggttgtggtggaaaattatccggaactgaaaagcaatactacttatgtgggcctgatggatgaactgtccggaagtgaaaaccggatctctgtagcgagaaaagattataatgaggctgtgaaagcttataacacaaggcttgtgaaattcccagggaatgtatttggttccatgcttggctttgagaaggcgtcgtattttgaggctgatgattcagcagcagatacgccggatgtaggggatatgctggcagagtgataagatcagaccattgttctgatgaaatgaaagaacggatagagggagaatatcctatgaaaaaatggatcggacggatggctgtgctgctggcttttgtattgacgctatccggaagtacgctggcagctttcgggaaaatcccgtctgccacaaaagaattctatgttaatgattatgcaggggttttcagcgatacctggaaggaagagctttgcaaggctggtgagcagctgtatgaggataccacagcgcagctggttatccttaccgtggataccaccgatggggaagacatcagtgattatgcagtggaaaccggccgcaaatggggaattggttcaaagaagaaaaataatggtgtcctgatcgtcctttcggtttcggaccgtaaagtctgggtatctgtcggctacggtcttgagggaaagctgcctgattcaaagaccggacgacttctggatgaatatgcagttccttcctataaagacaatcagtttgaaaaaggtaccgtggagctttattatgcactgctaaatgagatccgtgaggaatacggcctggagaagataacagttcccaggtatgagaaggtgcagcaggatgtggatgacgatgaggatgagggaactgtctgggagatcgcgctggggcttgtaatgatcgttttgctcatggtgggcgcatatctgctgtgcgtgatgctgcctgtatttcttatcgtaactatggttctggttctgaagggcctgataatgaaattgtcgggaaaggataccgcagactactggaaaaagaatttcagccgtatgaatgtactgcatcggctctttaattccctgtttccgctgagctggctcctgggaagagggggaaaaagcagcggcggaagttccgacaatgacgatgacagagacgatgattatgacagctacgacagcggaagctccggagacggaggaagcttcggcggtggcggtgccggcagggatttctagtggtgtcggcatgaagcgccggttctcttgtacagcacaggcggagctttctaatgctcttgacaaaatttctcaactttgctacaatgacgaaaatcaattccgtgagggagtaattcgcgtgtagacgtggtttgtcaacatactggtgcatgcacctggcaaatcttaaagaatgagactcatgtatattttatttctgttacagagatagagtatacgtgggtctttttttatggctccggagcggatgaatatgcaaaggagaagaaaaatgctgttatttatgaaagtgctttttacccagtttattgcggaaatgggtgacaaaacacagctgatgctggtggcaatgacttccaggttcaagctgaaggatattttgcttggaaccggtgttgctgtcctggtgctcaacggactggcagtgcttgcaggaggtattatcagtaccgtggtccctacctggctgatccgtctgatcgcaggtgtagcgttcctgttttttgcggtgacaacactgaagggtgacgatgatgaggaggagaatgttaaggatcgtaagatcaaatttgcaccgctgtctgtattctgtacattttttgttgcggagctgggggataagacacagcttaccgcaattacatttggtgccaatgagggactgagttcagcggttgtggtatggcttgcctgttcactgggactttttgcagcggatgtgatcggacttctgatcggatatcttctgaaaagcaaggcaccggagggaatcctcaatatagttgcatttgttattttttccatctttggaatcctgacgctgagacagggatttggccttctgcttggggcgggctcttctatgatccttccgcttaccgtagcggttacggttgtgtttgtgatcgtctgtcttgtgctttataagcaggcgaaaaagaattaaattattataaggagctttgcgcagaatagggctcatacctgaaaaagcctccgcatacactgtaaaaaagcgtcttcgggggcttggcagtgaaggattatattgaagaacgtgcagttgagatcgcaggatatattgttgaaacaaaggctacggtgcggcaggcagctaagaaattcgggatcagtaagagtacggtacatatggaagtaacaatatagaacggttcgtttgggtaatagaataagaaaaaccaaggaggaacgaaccatgaaggatttgaaaacaagaattacggagaatggcattgattatgtacttgtcggggattattatatcccagacttgaagctgccggaggaaaagcgatctatcggtaagtggggacgaatgcacagggagtatctgaaaaagcagtgctacggtagatattccagtttactgctgaccggaaaactttggagctatctggaggatttggacgaacaagcggaggaacggtttacgtgtattgttgatcagatgaaagcggctgagggagtgacggaggaattgaagcggaaagatgctatgctttgggtacaacggtgtaataatattagaaacagagcagaagaaattgtactgaacgaaatggtttatatttagtatggagcagtcagccgaaaggctggctgtttttctttt

SEQ ID NO: 294 - DNA, 761 bp, Unknown
  gut microbiota DNA sequence
aactttttataagttttcagtaacggaatcatatgaagaaaaagaggattgcaatgcttctggccgcaacacttacgttttcacagagtatgggtgcagccataccggtagcagctgaggaactgacagcagataccggacaggaaactgcagagacagaagaatcagttcaggagaacgatgactcggaaacaacaggggaagcagcttcagtgcctgatctggaagacgatgaggaattaagtcttcaggatgatgcagagaatgcggaagaagaaattgcagaagaagaaaacgtatcagaaactacagagttatccggggataacaccgaaaaccaggaggccttcagtgacggttcagaagctggagagtctgtcgcagcaaatgaacaatatcagcttaatctgatatttgaaggtgccagtggaggccaggatttactgccgaacagccgtgtcaggataaaatcccgtctggttgatacaattggctatagtgatgtttctgcatatgaattgaaagttgctccggtaacgggtggaaatggtgtcaaaatggcagacgtatcattagatggccaggatattgtgctggatgtttacaataaaaccggagacgccagaatttccgcaacggcattcataaatggaactgaagtagcaaaaagggaattttgggttaacatcagtgagtatgtgatcctgccggaaaaaatcacagatacaagtggtaatgaaatcaaccttgaagtaggtcag

SEQ ID NO: 295 - DNA, 143746 bp, Unknown
  gut microbiota DNA sequence
aaccaggaggtgacggaagtcagagcccagaaaggtcctgtgttgaaggaatatatagaatctctgggatataccatggatgaggtgatggttcttggtgacagccttaatgattattccatgatctccatggatttcggcgcaaccgttgcaatggaaaatgcagttccggagattaaaagagcagcaaaatacatcacaaagagcaacaatgagtttggtgtggcttatgctatcgatcaggtttgggaacgccagggaaaatagtttttcccccttttgaaaaagtgtcatatatattataatgtagaaagatgaatacagaaaagcgaaaggcttgcgttccggtgtatgaagcagagtggaatgagaagtttcgctttacaaaaaacacagacaaagagaggaaatcacgatggaaaaaatgaaaaatgtttatattatggatcacccgctgatcaaacacaaaatttcaatgctccgtgataaaaatacaggaacaaacgagttccgtaaactggtggaggaaatcggaatcctgatgggatatgaggcgcttcgtgatcttcctacagaggaagtggaaatcgagacaccgatagaaacctgtaagacaccgatgatctcaggtaagaagctggcagtgatcccggtcctccgtgcaggacttggaatggtaaacagcattctcacactggtaccgtctgcaaaggtcggacatgtgggactttaccgtgatccggtaacacatgagccccatgagtattactgtaagcttcctgaatctattgacgagcgtatttcagtgatcgttgatccgatgcttgcaaccggcggttctgccgaagctgccattgattttgtcaagaaacagggcggaaagaatatcaagtttatgtgcatcatcgcagctcctgagggactgaaacgtctccatgaggcacatccggatgtacagatctactgcggttcccttgacagagagctcaatgagaacgcttacatctgcccgggacttggagatgccggagaccgtatttttggtactaaataattttgaaaaaatcttaaaaaatacttgacacacccggcactgttatggtattgtacctaagaacgctgccgaagacagtaggtgccgtaaggcataaggatcaaaacgcctaccgaggtccaagtattctgagttaagattacacaaggccttattgcgaagcagtaaggtctttttttaaacagattgacttattgcgacggcggtatacaaaatctataaggaggtgtaccatttcatggcaaaagtagaactgaaacaaccaatcgtagaagagatctctaacagcattaaagacgcacagtctgttgtacttgtaaactacagcggtcttacagttgagcaggatacaattcttcgtaaagagttaagagaagctggtgttcagtacaaggtatacaagaataccatgatgcgtcgtgcattcgagggtacagcatttgagagcctcagtgatcatttacatggcacaaatgcgatcgctatctccgagacagacgcaactgctccggcaagaatccttgctaaatatgcaaaacagttcccggcactggagctgatcgcaggtgtagttgaaggtaactacaatgatcaggccggaattcaggcactgtccacaattccttcaagagaggaacttcttggaaaactgcttggaagtatgcagtctccgatcgcaaacttcgctcgtgtgcttaatcagatcgcagagcagaatggcggagctgacgcagcagctgctgagtaatcccagcaacgtgcaattggcggcataacgaccgcatgattattaattaaaatttataaatggagggaaattaaaatggcaaaattaacaacagaagaatttattgcagcaatcaaagaattatctgtattagagttaaatgaccttgtaaaagcttgtgaggaagagttcggcgtttccgcagcagcaggtgttgttgtagcagcagcaggtgcagcaggcgaggcagctgaggagaaagatgagtttgacgtagagcttacagaggttggcgctaacaaagttaaagttatcaaagttgttcgtgaggttacaggtcttggacttaaagaggctaaagctatcgttgatggtgctccgaaggttgttaaagagggcgcatccaaagctgaggctgaggacatcaaaactaaacttgaggctgagggagctaaggttacacttaaataatccgatcagatcagaagttttaaaggctgttgtgcctgccggtttaccggcggcacagcagcttttttagtgaaaaaaatccagggtaaatcttgctttttgaagaaaaagaaaggataataaaggagacaggaaagggtggatggaatatgaaacgaaaaataatggcttgtatccttgctgctgcgttgggaatcacaggagtttcttttccgacggcagccaagacagtgtctgtcggaaaaaatgtaaaaaatataactgtaaacgtgaaaaatcctctggatgaacttcgggctcaggaagctgcaatgcagcagcaggaggagcttgaagaagaggaaaatatgccggaacaggatctggatccgcttgtgctggataacgatggcagtgtggttcctgcatcacaggcatcctggacaaaaatagagtcaggtgctgtagaagcagtggatgtatcagaggcaccgggggatgaggaaatatcggaaaattcaactgaagacacattttcagatggaagcacagatggagattttgacacaaataagaatatttctgacaatgcagcagcggaagctggcagtgaggatattcagacaacagatggcagtatcagcggagaattgccggcagatttttccgaaggaacggagaacggcgataacggttccgaagaacttcagcttcagcaggaaaacggtaatgtagaaaacgtcgcagagccggataataataaagctgatgaaggcgcaggtcaggcaccggctgattttacagatgatgctaatgctgctggggatttttccgcaggagatgcttcagatggagaacttggaacttatcagactgtgactctggaagttgaggaaggacaggatatcacagcacccttgaacacactgtttcttgaactgaaagatcaggccacagatgaaaatccctgcaagatcataattccaccgggaaattatgaactgacaggtacactttgcatgtacagtaatatgtacttatatgcaagagacgctaatattacaaaaacgtctaccaccaaacatctgattctccgtcttggaaataccaaagattcagaaggcggatatgatggatatcgcaacattgtgatcgatggaggaacctgggactacaattatcagtgtgtggaaaataaggatgcaccaggcggatttgtgggattttgcattggccatgctacgaatgttacgattaaaaatgctacatttcttaataatctgaaatctcattttctggaatttggcggagtgaaaaatgccaagatcacaggctgtacattcagtggctattataagaattatgtggaaggcggacaggaatgtattcagatcgactgctgtacagatgagagcaatgtttttccgcagtacagaccttatgatggaacgacctgtgaagattttgtgatcgatggaaatgtgttcgaagatgtctttacagggctgggaacgcacagtatgatgtccggaaaaacatataaaaggatcacagttacgaataatactttccataatgtaaaaaaacgctgtataaggtttatgaattatgaagattctacagcagaaaataataccatggtaaatgtgggaaatggagtggacatttcttctgtgagcagcaatacacaccagacgccaggctatgatgatgggccggacatgctgaaaaacaggaatcttcgtgtggcaggaaactacatcagtcttgccagaactaccagcattggtggaattgcatggatctgcagtggtataaaagtttcaggctataatatgaaaaaagatggagctgtgctccctaaaaagatatatccggtgaaaggtgtgactgtagaagataatcagatcagcggatatggaaacggaatcagcatgtctcttactgacacagataccgtaacagataatcaggtaacaatgaaaaaaacttcttcatattccaattttgggatttatgcccaggattccagaggaagcgttatcagcaggaatacagtgtccggaactgcaaatacgggaatttatctctccggttctgtctatgcagcaggatcagaacagagaaatcttgtagagcagaatactgtttccagagcaggcggagatggaatttatctgcaatctgtaaatacttcatccactgcacagaagaatactgttaaatcagtggccggctcgggaatacgtgtaaatgcaggaaagaacaataatgttcttggtaatatctgtttatccaacaaaaatcatggcgtgaaaattgagtatgtggccggcggagtcagggtaaaaagcaatcgtgtgacatcaaatgcaaaaagtggtattttgctctggaaatcaaaagtatccgaagtatcaggaaaccgtgcggagaaaaatagggggaatggtgtttatgcatatgcatctgtaataccggtcatgaaaaagaatacattttgtgaaaacggaaaggttcaggcggtatatgtaaaaagctgcaaaggatggaccggcatcaaccgtccttcatgcagagctgttacatcaagaagtacagctataagcggaactacatcaggcagccagacagttattgcatatgtgcagcgttccggaaaacagacaaagctgggtgtatcatccgtaaacaaaaagaaacagtacgttattaaaataaagaagcaaaaaaagaatactgctctgaaacttgtctcaaaagataaatacggaaatacagtaacagtaaatactattgtgaagtaagtatgtgtgataaaaaaagattctgttccggatatccatacatcgtatgtatagaaggaacagaatcttttttttgaaaaatgtaaaaaaatcaaaaaaagtgcttgacacactttttttcttatgttaaagtggaggatgctatattatggctagatatgcctgcctaaaggtcaggcgggatcatgttgtaataaataataaaaaaacaggggtgaaacgtcaatggaaaaaaacagaattcgttctgtaaaaactggaaaaagcatgcgtatgagctaccagagacaaaaagaagtcctggaaatgccaaacctgatcgaagttcagaaagattcctaccagtggtttcttgacgaaggtttaaaagaagtatttgatgatatttctccgatcgcagattacggcggaaagctcagtctggaattcatcgatttcacatacgatgaaaaagatgcaaaatattccatcgagcagtgtaaagaacgtgacgtgacttatgccgcacctttgaaggttcgagtaaggctgatcaataaggaaacagaagagatcaacgaacacgagattttcatgggagatttaccgctgatgacagctacgggtacctttgttatcaatggtgctgagcgtgttattgtcagccagttagtacgttcccctggaatctactacgcgatcgctcatgataagcttggtaagagactgttttccagtactgtaattccgaacagaggtgcatggctggagtacgagacagattcaaatgatgtattttatgtacgtgtagacagaacaagaaaggttccgatcactgttctgatccgtgcactgggcattggaaccaatgctgagatcatcgatctgtttggtgaagagccaaagatccttgccagctttacaaaggatacctccacaaactatcaggaaggtctccttgagctgtataagaagatccgtccgggcgagccgcttgcagtagagagcgcagagagcctgatcatggcaatgttcttcgatccgagaagatatgaccttgccaaagtcggacgttataaatttaataagaagcttcatttcaataaacgtatcgtaggccacaagctttctcaggatgttgtagatacaacaacaggtgagatccttgctgaggctgagacacttgttacaaaagagcttgctgatacattacagaattccgcagttccgtacgtatggatccagggtgaggagagagagatcaaagtcctttccagccttatggttgatatccgtcactatctgccggagcttgaggatccgaagtccctgggtgttacagaattagtatactacccagtgctcgaaaaaattctggaagaaaatgacacatttgaggacagatgtgatgcgatcaaacgtgatatccacgacctgatcccgaaacacatcaccaaggaagatatccttgcgtccattaactacaatatgcatctggagtatggccttggtaacgatgatgatatcgaccacctgggcaaccgtcgtatccgtgctgtcggtgagctgcttcagaatcagtaccgcatcggtctttccagacttgagcgtgtggtacgtgagagaatgacaacacaggacacagagagtatttctccgcagtccctgatcaatatcaaacctgtaactgcagcagtaaaagagttcttcggatcatcccagctgtcacagttcatggatcagaacaacccgcttggagagctgactcacaagagaagactttccgcactgggacctggcggtctgtcacgagacagagccggattcgaggttcgagacgtacattattcccactatggaagaatgtgcccgatcgagacccctgagggaccgaacatcggtcttatcaactcccttgcatcctatgcaaggatcaatcagtacggcttcgtagaggctccgtacagaaagatcgacaaaacagatccttccaacccgcgtgtaaccgatgaggttgtatacatgacagcggatgaggaagataattaccatgtagcacaggcgaatgagccgctggatgaagagggacacttcattcataagaacgtttccggtcgttaccgcgaggagacacaggagtacgagcagcacatgttcgattacatggatgtatctccgcgaatggtattctccgttgctacagccctgatcccgttcctgcagaacgatgatgcgaaccgtgcgctgatgggatccaacatgcagcgtcaggccgttccgcttcttacaacagaggctccggttgttggtacaggtatggagaccaagacagctgttgactccggtgtatgcgttgttgcaagaaaagcaggtacagtacttcgttccacatctacagatatctctatcaagaatgatgacggaacaaaagatgattatcatctgactaaattcatgcgaagcaaccagagcaactgctacaaccagagaccgatcgtgttccagggtgagcatgttgaggcaggacaggttatcgcggatggcccgtctacatccaatggtgagcttgcacttggtaagaacccgctgatcggatttatgacctgggaaggttataactacgaggatgccgttctgcttagcgagagactggtacagaatgatgtttatacatctgtccatattgaggaatatgaggcagaatcccgtgataccaagctgggaccggaagagatcacacgtgacgttccaggtgtcggcgatgacgctctgaaggatctggatgagcgcggtatcatccgtatcggtgctgaggtacgtgccggtgatatccttgtcggtaaggttactcctaagggagagactgagcttactgctgaggagcgtctccttcgtgctatcttcggtgagaaggcaagagaggtacgtgatacttcccttaaggtaccgcacggtgagtatggtattatcgtagatgccaaggtatttacaagagagaacggcgatgagctgagccctggagtaaatcaggcagtacgtatttatattgcacagaagagaaagatctccgttggtgataagatggctggtcgtcatggtaacaagggtgtcgtttcccgtgtacttccggttgaggatatgccattccttccaaacggacgtcctcttgatatcgtactgaatcctctgggtgtaccttcccgaatgaacatcggacaggtcctggagatccacttgagccttgctgccaaagcacttggcttcaatattgcaacacctgtattcgatggcgcaaacgaggttgatatccaggatactctggagcttgccaacgattacgttaatacggaagactttgaggaattccgtgagaaatataaagacatccttgcaccggatgttatgcagtatctcgatgagaataaagctcacagagcactctggaagggcgttccgatctccagagacggtaaggtaagacttcgtgacggacgaacaggcgagtacttcgacagccctgtaactatcggtcacatgcactacctgaagctgcatcatctggtagatgataagatccatgcacgttccacaggtccatactccctggtaacacagcagcctctgggtggtaaagctcagttcggtggacagcgtttcggagagatggaggtttgggcactggaggcatatggtgcttcctacacactgcaggagatcctgacagtgaagtctgatgatgtgatcggacgtgttaagacctatgaagcgatcatcaaaggtgacaacattcctgagccaggtattcctgagtcctttaaggtacttcttaaagagcttcagtctcttggtctggatgtacgtgtgctcagcgaggacggatcagaggtacacattatggaaacctctgattacggagatactgatcttcgtcatgtcatcgagggcgattccagaggacgcagagatgaggagtccttcggtaaacacggctacaccaagcaggagttcagcggagaagagcttgtcaatgtagaagaagatgaggacatggaagacgaagatgatatgatcgagtttgaagagtcctttgatgatgaggaataagaaaggggaaagaatacatggcagaaacaaccaacgccaatgaaacatatcagccaatgactttcgatgccatcaagatcggactggcgtcccctgagaagatcagagagtggtcacacggtgaggttttaaaacctgaaacgatcaactacagaaccttgaagcctgagaaggatggtcttttctgtgaaagaattttcggaccgagcaaggactgggagtgccactgtggaaagtacaaaaaaattcgctataaaggcgttgtctgcgacagatgcggtgttgaagtaaccaaatctgccgttcgtagagagcgtatgggacacatcgagcttgcagctccggtgtctcatatctggtactttaaaggaattccgtcccgtatgggtctgatccttgatatttctccgagaacactggagaaagtgctttactttgctaactatatcgttctggatcctgcagattccggacttatgtacaaacaggtactcaccgagcgtgagtaccaggaagcacgtgagtcttacggagaaggattccgtgtaggtatgggtgccgagtccatcatggagctccttcaggctatcgatcttgaaaaggattccgaagaactgaaggcagaacttgtggacgcaacaggccagaaacgtgcaaggatcatcaaacgtcttgaggttgtggagtccttccgtgagtccggcaaccgtcctgagtggatgatcatgaccgttatcccggttatcccgccggatcttcgtcctatggtacagctggacggaggacgttttgcaacatctgacctgaatgatctttacagaagaatcatcaacagaaacaaccgtctgaaaagacttctggagcttggtgctccggatatcattgtccgcaacgagaagcgtatgctgcaggaggctgtagatgccctgatcgataacggacgccgtggacgtcctgtaacaggccctggaaacagagctctgaaatccctttccgatatgctgaagggtaaatccggacgtttccgtcagaaccttctcggtaaacgagttgactattccggacgttctgtaatcgtcgtaggacctgaactgaagatctatcagtgtggtcttccgaaggagatggctatcgagctgttcaaacctttcgttatgaaagagcttgttgccaacggaacttcccacaacatcaaaaatgccaagaaaatggtagagaagcttgagccggcagtatgggatgtccttgaggacgtcattaaggagcatccggttatgctgaaccgtgcacctacactgcatcgtctgggtatccaggcattcgagccgatccttgtagaaggtaaggcgatcaagcttcatccgcttgtttgtaccgcgttcaacgcagacttcgatggtgaccagatggccgtgcatcttccgctttcccaggaagcacaggcagagtgccgtttccttctgttatcaccgaacaaccttctgaaaccgtcagatggtggtcctgtagccgttccttcacaggatatggtccttggtatctactacctgacacaggaaagacctggaaacaagggtgagggcaagttctttaagagtgtcaacgaggcaattcttgcatatgagaacaaggtcatcacactccagaccaagatcattgtacgttgccataagacaatgccggatggcactgtgttaagcggcaatgttcagtccacactgggacgtttcctgttcaacgagatccttccgcaggaccttggatttgtggacagaagcgtacctggaaacgaactgcttcttgaggttgatttccttgtaggtaagaaacagctgaagcagatccttgaaaaggttatcaatactcacggtgcaacaaagacagccgaggtacttgactccgttaaggctatgggttacaaatactccacacgtgcagccatgaccgtatccatttccgatatgaccgtgccgccgcagaagccggagatgatcaagcaggctcaggatactgttgaccgtatcacaaagaactacaaacgtggtcttatcacagaggaagagcgttacaaagaggttgttgatacctggaagaagaccgatgatgagcttacaaaggcacttcttacaggtcttgataagtacaacaacatcttcatgatggctgactccggagcccgtggttccgataagcagatcaaacagcttgccggaatgcgaggactgatggctgatacaaccggtcataccattgagctcccgatcaagtcaaacttccgtgaaggtcttgacgtactggagtacttcatgtccgctcatggagctcgtaaaggtctttctgataccgctcttcgtacagccgattccggatacctgacaagacgacttgttgacgtatcccaggatctgatcgttcgtgaggcggactgctgtgagaacagagcagagatctccggtatggtcgttcgtggattcatggacggaaaagaagagatcgagagccttcaggagcgtatcacaggacgtttctcctgtgagacagttaagaataaagatggagaaatccttgttaaagcaaaccacatgatcacaccgaagcgtgcagcccgtatcatgaaagagggcgtaagcaaccagacaggcggaccgatcgacaaactgaagatccgtaccatcctttcctgtaagtgcaaggttggtgtctgcgcaaaatgttatggtgcgaacatggctaccggtgagccggtacaggttggtgagtctgttggtatcatcgcagcacagtctatcggtgagccaggtacacagctgaccatgcgtactttccataccggtggtgttgccggtggagatatcacacagggtcttcctcgtgtcgaggagctttttgaggcaagaaagccgaaaggtcttgcgatcatcacagagatcccaggtgttgccacgatcaacgacactaagaagaaacgtgagatcatcgtaaacgatccggagacaggcgattccaagacttacctgatcccatacggttctcgtatcaaagtccttgatggacaggttcttgaggccggcgatgagctgacagaaggtagtgtaaatccgcatgatatcctgagaatcaagggtgtgcgtgcagttcaggattacatgatccgtgaggttcagcgtgtatatcgtctgcagggtgttgagatcaacgataagcatatcgaggttatcgttcatcagatgctgaagaagatccgtatcgaggataacggagatacagagttcctgccaggaacacttgttgatgtccttgatgttgaggaagttaacgagaaacttgaggcagagggcaaacagccggcagagggcaaacaggttatgcttggtattaccaaagcatcccttgctacaaactccttcctgtcagcagcatccttccaggaaacaacaaaagtcctgacagaggctgctatcaaaggtaagatcgatccgctgatcggtctgaaagagaacgttatcatcggtaagctgattcctgcaggtacaggtatgaagcgttacagtgagatcagtcttgacacaggaatgccggaggtaaaaacagcttccgaggagcctgaggatacagaggaaatttccgtagaggaagagaagactgagactgctccggaggaagagaccattgctgttgaagagacagcagaggaaactgcaccggtagaagaataagtcgatataccttgctaatataaataaatctccccccggaaatccggagggagatttctgtttataagcagggagtttctgagagaggagggattgcgatggataaggaactgccaatttccccgtggccggaatggaagatcgtaagcaagatcggggaaggctcttttggaagagtgtataaagctcagagaactgagaagggacgttctttttactcggcaattaagataatcacaatccccgccagtaaaggggagctggacagtgtgcgctcagaatccggtgatgaaaaatctgtccgcggttattttgaaaatctggtggaggagtgcattcaggaagtaagcaccatggagtatttccggggaaattcccatattgtatctgtagaagattacaaggtgatggaatatctggacgagatcggatgggatatttttatccgcatggaatatctcacaagcttcatggaatattatgcgggaaaaaatctcacagaaaaagaagtgatgaagctgggtatcgatctttgcagatcactggaatactgtgggcagcttcacatcatccacagggatatcaaacctgagaatatttttgtatccaggttcggggatttcaagctgggggactttggaatcgccagagaactggaaaaaaccatgagtaccctttccaaaaagggaacttattcctatatggcgccggagatgtacaggggagaacagtacgacagcagagtggacatttatgcacttggtttggtgttatataaactgatgaatcataacaggcttccgtttctgaatcttgaaaaacagctgatcacatacagagataaggaaaacgcacttacgaggaggatgtcaggcgaaacaccgccaccacctgtggatgcaggagaggctttcggctccgttatcttaaaagcctgtgcttatgatgcaaaagaacgatatcagactcctgagaagtttcgggaagcactggaagaaatccggtatggagcggcaaacagagaacagggagttcatgagaaaccgaaaccagtggaggaaagacctgttccggagtccatgccgaagtttctccaggagggtgcagccagacagctggcaagaacgagtcagctgaatacggatgcgatccgtcaggcacgtaaaaatcctgtgccggtatccatacagccggagaaaccgacagccggagaaatagcaaaaaatgcagcccggaatacgccaaaggctcagagcacaatacagaagcctcagaaatctgcatccggaaaaacagcatccgaaaaggatagcctgtccggttatccgtcaggacgttcccgtcagtcagatcccggtataagaaaaaccggagctgtaaagcccagagttacctctatcacagatctggaagacgaccgtgaccagaatctccaggagtgggaaggatccgtaccagagaatgacggaaatgacgatgacagaaggaaacggaaaggtattttcagaatgcttataacagccgggatccttgttgtgttgatcggcgggatccttgcggtacgaacgatacggaaacctgtggataacggggaaccttcgtatacagattccgatgattctgatgctctgaacaaaggaaatttcggtactgcagacaattcggataaaagtttcgcacaggcaatggaaacgatacgtgaccatgcgacaaccatagaaaatgctctggacagctatagacgtgaaggtacagagggggatcgcctgcgcttttataatggatcaggagagatcgccaaagtacttgtatatcccggcagttccgcagatggcgtttatgaggaatatttttactggggcgagcagatgttttatacttatgtatgggacggagatgagaagcagtatttttattatcaggacggccttctgatccgatggatcgatgcagatggtaaggttcatgataaagagagcgataacgacaaatatgtagaactgggagacaaatactggagtaattctgtagtagagcttcagcagtaatgtcggagggtttttacgaaaggaaaaagaatggcctatcagattgattatgcgtatacatgtcacaccggaaaggtgaggacaaataatgaggataatttctggtgctgcggagtgcgcctgccggtgcacaaccagggggttgacggaatcctggcaggtcatacacagcactggcagcttccaatgctggctgtttttgacggcatgggcggagaaagctgcggtgaaatggcagcttctgcagctgtggaagcgctgggaggcttctatgaagaaaacaaaaagaccctgaaaaaagagcctgtggtttttctgacaggagcctgcgaaaatatgaatgaggcagtatgtcgctacagcaatgaaaaccgtatcagaagcatgggaacaaccatggcacttttgtctttcagcgaaaaggcaatctatgcctgcaaccttggggatagccgtatctaccgtcattttcaggggaagttccagcagatttccacggaccatgtgatcggcggaaaaatgctgggaaaagctccgctgacgcagtatctgggctttcaggaagaaaacatggcactggagccttctatcgtggagatcggttatcagccgggaagctcgtatctgatctgttcagatggagtgacagacatgctttctgatcaggagcttcagaagatccttgacgggacagagaccgcagaagaaaaagtaggtaagatcctggaacaggcattggaaagaggcggcagagataatgtgacactggtccttgcacagatcagcggctatgaagaaaaaaatattctcaaacgctgggcagagcgccacagtaccggacggtaataaacccggggagtaagaaaagggataaggagaaaatttgcgatgagaaatcgaatgcaggatcttgattttgaacagacagttgccttcgattcagtgaaggactttgaatttacaagaaaggcggcacagaagttccgccaggttgttagtctggattcctttgaggatgaggatgcagatgttatttttcattatctttacaaggagatggaactggtttcctttggtgactatctgaaacgatatgtgtatgagcgtgcagagcttgaggagcctttttcccaagtacctcaggaagtctacagagagatcgttgtggaatccttcaaggaaacctacacaccgaaatccatgtcacctacatcagccaagctgagttctctggtgaataactggctgactcaggcatctgtgaagcgtgaaacagtttttctgctggggttcggacttcggatgagtacagaggatgtttcagattttctgacccgagtgcttcgtgagcaggattttgatttccataatccggaagaagtgatctactggtattgttaccggaatcatcttggctattataaagcggaggaatataaagaaacctacaaacagatgactccggtggaaaaaaagaccggagagatcgtgtatggcacagggctttgtctggacagtgaggaaaaacttttggaatatctggcttttctgaaaggaagacatgatgatccgaaatcagagaagagccaggcttttcaggaatttatgatccttctggagcgggcaaagaagatcattgcagccatgtatcaggaagatgaggaagaaaacggtggcaaaaagatctggaagcctgagaatatcagtgcttcggatctggaaaaggttatctgcagcgggatccccattaataaaatgggaaatctcaaaaagatgtccgcatccattctggcaaagcatttcagccagaagcgcttcagccgccagagaatcaacaatatcctgaaccataaatttccggtggagcggtttgatctgatcacgctggagttttttgtgatctctcaggagatggcagaggatgatccgtatacgagataccgccatttcctggaggagatccaggagatcctggcccgctgcgaaatgagtgagatctacatagtgaatccatatgagtgctttcttctgatgtgcctgctgacagactgtccgctggcagtattttccgagatttgggaaaaatcctatgaagagggagaagaaaagaactgaaaaaaggatgatgcgtttcggtgacgcatcatcctttttttgtccgatccggtaagtctgttattttgcttttccggtttttaccgcacttgcaggtccggtctttaccttcttgtttactgtgcggtatggaaccagtctgtagctatatgtaacattttttgctgtcttaaatgtatagctggtatttttggaagaaatagtttttacttttttgaaggaactatttccttttttctgatagatgacatagccggttgctccggaaatctttttccaggaaagggtctgttttcctttgagggttttaagctttatggacggacggagcagattcggtttcacagtcactgctttggaaactggactgtaaatataaccggaggatgtttttttgcttgcacggatcacgtaagaatatttatttccgatagtgatctttgtgtctttgtatgaagtagtatttgcgtttaaagttttgatctttgcgtattttccggaatttgtttttctgtagagaatatagttccgggcattgtttatatggttccagcggagcgtacagctgttccaggaggcagaggccttaattgacggtgcagttaatttcgtgatcacaggagccggagtgccagatggcattggagccgggggagtagatggcttcggagttggagtgctcgttggtgccggagcggatattttaaaggtcagggactgacttgaaaaataattgttgattcctgtaaccgttacggagccagtgccggttttggcgttatctttccaggtaaggatataatccgtgccttcctgaagcgtgtccgagccgtattttacagtaggcttcggagttactgcattgccgttgaagatctgttccggaatatccgaaagatcgcaaagctttacagatgtcatatgccttgaaccggaataattctgcttataggaaagtgaaaaatccaggatttcattgctggaggaacaatatacagaagtaatgcgaaaatcatcagaggtcagttgtgtgccattataggtgatgaccaggttatttcgcagataagaggttacactttcacttttgcagtttggatctgccagttggatggtctcaccggagagcttcagtggattgatggtgaaatatttggaaaaaccgcttctgtaaatgccgataccggttatatggacacgaggtctgttggttctggaacttgccatggtgttatcataataagaaagggtataatcaacatctttctttaaagtaacaccatttaatgtgaccgttggctccggcttgaattctttgccaggagcatattcataatccgggatatcaccaatctcagcttccgtgatcggggtaaggtcgatgtagaaatatttattattttcaccggtgaaatttcccttaccggaaacagtaacataagcgtttccctgctgggcattgttatgccaggagagtgtataatctacattttctgtcagggttataccattccaggtgacagtgggcttcggagtcagtgcggttccggtatacagataggaggactgggaaaaagttacttctgactgggagagattgatctgccggataaggaaatcatcagtcagagttccggaataaaagccaagtcctgtgattgagaagcttcccagaccgctgttacgattattggagaaagaaatcgtataatcttttccctcagtcagcgtacgaccatggaattttagttcaggggaaaaagtaatgggacttccggtatagttccaggaacttgtatagcgcagagaagtctctctggaattttccagatcatagtatgcattgagatctgcagacagtgttttgtccgggcaggatttcagtgtggcagaaaccgtagtggttcctctgcttttcagtcggataacaccgctctgatccacagtggcaatggaaggatctccggttgaccatgtgaaagaagctgggtcaaggctggaactcatatagctgaatccattacaggttatatagatagccagtgttttctgttcttctgtgaatgtgatcggagaagcttcgttgaaatggatatttatcagctttggaagcacggaaataacaggtgacacagtctgattggcaggctgtgtgcaggcttctgttgcgtgagaagaaaagcactggatccagtagagatgaccgttctgtgagtagcagccgattccggcagaaacatttttggaattcatgatgttcgtgtaatgtccggaagattcgatccatgattccataacttcttcaggagttccctggttgatcgcaagattttcacttggatcctcaaaataaggaaaggctgaaaaacagatggaaccattgggacgggtatgactggcgcaaacggtcagttcttctgctctggtcatggcgcattccagaaggttcttatccatagtgacaggattccggttctttttggcacgttcctgatttaccagatcaaggacctggtaagcataatcatagcggcggataccctgactgagtttcagctggacagcagtctggtcagaggcagcctgcacacggacaatgttgcccggcgccagcagaagaagcagaagcagtagcgcaggccataataagtatcttgtttttttctcttttgtctgattcatgatgttttccttaccaatataatataaagatattttcttttgttattcgttatagtatccatagatcgcacggctgtcctgtgcgatggtgttctgtgcagcagaggtatcgttaagatcctgtgacataaagcagactaccaggtcgatcccctttgctgtgtcatagatgatgccggcatcgttttctacgtgatccagttcaccggttttgttggcaacctttacctcggaaggcatctgagccgggatcttgtttttcctggtctgcattttcagaagacgatacatatattcggctcctgccagagtatcgttgttatcggtagcagtacctttgtcgatctgatagatggtcttcagaaattttccacaatcctttgcggaagtgtagttatccccattggaattatctgcaagaagaagacgtcccatggaagtgctggtgtatccgtgatcctggcagaatttattcacacgggccattccggctgcgtcatccccgccgccaagataattgacaagtgtattggctgcatcgttgtcgctgactgtgatcatggagttcagtgcattgtccagctgatccttgctgtatttggaggaaagactgtcataatcctcatatacagcacccatgatatagagcttgatcaggctggcagcctgcatctgctgatcgttgatggtaccttcggtattttttgcaagattgcatacatatacggaccaggttccgttatcggtgggaagaagagactgtacctgattcagaaggttgtccatgctggaatccgagttgtctgtgaaagtgcttccgctggatggagaaagagttccttcttcctgagtggaagaagaactgtccttgctgccagaagcttcggaagaatcggaggctgcagatgtatctgtggattcttcctgtgcggaaggaccctggacctcagctgaagatgctgcggcagcagcgctggaaacggtaggatcatcaggataaagagcatccagctgagcggctttgctgctgagctcagcggcagaatcagaaacctcctgcacacttttctgcagcttgttaacttttgcctggagagatgcaagcttgtccagggagcggacattcagtgccccaagtcctgccagtgcgatgacaagcactgcgatcacaatatatagaaatgtattttttttcatatataaacaaactcctttttattattggaaataagcatcgattccattggcgatcccttctgccatagtctgctggaaggaggaatccgccattttcagatcatcgctctggttggtcataaatcccatttccacaatcgtcaccgggatcgtgctccagttaatacctgtcatggaatctgtgtagatgatcccgcggttctggaagccggtagctgcgcagtaggaatccacaatgcatttggatagtttgttggaactgtcatagagactggaaacataaggattctgctgggatggacacatggtcagagcaccggagacatctgcagaatcatctccgtttgcatggatacggacacagatctccgcaccctgggaagcgaccagctctgcacgctccttgttgctgatagcggtatcattgtctgttcttgtcattactacctggtatccacgttgttccaggatatccttaagcagaagagaaacatccaggttcagctgatactccgggagaccgctgaaggaacctctggttccggtggaagccttggccttcatggtggaggaaccggggccgttcggctctgtggcactcatatcaacattttcgccctgatgtccgggatcgattccgacgatatggccgttgttggaagcagaagaggtatcattaccgccatcggtgaatccctcaccaccggcttcattgaaaacagagggtttggtcgttttctgactgttttcagcttccggtgcccgttcatgttcaccggtgttgtttttgacagctttttctgtctgtgcccgctgctgcaggtatttgtcggttgcctgtttcttttcgatcttagctgtataaagttcgatatcctctttcatggatttctgctttttctggaccggtttgatcacggaggccattttctggtcaacggcatcgatcttccggtaggttttatagctgagtccaaaaagtaatccaatacagataagacccgtcagaaacaggacgatcgccatcagatgaggctttttttccataaaaatacgtcctttcttggtgggtgtttgcatttgtaaatattataaataaggagataggaaaaagcaattgtgaaattgggcttgacaacaggggaaaatatgatactatatatgtaaaataattatatataaaaattttatatataaaataattacataaagaggtgagcgtatgtattactatccggtatcagctgtgctgacagaatgtctgatcctttctgttgtggaacagcaggattcctacggatatgagatcagccagactgtaaagatggttgcatccatcaaggagtctaccctgtatcccatcctgcggaagctggagacaggtggttatcttacaacgtattcccaagagttccagggcaggaagcgaaagtattattccatcacagaagccgggcgtgatcagctggaatatctgaggaaagagtggagagaataccgcgatactatagacgatattgtggaagggagacttcgaaaatgacaagaaaagagtatatggagcagctgaagaaatatctgaagcggcttccaaaagaagattatgacaatgccattgagtatttttcggaatacttcgatgaggctggacctgagaatgaacagcaggttatggaagaactgggacagcctaaagaggcggcaagggaactgcttctgaaccttttacaggagagtgttggtgacagtaaagacatcaccgaggaaaaaacaacagctttgccggcagcaggttcatattacggagatagctcccatgcacatagccggatagattcaggaaacctgagtacaacagggtacagtacatccgcaggaaagaagcgttcccccggaaagatcattcttctcgcatttctggtgatctgtgcatcgccggtgagcattgcactgctgtttgcaggccttgcagtactggcagcagtggtgcttgtcatcgcagcagtgatcttttccatggcagttacaggtgtgtcagcaatagccggaggcatcgtgcttacaggctttggagtgacattgatcgcgagatccctggcagcagcctgcatgatggtcggcagtggatttctgatggcaggtgcgggaatcctcgttggagtacttaccatatatatatgtaaatggtgtgcaatgggaatcggccgtctggttaacagacttgcaagaaagaaggtgcataaaaatgaataagattgcaaaaacagtgctgatgacaggtacagcactctgtgcagcgggagttgttctttccacagcaggatattttgcagggggaaaagatttcacatatacttcagatcatatgtatgtatccggaggaaattcttccagtcgtaaaaatcttacagtaatgaaaaaagaacagattgatgattttacgaagctgaatgtggattttgaggattttgatctggatatccgtacctcagatgatgaccattattatatggaatataagcttgagaaaaacgggaggaaaaatcctctgacctggaaggataaggatggagagctcacgcttgaggagtctgcaggcggcagtggaagttattatataacctatgatctggggatattctctacacatgcggatctgacagaaaagaaagatgcattgaatacggtggttctttatattccggagaaggcacagctttccgaagcggagcttcagctttccgacggggatcttgctgccgatcagcttttgtgtaaagaaatgaccctggaacttctcaatggagatctgatgctggataagggcgagttcgaaaagtttgatgcaaagctttccgacggggatctgaatgtaaaagaacttcaatgtacagataacatgcagctgaaatccggaaacggagatgtgaccataaaaaaggcagagcttgcagatgggcagatagctctcagcgacggagatattcagatagacaacagcagctttaacggagatatgaagatcaatagctcctgcggtgatgtttctgtagaaatgaagaatggcagtgcagagaaaaccaatatttatctgaaagctacagacggagatgtggacacggaggggctttccaggggaaaaaccgacaatgaggaagacacctctgtttatgagaacaaggccggtgcttcagcaccgactttaaatgtggaatgcagcgatggggatattacattaacagaatctgaaaaataaagaatatgaatatccgcctgactatgcatctgcttgtaaaaatcctaaaaaagaataaatgaaattatatgaagcgcaggggtttttccggagaaaaattcctgcgttttttggctgaaatgtattgacaaatccctgtactatgatataattcaatcaaatcacagaaaacatatatagttactaggaaataaggaaatggacataaaggaaataaggaggatatcatcatgggtaaaatttacggaagcgcactggaactgatcggaaacacaccgcttgtagaggttaagaacgtagagaaatctgagggacttgaggctacagtacttgccaagcttgagtattttaacccggcaggaagcgttaaggacagaatcggtaaggcaatgatcgaggatgcagagcagaaaggtatcctgaaaccaggcgcaaccattatcgagccaacatccggcaatacaggaatcggacttgcagccatcgcagctgccaagggctataagacgatcctcaccatgccggagaccatgagtgttgagagaagaaacatcctgaaggcatatggtgcagaggtagttctcacagacggagccaagggaatgaagggtgccattgccaaggcagaagagctcgccaaggagattccgggaagcttcatccccggacagtttgagaacccggctaacccgaaggcacatgcagcaacaacaggtcctgagatttggaaggacacagacggaaaggtagatatcttcgtagcaggtgtcggcacaggcggaacgatcaccggtacaggtgagtacctgaagagccagaacccgaatgtgaaggtagttgctgttgagcctgcaacttctcctgtactttctgagggaaaagcaggcccgcataagatccagggtatcggcgcaggttttgttccggacacacttgacaccaaggtttatgacgagatcatccctgtagagaacgaggatgcatttgaaacatccaaactccttaccaagaaagagggaatccttacaggaatttcctccggtgcagctctctatgctgcgatccagcttgcaaaacgcccggagaacaaggggaaagtgatcgtagcacttcttccggacagtggagaccgttactactccacaccactgtttacaaaataatcgctccgaagaccgcttcttttgccccgaagcgagattctgcgggattatttgcggcgctcctgaatgcctgtccaagcaggctgccggagcgccggttttattcttgatttcatcgaattaagtaagccctctgtggggctgtggttattgttcactggtaaggtcccgcgaaaagcaataagcagtgtgtggggacttgcttgtatcttgtagctttttcaggtataatagagaaaacaaacaaaacctattaacaatataaagaataaagtctgcaaagcagattctgcttcctatgaaagaagatacaggaagctgcctgtgcatcacagagaagggtgccggtcatggaatacagaggaatatttccggccgaacagctgcacaataacagaaagagcgaaaggctataaatcagaagaatactgaaatattggaggtaaatattacatgaggatttctacaagaggaagatatgcgctgagactgatgttggatcttgctacaaattatacaggaaaaccgatccgcctgaaggatgtggcgaagcgccaggagatctcagataaatatctggagcagatcatatccatcctgaacaaagcaggctttgtccgcagtgtccgtggccctcagggcggctatgcactgcagcagaccccggataaatacacggtcggaatgatccttcgtctcacagaaggaagcctttcccctgtggaatgtctggacgacaacggagccttctgtgaacgtgaggagaactgtgtcacccagatcctctggaaaaagctggacgatgctatcaaaggtgtggtggatcatataacactggaagacctgatgaactggcaatccgtgaaggcggacgaatatatcatataaaaaaagctgcgcaagcagctttttttatatcacatttttttactaacattttacaaaaccgcgattttatattttaccttccatttctataataacacctgtatttaagcagtaagcaagtaaaaatgatcatagaaatgaggagaaaaaaatcatgaaaaaaagaatcgcaggtatcttaacagcagcacttatcggaactacagtaatgggaaccgttgtaatggcagcaccgtccggagcgatcgacgtaatttcccgtgaggacggatccggaacacgtggagcattcgtagagctgtttgggattgaagaagaaaaagacggcgagaaagtagatatgacaacacaggaagcaagcatcacaaacaacacagatgtaatgcttaccacagtagcaggcgatgagaactctatcggatacgtatcccttggttccctcaacgatacagtaaaagcagtaaagatcgacggagcagaggcaacagcagagaacgttgcagatgatacatacaaggtagcacgtccgttcaacatcgtaacaggcgacaagctcagcgatgcagcacaggatttcatcaactacatcatgagctctgacggacaggacatcatcgaaaaagaaggctacatcaaagtagatgaaaaagcagaggcatacaaagccggagatgcaaaaggcaaagtcgtagttatgggatcttcttccgtaggacctgtaatggagaagcttgcagaggcatatcagaagacaaacaaaaacatcacagtagaagttcaggtcagcgactccacaacaggaatcaatagcgcaacagagggtgtatgtgatatcggaatggcatcccgtgagctgaaggacgaggaaacagagaaaggtgttaaagctacagagatcgcaaaagatggtatcgcagtcatcgtaaacaacgacaatgatcttgaggagctttcaagtgaccaggtaaaatccatcttcacaggtgacatcacagactgggaagacgtgaccaaataaatttccggataaaaaacgattgaagtatcttacaaagagcggcgatcatgacaaggtcaggaaagccgctccgttatatatcagcacagtggatatccactgggacagagagaaaggtgtcttatgaatcatttaggagaaaaggccatgaaggtcgtttttctcattgcggcctgtgcatcggttcttgcagtatttcttatttgtgtgttcctttttgcaaacggccttcctgcaatgggaaagatcggtcccttaaaattcctcttcggaacagaatggagaccaacaaacgataaattcggaatcctgccaatgatcgtggcaagtatttatgtaactgcaggagcaatccttatcggagttccgatcgcactttttacatccgtatttatggcaagatattgcccgaaaaaaatctataaaccactgaaatccggtattgagcttatggcaggcgttccatccatcgtatatggctattttggtctggttctcctgctaccgctgatccgccagctgttcggaggaaccggaagcagtatgctggcagcatgtatccttctgggaatcatgatccttccaaccatcatcggagttacggaatccgcagtacgaagcgttccggaaagctactatgaaggttcacttgcacttggcgcaacaaaagaaagaagcattttctttgttatgcttccggcagcaaagtcaggaatcctggcaggcattgtcctcgggatcggacgtgccatcggtgagaccatggccgtgatcatggtagctggaaaccagccacgtatgcccaagggacttcttcagggtgtccgtaccatgactgcaaacatcgtaacagagatgggatatgcatcaggacttcacagagaagcactgatcgcaacaggagttgtactctttgtatttatcttgatcatcaacttaagtctttcactgctgaacaggagggcggagcatgcaaactaatgtatcagtagccgcagatcctgcggtagaaacaaacatgaaaaaaaggaatacacttaccataggagatcagctgaagtcttatgcaagacatcctggcgcaggagtcctggcattcctcacattgctgggagcagtgatcacttttgcactgctgttcttcctgatcggctatgtgcttgtaaaaggtattccttatctgaatgcaagtctgttcagccttacctatacctcagagaatgtttcccttctcccgtcactgatcaataccctgatcatgacactggtatctctggcgattgccactccggtaggaatctttgcagcgatcttccttgtggaatatgcaaaaaaaggcagccgttttgtaaagctgatccgtattaccgcagagacactttccggtattccatctatcgtatatggtctgttcggtatgctgttctttgtaactgcactgcactggggcatgtctcttctttccggtgcgctgactatggtgatcatggtacttcccctgatcatgcgtaccgctgaggaagcgctgaaatccgttccggattcttaccgtgaggcaagcttcggacttggagcaggcaagctccgtactatttttactatcgtacttccctccgcagttcccggaatcctggcaggtgtgatcctggccatcggacgtgtggtaggtgagactgcagcacttctttatacctccggtactgttgcggcagttccaaacagcctgatgggttctggacgtaccctggcacttcacatgtatgtgctttccagtgagggacttcatgtaaaccaggcgtctgcaacagcagtagtcattctggcgtttgtacttgttatcaacggactgtccggtctgatagccagaaaaattgcgaaaggacaatgatcgatcatgagtgaaaatacaaaaatttcaattgataatatgaatctccattatggaagctttcatgccctgaagggaatcaatatggaaatcccggaaaaagagatcacagcatttatcggaccaagtggctgtggcaaatccacacttctgaaatccttaaaccgtatgaatgaccttgtggaaggttgtaccatcacaggaaaggtagagcttgacggggaagatatttacggagatatggatgtgaatcttttgcgtaaacgtgtgggtatggtattccagaagcccaatccgttcccaatgagcatttatgataacattgcatacggcccgaggactcacggtatccgttccaaggcgaagctggacgagatcgtggaaaaatctctccgtgatgcggcaatctgggatgaggtcaaggaccgcctgaaaaaaagtgctcttggaatgtcaggcggacagcagcagcgtctctgcattgctcgtgctctggcagtacagccggaggtgcttcttatggatgagcccacatctgccctggacccgatctccacttccaagatcgaggatctggcagtagagcttaaaaaggattacaccattgtcatggtcacacataacatgcagcaggcaacccgtatctccgacaagacagcatttttccttcttggtgaggttgtggaatttgcggatacagacaaactgttctccatgccggcagataagcgtacagaggattatattacaggaaggtttggttgatattatgtcagaacgttttgtaagacagctggaagagcttcacgtgggactgatcaccatgggaagtctctgtgaaaaagcaatttcactttctgccaaagctattcagggtgaaggcgggatgactctcattggcaagatctttgagacggaaaaagagatcgatgcacaggaaagagagatcgaaaatctctgcatgaagcttcttcttcatgagcatccggtagccggagatctgcgatccatttccgcagcgctgaagatgatctccgatatggaacgcatcggtgatcaggcagcagatattgcggatctttccaagcatatcgaggacaaagcagttaccggagatatcattaatatccggaagatggcagaggatactgtccggatggttacagaaagcatcgatgcctttgtaaagggtgatcttgagctttgcagaaaggttattgacgatgatgataaggtggacgatgccttcaatgatattaaggaaaagctggccgaggtcctgaataacggaaagccggatgcaagcatcggtctggatatccttatggctgcaaaatatttcgagcgtatcggtgatcacgctgtgaatattgcagagtgggtggaatattccatcacaggaaaacacagaagcggttccagccatacagataactattttgttgaggaatagaaataagtaagagcagattgcaaagagttgcattattgtaaaaaagtgctgtggtattgaaagaatatcacagcactttttctttaatatttatcaaacatattctgaacctgttcgatgtcattggtcacagttaagatcaatcttaacaatgtagctgctttctgaggagcaagatcatttcctcttgcaatatttccgataaagtaatcatcctgtgtaataacaccggaaccaattcgagaacaccgaactacaggaatgcctgtttctgccagctcatcaattttattgttccactgttcgctgtagcaaccggatcctgctccggcaatgacaatgccctgtacgccgctctctttgtaataatccagaatttcaggatctgcgtcaattgtgaaataggcaactcctactttaggaagttcctttaagctggatacatcaaattcggtttcggtggtatgacatttgacagaatcgttatagaaataaggtacaccatctaccatatatcccattccgccaaagtctttagagtcaaaagcatctgtctgacaggtgctgattttttgaacatcacgtcccccgtaaatgccatcagagaatactaccatgacaccttttcccttagcctgttcattggcagcgagagcgatagactggtaaagattcatggggccatctgcggaagtagctgtagaaggcctcatagcgccggtcataacaactggcttatctgttttcacggtaagattcagaaaataagagctttcatccagcgtatctgttccatgtgtgattacaaaaccgtcaatattttcatcctgagctaattcattgatcgtattggcaagggtgatccagttttcgtcggtgatatcatcggagcctacattacatacctgaataccacggacattggcaatatctgttactccggcagcactgtctacaagtgttcctacatctaactgtccagcggtatagttggtagctttcccggcagttcctgatccggcgatagtaccgcctgttgctaaaactgctacagtaggaagatcttctttttcattgttggaaacagttacggaaagaccactttttgtttcataaaaagaatattcatcgcttgtctgactgctattttcggatttttcttcctgttcttgtgcaaatatcatggttggtgttatggtgctgatcatagctgcggcagttatggctgccagaaatttgtatgacttcataagcgttaacctctttcatcgttagttttgagttgctatataaagattgtgcacagatctttatttttaatgtattaaaatgtatttaatacaattatgcgtaaaattatatggaatgtcaacaagtattgtatatttcggcataatataaaaaaatacaagaaagaaattgtataaaatacacatataagtatatttaacaagaaaacactgactgaaaataaaagatagtataggaaaaataattgacgcatgataataaatgtattagtatgtattattgataagctataaacaatcacaaaaagaggtaaaaatgaaaaaggcagtattatttgattttgatggtgtgatcgcagatacggaaatgaagacacttgcttatacagaggaactgttttttaagtacggtgcggttttgagtatggaagaaaaaatttcatatataggaacagatggaaaagaaccaacaagaaaattgctcgaaaaaaatggaatctgtaaaacagcagaggaatttctggaagaaagaaggacacttggtaatgtatatgaaaacagtcaggatctgaagcctatggaaggactggtagaatttctcgtctggctgaaaacggcagggtataaaattggcattgtatcatctaccagcaccagacttattgtaacggcgttaaatcggatgaagcttatgagctttccggaggttctgatctgcggtgatatggtaacaaagaaaaaacccagcccggaggggtacaggaaagcaatggagtatctggaagttatgccgaaagaaacggtgatcatagaggattctccttccggaatccgggcaggaaaagcagcaggagcttatgtgataggatataaaggagctgaagtacagcaagatactacaggagcagataccttgtggaatgattatgctctttttgaagaaaaatggaaaaagatatagtgagtatggatagctgttaggaaaaaatccccgggggtttcaaaattgcccctcccggggattttttgctgttgatcatgttggtatttagacgatcaatttgtatttatctccaatacacagctgcagacaaagctgtgtataggcagaagttgagtcatgtataatgctgtcgatccgaagaagcggataaccctttgtgattcccagtattttggcatctcttgaagaagcaaaggtaatgtcaatggttttggaagaatgatcaaagacaatattatgcttatttttcaaaagctcatataaagatgtattattcagattttcgctgaacaggaaacagaaggactctgggaatttattgatttccagaagcataggcttatcatccgcatagcgaatacgttctattactaaaattttttcggtttcatcaagtcccattaattctgcttcatgaggagttggatcttcaatggcaatttttatggtttttgctccgggttttttgttcatgcgctggcacattagagaaaagcttacaacagcaggagaaagagaacgctgcatttttttttctgcgataaaggttccttttcctgatttcttctccaggtatccctggctgtccagtgcagcaagagcttttcttacagtaacacgactgacatgatattgttcgcttagttcattttctgtcgggagtttactgccgggagtaagtgttccactggtgatcttgtctaggatcagttcttcaagttgtttataaagtggtgtggctatggcattatcaagttccatttaatgaaaactcctttccgataaataaaaaacagatattgtaatctgattttatagttaaatacttttttgtatatatatatgataatacatttaaaactgtttgtatatgcagatttgttctttttaagcaaaaaaagaaaaaaatattgaaaaataaaatacaaacttttatgattctaatatgacaatataatacagaaaatgaggtggatgatattgataaatgcatctatgggtgcatttataagtgcgaaaaagatatatttcgaaataaaatatgtattataatgtatttttattgtgcagatacaacaaaaacaagtagggaaaattgtaaaattaagcgaaaaaaacaaatgggattgacaaaggagctttgcagatatactattgtagtagatacaaagtaatacatatcgaacatgagatatgaaattacaattgtatgtactactaataaagatatgcgcatgatctttagatactatcaaaacaaatgaaaattgggaggtagagtttatgttttggatagaacttttgatcgtcctggcgattatttttgtgggtgttcgccttagtggaccgtttttagcatttgcaggtggaattggaatgctgattatgacatttggtcttcatgtaaaaccgtcagatccacctgtaactgtaattttaattatgatcgcagtaatctgtgcagccggaatgatgcagtcttgcggaggacttgattatcttgtaaagattgctgagaaaatccttcgtaaaaacccgaaaatggtaactgttctggcgccgatcgttgcttacattttcacttttatgtgcggaacaggacatattatttacagccttcttccggttatcaatgaaatttctattgaaacaggagttcgtccggaaagaccgatttccgcatctattatttcatcacagcaggcgatcacagcgtgtccgatttctgcagcaactgtcagtgtactggcatttcttgcagaatcacagtacacatctgtaaatattttcacattacttctggtatgtgttccggctactctgatcggtacagttgcagcagcattttctgttctgaaaaaaggtaaagaactgaaggacgatccggagtttcagagaagagttgcagctggtgagattgaagatcttgcaaaaaaggcattagagggaaacgaaaaagaaacaaaattccaggcaacaaaagaggcaaagatttccgtagcaatctttcttatcgcaatggttggaattgtattacttggtgcagtaaaatctcttgttccggtatttgcagatgaaacaagccttccgctgacatcagttattgagattttcatgctggttgcagcagcacttatggttcttcttacaaaaacagacagtaacaagcttctggatcagccagtatttcgtacaggtatgtttgcagtagttctggcctttggtctttgttggctggtaaatacattcatcgcagatcagtcttcctttattacagataatatgtctgcgctgacaaatcagcatccatggatctatattgttgcagtgtttattgtaggagctattacaaccagtcagtcatccactactatgatcatggttccgatcggaattgcacttggtcttccggtgaatattattgtagctggctggatcgcatgctcatccaactattttattcctgcttctggccagtgtgtagcagctattgcttttgattcagcaggtactacaaaaatcggtaaatttgtcctgaatcacagctacatgcttccgggtcttgtttgtaccgtagtttctgtagtagcagcaattgcacttggagcagtaattttctgatttaattgattggatagtcggagatttttataatcctgactttgtgtagtgttttcccttctttatgatccgactatccaatataagagaagtgttttcaaagcatcatagagaatataggaggaaaaaatgaaatttgcaccaatgaattatcattatttgagatatcctctgaagaaattcctggacaaggtagagcagtcagtatttaacagtattgatctgtattgtagtgcaccacagtttaacatatttgattattctcttttttcattacttgaattggaaaaggagatcaggagaagaaacctaagtgttatggcaatgacaccggagaattgtacatacccggttaatttctgcacacaggacagaggaacacgtgagtccagtattcgttattatcagcgagctattgatacggctgaatttcttggctgtcacaaagttcagatcagtaccggatttggatatttcgatcagtcaccggaagaggcatggaagtattgcagggattctttgcaacagttgggggcttattgtgagaaaaagaatgtggaactgatgctggaggagttgaaggtaacaacaacgaatgtactgataaaaagttcagatctgaaacgaatgatagaagaaacaggttcatctcacatacatggtatggtagatctggatcagatgacctatgccgaagaaagtatagataactatatggataatttaggtgctcagcttgttcatgtgcattttaacgatcggggacatacagttcccggagacggagattttccaatgaaaaagcattatgaggatctgaagcgcagaggatatgaggggacaatttcttttgaaatatgtgaccgtcgttattactgtgatccggataaggtaattgatgacattacagaatggcttaggagcaacacaaccgaattaagttaataaggtggatatctatccactttatatagaaactaaaaagtcaagattaagaagaaaaggagaacaaacatgggatacagaagtacagatattaaaaacattattgcagagattattgaggacaaaaaagaaaaaggaggagtaaaatctttatattttgtaggctgcggcggttctctcggagcactttatcctgcaaaaacattcatggagacagaaagtgcagatattaaatgtgcactgatcagcagtaacgagtttgtacattgcacaccgaaagattttggtgagaattctatcatctgcctttcctgtcataaaggaaacacaccggaaacaattgcagctgcaaagcttggtaaagagatgggcgcttccgttataattcttacatggctggcagagtctgaaatcgtagagtttggtgactatattgttcagtatgagtttgatgcaagcccggatcatctggaaggaaatattgattatgcaggtgagaaaacaatgtgtgcacttcttgttgcagtagaaactttacagcagactgcaggatatgagaattatgacaaattctatgcaggcgttggaatgatcagcaatattattaaaaatgcaagaaagcatgtaaaagagagagcactggcatttgctgaagagtataaagatgatactgtcatttatacaatgggaagtggtgcaggttatggcgcagcatatatggaaagtatctgtatttttatggagatgcagtggctggattccagcagcattcacacaggtgaattcttccatggaccatttgagatcacagatgcaaaccgcgcatttatgatccagatttccgagggaactacaagagaacttgatgagagagcattaaaattcctgaacaaatatggaaaacgtattgaagttctggatgcaaaagagctcggattatctactattgatgcatctgtagtggattatttcaatcattctctgttcaacaacgtgtacccaatctacaatcatgagctggctgagaaacgtgagcatccgcttccaacccgtcgctatatgtggaaagtagagtactaatcagagaaagccggggtgtggtacagatgaaggatttcaggatcatcgcaataggcgataacgtatgtgataaatatctttccaggggaaaaatgtatccaggtggacagtgcgtaaatacctgtgcattttccggaatgaatggtgctaaaacagcatatcttggaaaatttggaaacgatgaggttgcgaaatgtgtacaggatacattgaaagagctgaaaattgactatagccattgcagatattttgaaggagaaaacggttttgcccttgtcacattaaaaggaaatgatcgtgtatttctcggatcaaataaaggcgggatcgccaaggaacatgcctttgattttacagaagaggacatggaatatataaaaggatttcagcttatttacacgaatctgaattcttatattgaagaagaactttccatattagaagaaaccggtgtaccgattgcctatgatttttctacaagatggacagatgaataccttaaaaagatatgtccgtatgtaacggtggcaatcatgtcctgcgcacatctgagttcagagaaacgggaagaagagatgaaaaaagcacaggcagccggagttaagatcgttcttggtacaattggagaagatggctcatgggtgctttataaagataatttctattatacaaaagctatatatgcagaaaatgctattgataccatgggcgccggagacagttacttctctgctttcttaagctccctgctggaaacttcaaaggatggaagccttattgaggaaagcgatgagaaaatgaaagaacgtctgttaaccgcaatgaataagggtgctgctttttccgcaaaggtatgtgcaatggaaggtgcttttggctatggagttccgattgaaggaaagacagaactgtaaaaacatgtatgaaaggggatttatacaatgaaaccagatatgtatgaaaataatggagaaggtattctctgcgtttacaaaaatgaaaaatggcttgtatgtatcaagaattggaaaccagataatgatattgaaggaatcgcacatctcgagatccatcattccacagacgaacagtttattttggcagccgggaaagcaattcttattacagcagagcgtaaagatggtaaatttgatattgaacttacattaatggagcagggtaaagtttacaatgtaccaaaggaagtatggttctattctattactcagaaagatactaagatgatgtatgtacaggattctaattgctctatggataacagcgattttatggatctgactgcagaagaggtgacgtatattcaggaaaatgcaaaaaaactttttgcaaaataaacaaggataaaacagagccagtatctgatcgtttatgaaaagacagggagaatgtgccttttgtttaagcacattctccctgttttttatgataagatgaaatttacaaggatttaactttttacggataattatttttacattgcttttgtaaaatgctatatagatttcggagaaaggaaagggctgagctttgagtaaaaaaatatttaagtatatcatgctggtttcatcactgatcacagtactgggactggcatttgtcgtggggatcctttatcactattttcagggacagctgatgggtgagttgaagaaagaagccgtgtatatttccagaggtgtggaaagtgccgggacggattatctgaagaagctgaatgatgaggagtccaggatcacctatgtggatgaaagtggaaaagttatctacgacaatgaggcagatgtggaaagcatggataatcacggacaccgcaaggagatccgtgaagcagagatcaacggagaaggtgcagatgaaagaatgtcatcaaccctttccgaaaaaaccatgtattatgcagtacgccttgaaaatggaaatgtgctgagagtttccagtaaccaggcttctgtatggatgctgctcctgcagctgcttccaccttttgttgcagttctgatacttatgctgctcctgtccggcgtatttgcatccaggctttccggaaaggttgtggaacctcttaatgggcttgatctggagcatcctgatgagaatgatgtctatgatgaggtacagccgcttctcagcaagatcggcagacagagccggcagatccgtctgcagcttgaggcggccagaagacagcagaaagaattttctattatcacggagaacatgcaggagggacttcttgtgatcgaccgttataccatggtactttctgtcaactccagtgtgggaaagcttcttaaggtaaaggagatcaaaacaggagaaagtgtatatcttctgaaccgctcggaggagtttcgaggtgtcgttggacaggtccttgaaggaaagcatgagaacaagatccttcgtctgggtggcagtgagattcaggtgatcgccaatcctgtcacaagagaaaataagacagagggtgcggtgatccttctggtggatgtgaccgaaaaagtggaaagggaacagctgcgaagagaattttccgccaatgtttcccatgaactgaaaacgccgctgacttccatttccggatttgctgagatcatgcaggacggatttgtgaaggatgaggatgtgaaggtttttgcaggacgcatttataaggaagcgcagagactgatccgtctggttggggatgtgatccgcatctcccgtctggatgagggcggattgccgtatcagtgggaaaaactggatctttacagtctgactcatgatattttttctaccttacatgaagctgccgaaaagcaggaagtgcatatgtatatggaaggcggaagtacagtgctggatacagtgccgacgatcatggaagaggttctctataatgtctgcgataatgctgtcaaatataaccgccggggtggagaggtctttgtgagactgaaggatggcgaggatgcagttcgcgtgaatgtgcgggatacagggatcggtattccgaaggaagatcaggaacgcatttttgaacgcttttatcgggtggacaaaagccattccaaggaaatcggcggaaccggtcttggcctttccattgtgaagcacggggtaaaaactctgaatggcaggctgtggcttaacagtgaaccgggacagggaaccgagatcattatggaatttccgaaacatcatatggaaaaggaagcagcagagtgaacataggtcgtgcagcgatgatgttcataggtatgcagcagaggggaagatgaaaggccgttctgttgtatgtatctgctgctttttatatcatagtatattgctagttggaggttgatggtttgacagaccggaagggttatgctatcttatgtaataataatcagaataagcaacaggaaagcggatgataacggtccgctttctgtattataattggttcggaataattccggacgactatactgaggggaataaaaagatgatacaggcaattgttttactggtgttcctgatctttctgaactctgtttttgcaggtgcggaaatggcgattctgtccatgaatgaagcaaagatgagggagctggcggaagagggagatcaccgggcgcagattttgataaagcttacagaacagccggcacattttatgacagcgatccgtgtaacggtaactacggcaggatttctgcagagcgcttttgcggcagaatattttgcacagccgatgacagcagcactgataaggtcaggaatagatgtaccacagaatgttctgaagatcgtatgcatgatcattgtgactatactgctttcctatgtaagtcttctgttcggagaactggtgccaagacgtctgggaatgaaaaatccggatgagctgtctctgcgtctggcaggacttcttaagatcgcgatgatcgcagtctggccggctaccgcacttctgacagtaactgccaatggtgtgctgtatctgatggggatcaaaccggaagaaaaagaggagcaggccacagaggaagagatccgtatgctgcttacagagggaaatgaacagggcagcatccagcaggaagaaagcgagatgatccagaatgtttttgacctggatgatactgcggcagatgagatctgtacacacagaagagatgtggttgtcctctatatggaagactccgatgaggaatgggaacggatcatcagagagaaccgtcacaccttttatccggtatgcggggaagaccaagatgatattatccatattctggacaccagagattatttccgcctggatgacagatccagagaagctgttctgcatcatgcctgttattcaccgttttttgtaccggaatccatgcgtgccaacctgatcttccgggaaatgagggaaaaacgggattattttgcagtagtgctggatgaatatggctgctttgtaggaattgtcactctgcatgatcttgtggagacgctggtgggagatattgacgacaggacagatctgccgaagccggatgatattgagaaaacaggagaacatatctggaaaatacagggaggagcgatcctggatgatgtggcagaggtcataaatgtggagcttcctgtagaaaaatatgatactttcagcggctttgtctgcggagttctggaacgtgtaccggaggacggagaacagttccgatgcagctggaaaaacctggatattgtggtaaatcaggtcagaaaccataccgttgtggagggaatcgttcatgttcagccagagaaaaaagtgcaggaacagaaagaagagatctgacaaaaccttgttcagccaggtcatgggacagttatcgagagaaagatctccggggatttatggacattttcgaacatgttgttgcttgaaagtatgttatttttatgacataataaggaaataacccgaggaaagcttgtgatgggggagagaaaatgccaggttttacaagacagatcatactgcatacactgacggaacttatgaacgaaaaaccattgtccaagattacggtaaaggacatcgtggaacgctgtggagtaaacaggaatacattttactaccatttcagagatattccggatgcagtggaagcaatggtaaaggaagagctgaatgacattctgaaggatcagaaagcaccggaatcagtcagcgactgtatggaaatccttgtcaacgcagttcagaagaacaaaaaagccatgatacatctgtaccgctcgatccagagggatgtatttgccgattatctggattatgccgcagagcgtgtggtggaggagctgatcagcagggcggtcggagactttgaaatggatcaggaagataggcatcttataagccggtattataaatgtgtatttgtgggagtgatcctggactggctacggcatgatatggattatgatatcctgtcagatatgcataagctggagtatatttacgagaagagccttgagagtcagtacaaaaatctgaaataaaagctatgatctcaactaaatgaagattaaaaatatccatttagctgtagaacaggaatgtcctcgaatattattaaggtatagaaacggttaattttgagctggtgtctgaaatttaggcactggctcttttttgtctgtttttttaaacgacacagagatgtataattcagtacaataaatgagaaaaaattatcaaggagggaacgtatggatgacctgaaacagctgaagcttgtaaaaaacatctacatcgtcatgtcattactgttctgtgtgctgggtatttttctgatggcaaggcccaaaagctctgtaaaaatgctgtgcgtgcttatgggaatcatgctgatcctgtacggagctattaagatcagcggatatttcacgagagatgctttctgtctggcatttcagtttgatctggctttcgggatcttgctgatggcagtgggagtgatcctgatagccagaaaaaatttcgcagtggatcttattttttccgtgttcggaatcctgattctggcagatgccctgtttaagatccagatgtctgtagatgcgaagagattcggtctggcgttgtggtggcagatcctgctgatcgcactggtcaccggagtgatcggagttctggtttttatcagaccatttgaagcagcagctatgatgatggtgttggtaggattttccattttactggaagggatcctcaatctatgggtcgggatcctgacgatcaagatcatcaagagtcggctttaaacataaacataaaaataaccaatcactttagataataacataggaggaaatagagtatgggaatcgtagacaaagcaaaacaggcagcgatcgcagctaccgtaacaaaagcactggattatcttgagaaggatccggagacaaatataccgaagatcatggaaatggttgataaagtaacaccggatggctggtatgcaggacagagaaatgcgatccgtcactccatcgaggcaaaggacaactggtatcagctgatccttcgtatgtatcagctggatgcaggcgtacgccagacatttttccgcaactttattgtaaatgccagtcttaagggaagcgcaacgcaggaaaaggtatcagaagagaatgactgcaatgtaccgtgggcaattcttcttgatcctaccagcgcatgtaaccttcattgcacaggatgctgggcagcagagtatggacataagctgaacctggatcttgagaccatcgattctatcgtaaaacagggtaaagagctgggaacctatatgtacatctacacaggcggtgagccactggtccgcaaaaaggatctcattaagatctgtgagatgaatccggactgcgagttcctttccttcacaaacggaactcttattgacgaagaattctgtcaggaaatgctccgtgtgaaaaacttcgttccggctatcagccttgagggaacagaggcaactacagacggacgtcgtggagatggcgtatatcagaaggttatgcatgccatggagcttctgaagggtcacggacttccgttcggtgtttccacatgctacacatccgcaaacgtagatgcagtaagcagtgaggaatacttcgatcatctgatcgagtgcggtgcttattttgcatggttcttccactatatgccggttggaaatgatgcagcagcagatctccttcccacaccggagcagagaatcaaaatgtacgacagcgtccgcaaattccgtgccacaaaatctcttttcactatggacttccagaatgatgcagagtatgtaggcggatgtatcgcaggtggccgtcgttacctccatatcaatgcaaacggagacgtggatccttgtgtattcattcatttctccaatgcgaacattaaagaatgtacactccttgatgcactgaagagtccgatctttatggagtatcacaaaggtcagccgttcaataagaacatgcttcgtccatgtccgatgcttgaaaatcctgaacttctccgcaagatggttgagcgtgcaggagcgaaatctacagatcttcagtcaccggaaacagcggagcatctctgcgcaaagtgtgatcactatgcagaggtatggaaaaaacaggcagatgagctctggagtgagagccaggcaaaaaaagctgcaaaaaaatcaacaacttgttaattaatacttgatatagatgttgggatactgtataatgaacccgtttttcaggagtctgaaataacagttcagataagagtgtcgaaacagaagagacacgatacgtgtactgacagataacagggcggttatattcagcagtgggtataactgccttcttttttatgttatcgtcaggacatagggaaagaaaggatggattcattatggaaaaacaggagaaaaacacagccagcccttatgagctggacggacgcccacctcttaaggtggcaattccccttggactgcagcacgtgcttgccatgtttgtgggtaaccttaccccgcttctgatcatcacggcagcctgcgggatcgaagcaggaggggatcttcaggttgcattacttcagaatgcaatgctgatcgcaggaattgttacacttgtacaggtctttacgatcggaccggtcggtggcaagcttcctatcgttatgggaacaagttcaggcttcattggcgtatgtcagagtgttgccggagttatgggaaatggtgtcgttgcctatggttcgatcatggcagcctgctttatcggcggtctttttgagactgttctgggaagctttctgaaacccttaagaaaatttttcccatctgttgtaacaggtacggttgtactttcaatcggtctttcactgatcggtgtgggaatcagctctttcggtggcggaagctccgcaaaggattacggttctcttgaaaaccttttcgtaggctttgtagttctgatcgtgatcattgtactgaagcatggaacaaaaggcttcacaagcttttcttcaatcctcatcggtattatcgtgggatacgttttggtaagtatcatggctatggtacttcctacaacatttacatatgtagatgacacaggtgctactgtggaggctacaaaggcctgggttctcaactgggacaaggttgctcaggcaaaatggttcgcggtaccggcactgatgcctgtaaaatgggtatttgacgcgcgtgcgatcgtgccgatcctgatcatgtttattgtaactgcagttgaaacagttggtgatatttccggaatcacagagggtggtcttggaagagaggctacagacaaagagctttccggtggtgttatgtgtgacggacttggatcttccttcgcagcactgttcggtgtgcttccgaacacatccttcagccagaacgttggtctggttgcaatgaataaggttgtaaaccgtttctgtatcgctacaggaggaatcttcctgatcgcatgcggactgttcccgaagcttgctgcactgatctccatcatgccgcagagtgttcttggcggcgctgctgttatgatgttctcatccattgttgtcagcggtatccagttaatcaccaagtggccgatcggaccgagaaatgttacgatcgtttccgtagcacttggtcttggttatggacttggctccaatacagcgatcctggtgcatctgccacaggcgatcagcctgatcttcggcggttccggtattgttccggcagcggtatttgcgattattcttaatattgttcttccgaaggatgagaagagtgagattgagagagctgaggagatgcttgaaaaagttaagaataaataagaaagtgtaagaataaaaagagtttttttcttttttgagactgttggactttattggtctgacggtctctttttttatatgtttttattttttttatttttaggataaaggttcggccttttggaaggcggtaatttgcgagaaggggaagcactcggagttgcgaaggccgtctccccttctcgcactcttcccctcctggccacgccgctgttctgcgttgtagtgggtgtgaatgttctgacagggtgcgggattcgggggtgtcgagaaggggaggctgtgccgatctgttggatagtggataataataaaaggatctgtaaaaggcgagattttacaaatagttctgcctttttcagatccttttttggttagtaattgtaggctccctcataagcattgcatcgttccttccgatgtccctgctctacacaggagctgcaccggtcacaaaattcctgctcatagcaggtagaacagacacatcccttacaggcatcccggtcataagccggcgtgcaggtaaaaggaagagtatccttcgtagtttccgtactcataaagatcacgctccttttttctatattatagacctatcaaaaaagcgtttcaatataaataatcagaaaatataaagaaatacctgataaaaaattacttttcactccgttctcagtaacacgcttcgcgatgcacagaatttatactgatcgtataaattcgcgcggtatgtctcgggttttctgtgaccttcgctcacaaaaaacacctcgcgggatattaccagtgaatagtaaggataaaaattggcacaatgcgtcacatccaacacagtagaatccatcatcctgccaatacagaatcacatcccaaaacgtcgaacaacggcgtggccaggaagggaagagcgcgagaaggggagacggccttcgctaactccgagtgcttccccttctcgcaaacctgcccacgccaaagtgtcctcttgaaaggaaaaaccccaactcacagcagttcgcaacagcagaaaaaaagtgccagctaataaggatgccacaacatctctatcctaccgggaggagctccaccgtccggaagctccgcaaggaagaaccagaccactttctgttacaggaagtccgatctcctgtgactctacattacccttccagggtttcagctccgtagcaagcatataagtcagaacagccggtgcaagacctgtagtataggaatttaccaggaaaaacagcggatcgtcactgaggatcttcgtacaaagcttgatcagcggatggatcgcatcctcgatcttccagatctcgcccttaggtccgcggccgtaagaaggcgggtccataatgatcgcatcgtaatgatttcctctgcggatctcacgttctacgaacttcacgcagtcatccacaagccagcggatcggtgcaccggaaagtccggaagcagcagcattctcttttgcccagttcaccatacccttggaagcgtccacgtgagtaacggaagcgccggctgcagctgcagccagagtagcgccgccggtataggcaaaaagattcagcaccttgatcgggcgtcctgcattgcggatcttttcaccgaaccagtcccagttcacagcctgctccgggaaaagtcctgtatgcttgaagctgaaaggcttcagattaaaagtaaggtctttgtaatggagctcccactgatgaggcagatcaaagaactcccactcaccgccgccacggctgcttctgtgataatgtccgttcatatgcttccagccacggtttttgcggggagtatcccagattacctgcgggtccggacgaaccagaagataatctccccagcgctccagcttttctccttttgatgtatcaataacttcatattctttccatccatctgcaatccacatgatgatcaatacctctttcataatagtaaatttataagatatatatagcatttttatatagcatttccggagattactgtaccagatccggccgatcgggacgtgaatccataaaaacgccataataatgttttttccagtatagaggaaaaatggatgctgtgcaagagaagtgcagaattttccacgaaagatttgacaacagcgcttttacatactaaaatgtacgcagagattttctgccggggcagaggcttcccgcttccgtgaaactgtggctgttttttgcggaagagattttgcagagaattcctgacagacagaaatcgttaacagaagaaacacagcaaccgcagatatgaaactgtgcacaaaaagaggagaagcaaacttatgaaaaaatattgtgagatgagcagggaagagctactcgatttaaagaaagaacttgaccgtgagtttgacgagatcaaagccgaaggtctggcactggatatgtcccgtggtaaacctgcaccggatcagcttgatctttccatgaaaatgatggaagtacttgcaggggatgcagatctgaaatgtgagaccggtgtggactgccgtaactatggagtcatcgacggaatcccggaagccaagagacttctcggtgagatgtcagaggtagagccagagaatatcatcatctatggtaactccagtctgaatgtaatgttcgataccattgcacgttcctattcccacggagtaatgggaaatacaccatggtgcaagcttgacaaggtgaaattcctctgtcctgtaccaggatacgaccgtcatttccgtatcacagaatttttcggcattgagatgatcaacattccgatgactcaggaaggcccggatatggacatggttgagaaatatgtcaatgaagatccggcagtaaaaggaatctggtgtgttccgaaatattccaatccgcagggctacacttattccgaagaaacagttaagcgttttgcgcatctgaagccggctgcaccggacttccgtatttactgggataacgcttacagcatccatcatctctatgatgacaatcaggattttcttcttgagattcttgatgagtgtgcaaaagcaggaaatccggacattgtttataaatttacttctacctccaaggtaagcttccctggttccggtatcgcagcagttgctgcatccaaagcgaacctggatgacttccgcaaatacatgaccgtacagaccatcggacacgacaaactgaaccagcttcgtcacgttcgtttcttcaaagatatcaacggactgcatgagcatatgaagaaacacgcagacatccttcgtccgaaattcgagcttgttctcgcaacactggataaagaacttaatggacttggaatcggtgagtggaccaaacctcacggcggatatttcatttcctttgattctatggaaggctgtgcgaaagccatcgttgccaaagcaaaagaagcaggcgttgttatgactggagccggcgcaacctatccatatggaaaggacccgaaagacagcaatatccgtattgcgccaagctacccaagcgttgaggagcttggcaaggcagcagaggtatttgttctctgtgtgaagcttgtaagtgtggaaaaacttctggagaaataaatcgatcacatcagactgcccggtatttcagcatgcgtaataccgggcagtcataactattggagagagctcatggatgaggaaaaagaaaaaatgaaaacaggcaaaaagttggtcattgcactgatcatgatcctgctgatccttacagcaggggcttatggatatggtgtacactattttacagatcattttttgccgggatctcaggtgaatggttttaactgctcctataaaactgcagatgaaacagaaaagcttcttgcaaaggaagtgcaggcatatgttcttaccgttgagacaagaaacaacggaaaagagagcattaccgcaaaagaagccggcctggtctacaagccggatggcggagccaaaaagctgatcaagaaacaggcccggtacaaatggttccttgcttttaatcagaagaaaaaatatacactggcaacggatactgcttatgaagatcagaacaagctgacagaggctgtgaagaatctgaaatgcatgcagaaggacaatatggaaaagcctgaagacgcatgcattaaggataatggcgaaacctacgagatccagccggaaaaagaaggaacgaccctggatacaaaaaaggttcagaaggtgatccgtgcagctgtttccgcaggagacaaaaaagtcagtctggaaaagaaaaactgctacaaaaaaccatcgatatataaagatgatgaagctctgaaaaaagactgtgaccagatgaacaagcttaccagctgcgtgatcacctatgatttttcggaccggtctgaacagcttgatcgaaataccatcaaagactggctggtcagggacgcaaacggagattatatagtaaacaaagaccaggttgcagcttatgtgaacagcctgggatataaatatgatacctttggctgcacgaggacatttaccacctacgatggccgccagaaaaccatcaagggcggtgattatggatgggctatcgatcagaccgcagagactgaatggctttataatgccattcttgcaggaaccacagaagtgagacagccggcttatgcttacagtggactttgcagagataccaatgatatcggaaatacatatgtagagattgacctgaccaaccagagaatggtattctataaagacggacagcttctggtagatacaccggtagttaccggctgtgtccgaaagggccattccacaccaaccggatgctttgcactggatgccatgcgttcgccggcagttttgaagggacctggatatgcatcaccggttacatactggatgccgttttccggaggagtcggaatccatgacgcaagctggcgttcacagtatggcgggcagatctatatcacaaatggttctcatggctgtgtaaacaccccgaaggataaggcggcaatcatttataataatattagtgtaggagtaccgatcgtagtttatgaataagagattaaaagaaatattaaaagaatacgaagaaagaaaacataagatcatcaagggagatgaaagtatgaatatcgttgtattggcaggcggaaccagtacagaaagagagatttccatcgtaacaggaacaggtgtctgcaaggcacttcgtaaaaaaggccataatgccattcttgtagatattttctgcggactggagccggtggactgggatgagccctttggagataaagattatgaggtagattctgcggcagagtatatgagaagcttcgatgatgatatcgaagagatcaaacgcacaagaagaagctttttcggaccgaatgtactggaattgtgtcaggcagcagacattgtatttatgggacttcacggttccaacggagaggatggaaaggttcaggcaaccttcgatctcctgggaatccgttacacaggaaccggatatttaagcagtgcccttgctatggataagggtctcactaagaagatctttctcatggatcaggtaccgacaccgaagggcgtttccatgctgaaagaaaactgcacaagaaacatccatgatcttggtatggaatttcctgttgttgtaaaaacatgctgcggtggttcaagcgtaggtgtttatattgtaaataatcagaaagaatatgaggatgccattgatggtgcttattcttatgaagatgaggtagttgttgaagagtatatcaggggccgtgagttttccgttgcagttgtagacggaaaggcttatccgatcatcgagatcgcaccgaagcagggcttttatgattacaagaacaaatatcaggcaggatccacagtagaaacctgtccggctgagatctcaccggaactgactgagaaaatgcagcattatgcggaagctggtgcaaaggctctctgcattgaaggctatgcacgttttgacttcatgatgaaagaaaacggtgatatgtactgcctggaggcaaacacacttccgggaatgacacccaccagtctgatcccgcaggaagcaaaggtcctgggaatcgactatccggatctctgtgaagaactgattcgcatttcttttaagaaatacagaaaataaaatatctgaccgtaactcctcctgttgacaggaggagtttctggcaaaagaaaggattttattcatgaaaaatcttacattggaaaatatcacaaaagtctgcaatggtatttaccacggcccgcaggaaaaacttcaggaggaagtgactgcgatcacaactgacagccgtaaggtggaaaaaggaggtctttttgtaccggtagtaggagagcgtgtggatgctcaccgttttatcccgcaggtaatggaagcaggtgcacttgcaaccttatccgagagaactcttgaaggagcggatcatccgtatatccaggtaggttcctcccttcaggcagtaaaagacattgcggagttttatctggagcagcttgatattcctgttgtgggaatcacaggaagcgttggaaagaccagcacaaaagaggtgatcgcctctgtgctgaaggaaaaataccgtacactgaaaacccagggaaatttcaacaatgagctgggacttccactgacagtattccgccttcgtgatgaagatgagatcgcagttctggaaatgggaatcagtgatttcggtgagatgacccgtcttgcaaagatcgcaaaaccggacacctgcgtgatcacaaacatcggaacctgtcatctggaaaaccttggggacagagacggcgtcctgaaggcaaaaacagagatttttcagtatgtgaagaaaaatatcgtacttaacggtgatgatgataagctctccacagtaaaggaatacaacggtatgcagccagtatttttcggaaacggagaaaatgcttctgttacctgtgaaaatgtggaaagccgtggcctgaagggaatgagctgtgacatctgtctgaagggaaaaatggcagagaacggagagctccagatatttcatgtagatattccaatgccgggacgtcatatggtatccaatgcgctggcagcagcagctgtgggcagactttacggactgaatgcagagcagatcaaaaatggcatcgaaagcctggaaccggtcagcggaagattcaatatgatcgagaccgataaattcatgatcgtagatgactgctacaacgcaaaccccatgtccatgaaggcttccctggatgttcttcaggatggacttggaagaaaggttgccatccttggtgatatgggtgagcttggaactgatgaagctgcacttcatgaaggtgtaggcgttcatgcaggtcagtgcaggatcgacgcatgcatctgcgtaggaccacttgcagcccatatcgcggaaaaagcatctcagaccaatccggacctgacagtcatccgggaaaaagatctggaaagccttcttaagaacctgaacacatatgtgaaacctggagataccatcctcgtaaaggcttctcacttcatgaaatttgaaaatgtagtcaaagcactgcaggaaatgtaaaaagaccgaaaacaggggcagcatttgacgaacgaaaattctttccagttaagttatatagaagtataatattcctaaggcgatgagcagtgcagctatagaacgaaagtacgctcaggcactgtgcggcagtgaaaaagggagggcttatgctggagatgatcatgaagctgaacatcccgctttacgtcatgacatccatgggatgtatcggcggtctggggatgctggcaacaaaccttacctaccgaagaatgatccgaaatacgcagcgattacagaatctgaaagaaaaatggctgaacctgtggaagtcaagggacaggctctggcatcggatgaaccgatttgtgtggtatccgtcactgttttgtacatttcttctgggactgtctgtttttctcaacagcagactgggatacagggaaggattgcctatgctttatctctatataggggcagcagtgccggtagtactgcttcttcttcgtcaggcattggacttttcttataaggaagagcttgtgatggcttctcttgcagattatgtggaacaggtccgtacctgggtagaggaagtaccggtcgcagaaaaaccggatcctgttttgcaggaagagatcgtagataagatcaccagaagtatccgtcagacggctgctaccggaagccacttcagcaagatgctttctccggaggaggaagagatcatgcgggagatcatacgggaatttatgaatgcagagtaagaacagaacctgttatatctgagaaaatactgacatgcgcataaggatattcctgaataaggagagcggatgcagtgatttccagaaatgctgcagattaaccgaatcaggtaagtcccctgcctcaattgcgaaaagcaataagcaataagcagcggggggcttgaggatatccgcttgacgaaatatatacttacaaaaaaactctccggcagatacgattctttgtatccgccggagagttcttttatgtatgcagttgtgtaagataaggaatttatcagctataccgcctcaacccatggagatcgggccgccacggagcttgccggctgtggtgatcctcttgatcgcaaccatgtaagctgccatacggagcgttacatttttctcctggctgagagcataaacttcattaaaggcagtaagcatgatcttctgaagcatcttgttaacttcatcaagatcccatgtaaggttctggatgttctgtacccactcgaagtaggaaacaacaacaccgcctgcattggaaaggatatccgggcatacgatgattcctctggaattcaggatctcgtcagcttcaacagaagtcggtccgttggcagcctcgatgatcagttttgcctggatgcgtccggcgttatcttctgtgatctgattctcaagggcagccgggatcagaacatcacatttgcaggtgataaggccgtcatttgtaacgtgggaaacgccctctgcctcgtatttatcaagagtatttccttcggaaataaatttgcggatcgcaggaatatcaagtccgtcctcgcagtaaagaccaccggtgtaatcactgacagcaaccaccttctgaccattcttataaaaaatctcagcggcagttccgcctacatttcccataccctgaacagcgatagcggcgtgtgcaggatcaacatgattcttttccatgcactgataagcgatgatggtaactccgcgtccggtagcttctacacggccgacagaaccgccgatctcgatcggtttaccggtaacaacacccggaacagtatggcctgtgaacatgctgtaggtatccatgatccatgccatgacctcaccatttgtattaacatccggagcagggatatccttatccggtccgatgatcggaaggatacgggttgtataacgacgagtcagacggatcagctcagctctggaaagcttggaggggtcaactttaataccacccttggcgccgccgtaagggatatttacaaccgcacatttaaaggacatccatgctgcaagtgcctttacctcgtccatgtcggaattctgatggtaacggatgccgcccttgcacggtccacgtgcgctggaatgctgaacacggtatccctcgaatactttaatagaaccgtcatccatacggattgggatagaaaccttaagctcacgttccgggtagcaaagtgttgcgtaatcttcataactgagaccaagtgcctctgcagactgcttcaggacagagagcatattgtcgtatggattatactttttatctgccattgttaccactcctttgaaaatgaatatttttaatttttgtattaagaataatattattcatctgatgaacagagtatatcataatgaatttgaatagtaaataattttattcattaaaatatatacaaaaatatttatattcttttgggcgtttttacataaccatatgttaaaataaaaacagtgcataacagaatagaatgtgaacattcgatttactgctttacgacagatgtatcaagtataaaatcagtaagaccaggaggatatttcatggaaaatcagttacagaagctgatcatttcagcacagctgacaccaaaggaaaaagaagttgcagactatgttcttgaaaatctgcagaaatgctgttttatgacgtcaacagagctggccggggtgctgaatgtgagctattcctccgtgatccggcttaccaagacactgggctttaccgggtatccggactttcagaattttctgagggagagctatgcggaacagtccagggatgtggatgccggaatcctcattcctgcggaacgtatcgaggcgatcaagaaaaaggagcacaaggcaacggttcaggatacggtatgtgcctatactctcagcaatatccagagtaccatcgccggcaataccgaagaacagtaccgtaaagccaccagtatcctcatcaacagcgatgtgaaatatattttttcctcaagaggatcaacctgtgtgggagaatttctgaatacgatcctcagacagacacttcctcatgtatataattacggaagtcatggacagaacatgtttgattttgccagtgatctgaaaaaaggtgatgctgctgtttttatcacctactccaggtattccaggctgatgtatctcactgctgagatggtacataagcagggggcatccattatccttctgacagacaagcctacctgtgaaacagccaagtttgcggacgtggtactgacggccagaggcgacagcagtgaattctataattcctatgtagcaggaatgtttgccgcagaaatgctctgcgcttatatatgcagagaaacaaactactccaatcaggagctgctggagcgcattgatgaatatacctcccagatcgggaatttttgaaaaaaggagaacgcaggataagcattcgtggctttcctgcgtccttttacatgttactcagtcttcctcgatcacctggatctccaggtagtcgaattcaatatgttcaatgaaattatcctgataaaaacgggccttatcatgctttttgaaatcccgcaccgtggcatccagccagataggatttcccagatccatttgatagcagatttcctcaagtccgtgaaaaatcttgtgggtcctggtatcatcgctgtcatcacagacaacggtgtcctgaagcatgcgattgtctttccatatttttccccataaacgaaacataaacagtacctccgtattgaaactgccacagccggcagaatataaatatccgtccgatatggtcttcagtatagcggattttgcagggaaagtaaagcacagggcagcaacgcttgtacgcaaaacaatgcaccaggtatgctcgcttttattgactaatgtgtaaaaatcctctataataaacgaaattatgaaaaaaagaatcattacagattggaggaaccgaaatgaaactttacgataccggcgtttatcttcagaacggacaggaaatcattcccgagaaccaggctgatctgcctgtagcgaaagaagaggctgctaagaataccatcgcatattctattcttaaggctcacaataaatctgataacatggagaagcttcagatcaaatttgataaactgacttcccatgatatcacatttgtaggaatcatccagactgcgagagcttcaggacttgagaagttcccggtaccatatgtactgaccaactgtcataactccctctgtgcagtaggcggaaccatcaatgaagatgaccacatgtttggtctcacctgtgccaaaaagtacggcggagtttatgtaccgcctcatcaggcagttatccatcagtttgcaagagaaatgcttgcaggcggcggaaagatgatcctcggctccgacagtcatacaagatacggagcacttggaaccatggctatgggagaaggcggaccggagcttgtaaaacagcttctctgccagacatacgatattaatatgccaggcgtagttgctatttatctgaaaggtgctccacgtccgggtgtaggaccgcaggatgttgcgcttgccatcatcggcgaggtttttgccaacggctatgtgaagaataaagttatggagttcgttggacctggagttgccagcttaagcgcagatttccgtatcggtgttgatgttatgacaacagaaaccacatgtctttcctccatctggcagacagatgcgaagatcgaggaattctatgcgatccacggaagaccggaggattacaaagaactgaaaccgggcaacgttgcatactatgatggctgtgtagagatcgatctcagtgagatcaagccaatgatcgcaatgccgttccacccgagtaacacctacaccatcgatgagctgaaggcaaaccttgacgatatccttgcagatgtggagaagagagcacaggtaagccttgacggaaagattccgttcacattgagagataaggtagttgatggcaagctttatgttgagcagggaatcattgccggctgtgcaggtggcggatttgagaatatctgtgcagcagcagatatcctcaagggcaaaaatatcggccatgatgccttcaccttaagtgtatacccggcaagtactccgatctacatggagctggctaagaacggtgttcttgcagaactgatcggaacaggtgcagttgtgaaaactgcattctgcggaccgtgctttggcgccggagatacacctgcaaacaatgcattcagtatccgtcatacaaccagaaacttcccgaaccgtgaaggctccaagatccagaacggtcagatttcttctgttgcacttatggatgcacgttccattgcggctacagcagcaaacaagggattccttacctcagcagaggagtttggcggaagctattccgagcataaatactacttcgataagtctatctacgataaccgtgtatttgacagcaagggcgtggcagatccaagcgtagagatccagtttggaccgaatatcaaagattggccggagatggctgcacttgcagacaacctgatcctgaaggttgtttctgagattcacgatccggttactaccactgacgagctgatcccgtccggtgagacatcctcctaccgttccaacccgcttggacttgcagagtttacattgtccagaaaggatccggcttacgttggccgtgcaaaagagattcaggcagcacagaaggcgatccaggcaggtagctgcccggcagaggctgttccggaactgaaaccggttattaaaaccatcaacaagacttatccggatgtagataagaccaaccttggcgtaggaagtaccatctttgcagtaaaaccgggcgatggctctgccagagagcaggctgcatcctgccagaaggtacttggcggctgggcaaacattgccaatgagtatgcaaccaagaggtatcgttccaatctgatcaactggggtatgcttccattcctgatcccgtcaggagatcttccgttcaagaacggtgattatctgttcttcccgggaatccgaaaggcggttgaggaaaaagcagacgtgatcaagggctataccgttgaaggtgattctttgaaggagttcgaggtaactctgggtgagctgacagacgatgagagagagattatccttaagggttgtctgatcaattataatcgtaaatagatgcagggattgaacatatgcagagcgtgaaggcgttggagctgtgttcatgaatatgctgcggagaggaatatagtaatttaagaatttccgtattgttttgcagactggtgaccgttttgatcgaggttgccggtctgtttttttacttttagaggtgtggttgtgggaagtttttagggttgtggatacttatgacgatgcggacacctcacgctgacattcccagagacaaaccccagcctcggtaaaaatatcaagaaaagctcaacaaatgatgaccgtctcaacactcttcgttattcaatttttcttcttcttcgttctttcgaataaagtttatctcaatcccctgcgaacattgcaaagtacaaacattgtaaagtacaaacattgcaatgtttgcagggccaatgcagtcacacagaaatttttctaactaactttccatgttcgaaagtcagggcgggaaggacgggcggggcgggtgactctgcaggagtcgtagtacttcttaggccgcggggaggctgcgttgctggaaaaatcccagctgtttgagcgtcagcgagttctgggattttttcagcggttttagcagaatccctgcagccttagaagcactagacctccgaagcctcacccgccccgcccgtccttcccgaccgtccgttcgcaacataccatcccgttcttcacaacttcacaatagcataaattaacagaaaataataaaaaatacaaacaaattataaaatataaacacataacaaaacaaataaataaaaataatagcataaaaacacaaaaatgtattgacaaatacccgcaacgatgttattataagaccatcaaaaacaacaagagaaaaataaaaaaagaaaatcattcaattcatagcatagatgcacatgaaggatgaagaaaggaaaaggtgattccagtgggaacatgaacaaacaccatcatcaatatgagagtgacaggaaccgaatttcctgcaagaaagacctgatacagatcacatatgatacaccttaagaaaacagaagtttcttttatgaaatataaataagatcctcttaaatcttacttatattttaagaaatcagaaacaaaaggaaatcagtatttcaggtaatatagaatcggtaactcatattgaacaactgtcacacacctgatacaaagatttcaggaaatatgtaaagaaatgtttcccgaaagagtaaaaccctcaactcaccggttcgttggaaagaagagattccaagaacaaacgtgaagatgagaacgatactttgaaatgcatatcagaaccattaggatatggattgaagctttgcatcagaagaatatctgagaggatattaaaaacagaagaatcgggcaggaacttttttccaggatactttaaagaactgcagaggagaaaatcccagtaggtcgatttgaatcagcagatcacaaagtacagagataacaaatggttttgaatttaagaagttaagtccagaattgtttagtgaacaggaaaaagtataaccaccgaaattcttcagataaacaggaaatcaaacatcgtaaaagatgatttccaatctataaaactttctaagtaatcgaagagatatacttacatatatcagtcgtttatgagcaggaaataaaaaagaagagagaatctgaaaaagaaaaatttcaaaattgaataaagagaatcgaaattattttataaagtatataaaatcagagatttcgattgataaatgtaataagtataacaagaaaactttattcgaaagaacgaagaggaagaaaaattgaataacgaagagtgttgagacggtcatcatttttggaaactgtaaaagtaaaaaaagtgatgaccgtctcgttgtgtatataagattgcatatgttaagtatataatcgttccgaaaagccctagataaaataatatgatccgatcagagatcaaaattttcaatcagagattttccgaacagttatatttatcagttgccatcaaaaacatcatcagttatacttctgtgagaaaggaagtaagatgagaaaatatgtggaattatcagattgaagaaaatattttatatgaagacaaagaaatccttgtgtgcagaaaaacagcaggaatgccggtgcaggcagcaaaaataggaacaatggacatggaaagtgccctgaaaaattatctggtaaaaaaaacaccgggaaagatcccatatctgggagtagtacatcgccttgatcagccggtagaaggcattcttgtatttgcgaaaacatccgaagcagcaggaaatttgagtaaacagatgatggcaggaggcgccggaaaatattacctggcagtaacagagggaaaagcaaagaactcagaagggactcttacagactatctgaaaaaaaatggaaaagccaacatgtctcaggttgtgtctgccaatacaccgggagcaaaaaaagcgatccttcactataaagttctggatcagcaggagataaacggaaaatcccggacacttcttaagatcaggctggaaacaggtcgacatcatcagatccgtgtgcagctctctcatgagggaatcccccttctgggagaccggaaatataatccttcaggagaaaaaggtacatcactgggactttgttccagttgtctggaattcaaacaccccagaacaggaaaaatgatgaagtttgaaacagagccacagggaagcgcgtttctggattttgtgaaaaaaatgtaaaaactctggacggaaatacgaaaaagtgtataatgtaaaaagcaagtaaccaaatgtaagttttttgtaaagtataagttactgtggacggacaaggcagacgataaagaacagtaaccagcgaggaagaggagattacaatgaaaagagctgcagtagcgtcagcagccttgttggctgtggcaaccctgctgacaggctgtcagaaagaagaagtagaaaagcttgttgcaccgcttgtagcagatgtccaggaaacccctgaagcaaccgaagtggaagaagaaaaaagcccgctgatccctgagatcgatgacactctttctattgaagaaggtgccagaatagctgttgtcagtaaaagcaaaaaaggtgagttctggaataaagtaaaagaaggaatggaagctgctgtcaaggacgtaaatgaggcgtacggtttcaaaaaagacaagcagatcacgatgacctttgagggtccggatgatgaagaggacgtagaaagtcagatcaatactcttgatgcagtgatcgctgagaatccatctgtagtgtgtctttctgccggagacatggattcctgtcaggcacagctggaagcagcgaaagagaacggaattccggtggtcgcatttgattccaatgtcagtgatacgaagctggtcagagctttccgtggaacagacaatacacagatcggcaaatatgcagcatataagcttggcagcgccattggaaaaatgggaaatgtggctgttttttctgcacaggagaaaacacagagcgctcaggaacgtgtaaagggatttctggataatattgcaaattatacggatattaaagtggtggaaacagtatattctgaccaggttgatgatatgaaggaagccatgaaggaagttctggataaatatccggcactggatggtgttttctgcaccaatgccgaggtttctgaaatgtttctggaggtaaataaggacacaggagaaaataaagttgctatggtaggcgtagatgcaaccagcaaacagcaggaagcaatccagaaaggggaagaactgggagtgctttcccagaatccttatgcgatgggatatcagaccatgtgggcggctattcagtctactgcaccgaagaaggaaacaaagattgataagaaggttttacttgatccggtatggatcgatgctgagaatatcaaaagcgaagacattacaaattatctgtataattaacagataatttgtaatttggtcggatgaggcagttcacatttatcacctgttcataactgaaagccatcagtccgatgaagatgtaaagaacattttcatcgggctgatggcttttttgaataaaaataaaaaatatgaatagaataaacaaataaaaagtgtgcgaaaaaatggcaaaaatataacatatatgacgagtttttgacacaatacaaataaatttcttgttaaattgcataataaacgttgttttaaaaaagtgattgtggtacaatttggatatgcagagaggcggtgatcagatgatccaggaaacgatcaaggcagtgaaagaggcggaggcaaaagcgcagcagaagataaaggatgcatccgttcgtgcacagagtatcatcagcgaagctgagaaagaggcagagaatattatcagaaagtcggaaacagccgccggcgaacaggcggcatctgatatgaaagcagccgaggaacgtgcacacagtacagagaacactgtcgttggacaagtagaggaggagcttgcagctttgaaaaagaaagcggagtcgaagcacgagcaggctatccaggcagtaatggacagtttgttctgagagggggagtgcgaaaatggcagtattgcagatgcagcgaatcagtatctgcgcaatgaaaaagaaccgtaaggccatattggaagaactgcagtcaattggagtattggagatcgatgcagcggagctggatccggagcttaagacgatggataccatgaatgcccggctgatctttgagaagaacgcatccctttgtgatcaggcaatcgaaatactggatgaattttcaaaggaaaagcaatccatgctggcatccctggcagggaaaccgctgatcggaaggaagcaggaggaagaagctatccgggatcaggaagaaatcctgagaacagccagagaaatacagggataccggaagaagcttacagagaacagtgcggcggcagttaagctggaacagcaggaagcagctcttgttccatggctgaagctggatattccgatgaacttcggaggtacagcgaaagcagcggtacttgtgggaagtattgacggaaatataactctggatcaggtatacagccagctggcagcggatgcaccacagcttgaagccttcgatatccgggaaatctcaaatgacgccggtaagctgagcctggtggttgtctgcctgaaagcacaggcgcaggaactggaagaagcgcttcggatgcagggatttgcaagaccggcacagctggtgtcagaggttccggcacaggaactggagaaccttaagaatgaagtggtacgcattcaggaagagtccgaacagatccgggagcagatatgcgctcttcatggcaggaagagctctcttcagcttttgtccgattatttccgaatccgtgcacagaaatatgaggtattaggacagctccgccagtcggagagcactttttttgtgacaggatatcttccgaagaaacaggttcctgcaatggagaaacggtttacggagaagtacgatattgtttttgaagcagaagatgctgagggagaaaatgttccggttgcccttcagaacggtaaattcggagcagcaggagagggagttctggcagcatttggtcttcccggaaagggagagatcgatccttccacgatcatgacagcctgctatgtatttcttttcggactgatgctgtcagacgcagcatatggactgatcgtctttgcagtctgtctgggagtacttctgaagttccccaggatggagagcggaatgcagaaatccatccggctttttatgtactgtggattgtccactttgttctggggcgtgatgtttggcggatatttcggagattttatcgatgtattttcaaaggtatatctgcacaggccggtcacggtgaagccggtatggtttgcaccgttaaatgagccgatgagacttctggtgttttccatgctgtttggcctgatccatatgtttctgggaatggggcttaagggctacatgctgttacgtgacagaaaatatcttgactttttctgtgatgtagtgctttggttcctgcttcttatgggactgatcctgatctttatcccaagcagcatgttccgttctatttctcagatggatctgaatctttcaccggcagtgatacaggtcggaaaatggatggcgatcatcggagcagtgggaattctcttcatgtcaggaagagataagaagaatccgttcctgagactggcgcttggagcctacgatctttacaatatcacgggatgggtcagtgatatcctttcctactccagacttctggctctgggacttgccaccggagttatcgcgtcagttatgaaccagatgggaagtatgctgggagacagtattctgggatggatcgtatttatccttgtatttgtgattggtcatatctttaaccttctgatcaatcttctgggtgcatacgtgcacacctgccgattacagtacgtagagtttttcggcaaattctttgagggcggaggaaaagagttccaccccttccgcgaaaatacaaaatatgtagatattaaggaggattaatattatgagtggtatcgtttgggcattattgggagcagcaatttccgtagctcttgcaggtataggttccgccattggtgttggtacagccggccgtgcagcagcaggtgttgtaacagaagacccggacaaatttgccaaggttctgcttctgcagcttcttcctggtactcagggtatttacggactgctggtagcattccttgcactttccaaggttggtatcctgggcggaggtgttgctgatatttccctggaaaccggtcttatgatctttgtggcttgtcttccgattgctatcgcaggtcttctttccgcgatccatcagggaaaaacttccgtagcttctatcggtatcgtagccaagaagccggagcagttcggtaaagccatgcttttccctgcaatggttgagacatatgcgattctggctcttctgatctccattcttgcagtcagcggaattcaggtttgattcatcaggaggggcagagcatgacaggattagagaagatggtaagccagattcttgaagaggccgatgcttctgcagccgttacgatcagtgatgcggagaaaaaagccgcagagatcctcagggaagccggagaaaaggcagataagatccggcagcagagagaagaacagtccagggcaaaggtgaaaagctatgaagagcggacagcttccgctgcagatatgaagaagcgtaccgcagttcttgcagccaagcaggaactgatcggaaatgtgatcgcagatgcctgtgaccgtgtgaagaatctggatgaagaaaaatattttgggatccttaagaatatggctgagaaatatcttcttccaagagaaggagagatctgtttttcaaaaaaggatctggaacgtatgccggcaggtttccgtgaggaaataaagagcctggcacagaaaaagggtggtgtgctggaaatttccggtgaaacccgaaacatagacggaggttttatcctgatatacggcggcattgaggaaaactgttctattgatgccatgttcgcggagaagcgggatgagcttctggatcaggtaagaaagattttgtttgcgtaaaacaccatcgcaaaaaggagggcgtgaatgatgtttggtgaagattatgcctatgcggtggcgaggatacgtgttctggagaccggacttttgaatcaggcggcgatcgagcagcttctggcatgtcaggatgagcagcagtgccttcagatccttacagagaagggctggggaaacggtgatcctgcatccggtgcggacgccattctttccagggagagagaaaagacctgggagatcatggattcgctggtagcggatcgatctgttttttccgttctctcttatcaggatcttttccataacctgaaagcggctgtgaaggccagcatcctggatgggacaacgccgaatatttttttcagcgactgtgctattgacggggaggatatggtgaaatttctgaaggataaagaatacgaccgttttccggaagatatgcgggaagtagcaagagaggcctatgagacctttttgcacacaagagacggacagcttgcggatattatcgtagaccgggcagcactggatgccataaaaaaagccggagaacggtcaaaagaagagatcgtccggcagtatgcggaatccacggttgcagtagcagatatccggattgcagtccgtgcctgcaaaacaggaaaaagctcggacttcatgaaaaaagccatggcagaatgtgacacactggataaggaaagactgatccacgctgcagtcagcggaatggatcagatcatgagttatctggcagaaacgaaatacggggacggagctctggcactggcggaatcggcttccgcttttgagagatggtgtgacaaccagatcatggagaccatccgccctcagctgtacaattcattttcactgggaccgctggtagcctatgtgcttgcccgtgagaatgagatcaagacggtgcggatcattctcaccggaaagcgcagcggccttccggaagagtttatccgggaaagggcaagggaaatgtatgtataagatcgcggttttgggtgattataacagcatttacgggtttgcggcgcttggccttgatacctttccggtggaggatcccacagagggaaaagagaagctaaaccgtctggcaaccggtgaatatgcggttatttatattacggaacagctggcagcccagctttccgctgagatcagtaaatacagtgaggcgctgatgccggcgatcattcagatacctggaattgccggaaatacaggtgcaggaatcgaaaatgtaaagaaatctgtggagacggcagttggctccgatattcttttcagtaatgagtgacaagaaagcaggtgattggttcagatgagcagaggaaccattaaaaaggtagcaggaccgctggtaattgccaaaggtatgcgagatgcgaatatgtatgacgtggttcgtgtaagcagccagcgtctgatcggtgagattattgagatgcatgaagatgaggcttccatacaggtatatgaggagacttcaggacttcgcccgggagaaccggtagagtctatggaagttcccctttctgtggaactgggacctggccttatcacaagtatttacgatggaatccagcgtccgctggacgacatcatgaaagtagcaggcagcaacaacctaaaacgaggtgttgaggtacctgcgctgaagcgggacaaaaaatggaatttcgtcccggttgcgaaagtgggagatgagctggaaggtggcgatgttctcggaaccgttcaggagactatcgttgttacacagaagatcatggtaccacccaatatgaagggcactctgaaagaaatcagatcaggtgagttcaccgtggacgagaccgttgcagttctttccacagcagatggagataaagaactgacactgatgcagcactggccggtacgacgtggccgtccatataagaaaaaacttccgccggccaaacctctggtaaccggtcagcgtgttattgacaccatgttcccaatcgctaagggtggtgtggcagcagttcctggcccgttcggaagcggcaagaccgttatccagcatcagcttgcaaaatgggcagaggcagatatcgtagtttatatcggctgcggtgagcgtggaaatgagatgacagatgttctgaacgagttcccggagctgaaagacccgaaaacaggccagtctctgatggagcgtaccgttctgatcgcaaacacctcagacatgcctgttgcggcacgtgaggcttctatttatacgggtattaccattgcggagtatttccgtgatatgggatactccgtagcattgatggcagattccacttccagatgggcagaggctctccgtgagatgtccggacgactggaggagatgccaggtgaggaaggttatcctgcatatcttggttcccgtcttgcacagttctatgagcgtgccggacatgtgatctgcagtggaaaagacggaagggagggtgccctgacagcaatcggcgccgtatctcctccaggtggtgatatctctgagccggtttcccaggcgacacttcgaatcgtaaaggtattctggggactggacgcaaaccttgcatataaacgtcatttcccggcgatcaactggctgaccagctattctctgtatctggacagcgttggcggatggtttgacgaaaatgtagcgaatgactggatgaagctccgccagagaatgatgacccttcttcaggaagaggcagagttggaagaaatcgtaaagatggtaggtatggatgcgctttctccgggtgaccgcctgaaaatggaagcagcccgttccatccgagaggatttcctccaccagaactctttccacgagatcgacacctacacatctctggaaaaacagcacaatatgatgcgtctggtacttgcattttatgatgcgggtttggatgcgctgaaacagggtgcagatatcaatgatatcgtaaaactcccggtacgtgagcagatcggccgttataaatatacaaaagaagatcagctggcagcagaatatgagaaggtaacccgccagctggcagcagaaactgcagaacttctgggaaaggagggcctgtaaaatgccaaaagaatataggaccatacaggaagttgccggccctttgatgctggtacggggcgttgaagatgtggcatttgacgaacttggtgagatcgagcttgccgatggcgaaacaagaagatgccgtgttctggaaatcgacggaagcaatgctctggtgcagctgtttgagagctctacaggtatcaatctttccaacagcaaggtacgtttcctgggacggagcatggagcttggtgtatccggcgatatgctggggcgtgtttttgacggactgggacgtcccattgatgacggcccggagatccttccggaggaaagaagagatatcaatggacttcccatgaatccggcggccagaagctatccggaggagtttatccagacgggtgtatctgcgattgacggcctgaacaccctggtacgtggacagaagcttccgatcttctccgcatccggtcttccccatgcacagcttgcggcacagatcgcaagacaggcgaaggttcgcggaaaagatgagcagtttgccgttgtatttgcagccatgggtatcactttcgaggagtcaaacttctttgtagagagctttaaggaaaccggagctatagatcgtactgttctgtttgtgaacctggcaaatgacccggctgttgagcgtatcgctactccgcgaatggcactgacagcggctgaatatcttgctttcgaaaaagacatgcacgtattggtaatccttacggatatcacaaactatgcggatgcgctccgtgaggtttccgcggctcgtaaggaggttccgggacgtcgtggatatcccggatatatgtacacagatcttgcttctctttatgagcgtgcaggccgtcagaaaggaaaatcaggaagtatcaccatggttccgatcctgactatgcctgaggatgataagacccatccgatcccggaccttaccggttacatcacagagggacagatcatcctgagccgtgagctttaccgtaagggaatcacaccgcccatcgatgttcttccgtctctgtcacgactgaaggataagggtatcggtgaaggcaagacaagagcagaccatgccaacaccatgaaccagctgtttgccgcatatgcccgtggtaaagaggccaaagagctgatgaccattcttggtgaggcagctctctccgacattgacctgatctatgcaaaatttgcggatgctttcgagaaggaatatgtttcccagggctatcaggctaatcgtgatattgaggaaacactggccatcggctggaagctgctttccattcttccgagaagcgagctgaaacgtatcgatgacaaattccttgatcagtattacggaaaagtataaaggggggatgatttgtggcatcaacacaggtgaatcctacccgtatggagcttacgaagcagaaaaagaagctggtgactgcagtacgtggccataagcttctgaaggataagcgggacgagctgatgagacagttcctggatctggtacgggagaatatggagctgcgaaaaaaagtagaagccggtatccgaagcgccaacaccaattttgtcattgcaaaagcaggaatgtcggaggagacgctgaatacggcactgatggctcccaagcaggaagtttatctggaaaccggaaaaaagaatgtcatgagtgtggatattcctgtttttgaatacaaaacaagaacaccggatgccaacgatatctattcctatggctttgcttttacatccagtgatctggacggagcggtaaaatccctggcagacatcctgccggatatgcttcgtctggcagaagtggaaaaggcctgtcagcttatggcttccgagatcgaaaaaacaaggcgtcgtgtaaatgccctggagcatgtcatcataccggaagcccgggcaaacatcaaatacatcaccatgaagctggatgagaacgagagaagtactcagatccgactgatgaaggtgaaagatatgatgctggaggaggcacatcattataaggagcgggaggcagagcgcggagcgtaaagcgcagccatcctgaaagaaaaagaaaagtttatatagaaagttttaagtaacggaaaggagatgtccctgtactgtgtgaaatttcggcagtgcaggggcgttttatttataaaatattaagcttttgttatcagaaaatcaagaaaaatacagtataatagataataagtaaatcagacagctgcagatgcagagatataaaagaaagctgctctgtctgctgaaaaagaaagaaatgaaaaataaagaaagaggagaaagctgatctgaccaggtaaactgccgggcagctgcatggctatgaacagctggcaaagcagattgcggtagcgtctgatcagtaagaggtatatgaatattttacagtcaatacaacagctggacggagaaatccttctcctgatccagcgatatttaagaacggatatgctgacaccatttatgaaatctgttacatttctgggaaacggaggatggttctggatcctctgtgcagttgttcttcttgctgttccaaagacaagaaaaacaggctatgcggcagccttgtccctgatcttcggggcgatcgttaccaacctgcttctcaaaaatatagtggcaagaccaaggccttttgcggaaattgaagctctcatccctatgatcaccaaaccgaaggatttttcttttccgtcaggtcacaccacagcatcctttgccgttgctctggtaatgctccggatgcttccgaagaaattcggaatcccggcagtagtcctggcagcactggtggcattttccagactgtatcttggtgtccattatccgacagatgttctgaccggattcgtgatcgcgctggtgggaagcatgttgtcagtatggatcgtgcgaacgaaaccggaagacaaacaagtacattagcattgtccataggaaagatgaagcactttacctggacaaagtattgacacgctgaagcaagacggggtaaaattgtagacagtacaacagattctgactatggtagaaataatgatatgaaaccctgtaaaatcggataaaaggagagagcacaaaatgatatcagaaaaaatgaaaccctacgtaaaaaataattccgccatccgtatgatgtttgaggaaggaaaccgcctccgtgcgaaatacggcgcagacaaggtttttgatttcagtctcggaaatccaagtgtaccggcaccggatagcgtccgcgaagcaattatcgagcttgtaaacactacggatccgacagttcttcacggatatatgagcaacgcaggctttgaggatgtacgccagaccatcgcagaatccctcaacagacgtttcgatacgaaattttccgcaaagaatctgatcatgaccgtcggtgctgcaagcggactgaatgtgatcctgaaaacaatcctgaatcctggagaagaggtgatcgtttttgcgccatattttctggaatacggtgcatatgtccgcaattatgatggtgtccttgtggaaatctctccagataccacaaccttccagccaaatctcgctgagtttgaacagaagatcacaccgaagacaagagcggttatcgtaaacaccccgcacaatcctaccggagttgtatattcagaagaaacgatcaagaagctttccgcaatcctggaagcaaaacagaaagagttcggaaccgtgatctacctgatttccgatgagccataccgtgagctggcttatgatggtgtggaggtcccatacctgacgaaatattatgacaatactgttgtgggctattcctacagcaaatctctttcccttccgggtgaacgtatcggatatctggtgatccctgatgaggcagacggaagcgaagagctgatctctgcagcaaccattgcaaaccgtacacttggctgtgtaaatgcaccgtccctgatccagaaggtagttgcaaaatgtgtagacgccaagacggatcttgcagcttatgataaaaatcgtcaggcactttataatggcctgaaagaatgcggatttgagtgcatcaaaccacagggtgccttctatctctttgtaaaatctccggttgaagacgaaaaagccttctgtgaagccggtaagaaatataacatccttatggtaccgggaagctccttcgcatgccccggttatgtgagacttgcatattgtgtatcctatgagacaattgtgaattctcttcctgaatttaaaaaacttgcagcagagtatggattgaaataaacgatcattacaaagcagttgaataaaagatccccggtacagtctgttcatgcagtcctgtatcggggatcttttgcaagagggaataagcaaatgaaacgtagtcgggagtgaatagactcccgactgtgtttcattaaaaggatgttccacatttatttggcttttttcttttctttatttggcatttctccgtagtaagctttcagatagatatctttcagctcggatacaagcggatatctcgggttggcaccggtacactggtcattgaaggcctgctcggacatctcatccagagtttccaggaaatgcttctcatctacgccgtaatcacggatcgtcggcaggatctcgatagttctcataagctcatccagtttagtaagaagtttttcgaatacttctgcatcgttcttgcctgtaagacctacagaacgtccgatctcagcgtagcgtgcaagtgtcttcggatactgatactgtgggaaagtacccatcttagtcggaacctcagcactgttgtaacgcataacatccagaagaacaactgcgtttgcgataccgtgtggcaggtggtggaaagcaccgagcttgtgagcgagagagtggttaacgccgaggaatgcattggcgaatgcaagacctgccatgcaggaagcgttagccatatgatctctggcctctacgtcattgccatctttatatgcacgcggcagatactcaaatacaagcttgatcgctttcagtgcaagaccatcggtgtaatcggaagccatcatggaaacataagcctcaatggcatgtgtcataacatcgataccggaagcacgggtaagtcccttcggtgcgctcatcatgttattggtatctacgatcgccatatccgggagaagctcgtaatcagccagtggccatttaacgccggtatcctgatctgtgatgatggcgaaaggagtaacctcggagcctgtaccggaagaggtcgggatcgctacgaagtaagcttttttacccatcttcgggaatgtataaactctcttacggatatccatgaagtccatggacatatcggagaagtcagcgtccggattctcataaagcatccacataaccttgccggcatccattgcggaaccgccgccaagagcgatgatgcagtctggctcaaaggctgtcatagccttggcaccggctttggcggaagcgagagacgggtcaggagctacatcagagaagcatgtatgaactatgcccatctgatccagtttatcttcgattggtttggtgtagccattcttgtagaggaaggagtctgttacgatgaagcagcgtttcttgcccataacagtaccgagctcatcaagagcaaccggcatacagcccttcttaaagtaaaccttttccggtgttctcatccagagcatattctctctcctttcagcaacagtcttggtattgagaaggtgtttgacaccaacgttctcggatacggagttaccgccccaggaaccgcagccaagagtaagggatggagcgagcttgaagttgtaaaggtcaccgataccaccctgggaagaaggtgtattgataaggatacggcaggttttcatagctgcttcgaatttatccatcttctctgtttcatttacgttgatgtagagggaagaggtatgaccatagccgccgtctgcaacgagctgcgtagcctttgcaacagcatcgtcaaaattcttggccttgtacatggcaagtacaggggaaagcttctcgtgtgcgaattcttcgctgatatcaacggactcaacctcaccgatcaggatcttggtctcagccggtacagtaacgcctgccatttcagcgatagtagcagccttctgtcctacgatcttggcattcagtgcgccgttgataaggatggtctttctgactttctcgatctcgtcttttttaaggaagtagcatcctctgtaaaggaactcttccttcacttctttataaatgctctccagaacagttacggactgctcggaagcacagatcataccattgtcaaaggtcttggagtggatgatggagttaactgcaagacggatatctgcgctgtcatcaataatggcaggtgtatttccgggtcctacaccaacagccggtttaccggaggagtaagctgctttgaccattccgggaccaccggtggcaaggatgatatctgcgttctgcattaccatgttggtaaggtcaaggcttgggatatcgatccatccgatgattccttccggcgcacctgcggcaacagctgcttccagaacaacttttgcagcttcaatagtggatttcttagcacgcggatgcgggctgatgatgatcgcattacgggttttcagggaaataagagatttatagattgctgtggaggtcgggttggttgtagggataactgcagcgatcagtcctacaggttccaggatcttcttgagtccgtatgccttgtcttcttctacaacaccacatgtctgagtgttcttatatgcattgtaaacatactctgctgcgtaatggttcttgataaccttgtcttccatgatacccatgcctgtttcctcaacagccattttggcaagtgggatacgcatcttgtcagcagcagtagcagctgccttaaagatcttgtcgacctgctcctgtgtgtaggtagcaaagatcttctgtgcttctttcattgcagccattttcgcggtcagggcttctggagtgtcgatgatggtagggatagtttctttctttgccatgtggaatcctcctgttttcatatgataatggtctgtggtcctgcgggcttatccttttttcgccggcagatgctgcagagtttttgtaagtccccgcgctgcgtttcgttgttgattcaatctgattgaattttcagtttcgatactgatatagtatcaaaattctgaaaaaaacgcaaattctgaattttgtcgctatgtgcaaaatgacgaacagaaaattaggggaaaatactgtaaattttactttgcagaacgctgaattattggaaaaatgttaaaaaaattttttgaaattcagcactgtgcacaaaaaacatgttaaaaaattgtcagcactgacaaaaaacatgcacacatatgaagggtgggcaaaagataaaacgcaacatgtggttaaaacattaacgttaaacttttgtcaaacaatcatgtacacattataatttaactgatttcagacgtcaatagagaactcgataaataattaacaaaaatacggaataattttgataaaaaattcacaaaaatattgtggtaaagtaaagcgtgataacataagaaaccaaaaaacttgaaattatttaaattttcagaataattaggcggaaattatcgggattttttttagaaatgcagaaaaaaactgccatacaggaaatgctcccatatggcagtttgtataaatataggtcaggcggataaaagcatccgcattcactatgcggctttgcgccgaattactgtataaggtttctgctaaacagtaaatgatagccaggttcgatcagctcttgcggaatgcggcacgttttctgtctctggagtccagaatacgtttacggatacgaaggcttgtcggtgttacctcaagaagctcatcctggtcgatgaactcaatggcctgctcaagacttaagatctttggcggaacaagcttcagtgcatcgtcagcggaagaggaacgggtgttggtgaggtgcttggtcttgcagacattcagctcgatatcctcagccttaccattctgtccgataaccataccgctgtaaaccttctcgccaggtccgacgaagagagtaccacgctcctgagcggagaaaagaccgtaagttacagtctcgcctgcctcgaaagcgatgagggaaccctgtttacgatacgggaagtctcccttgtatggtgcatatccgtcaaacatggtgttcaggataccggtacccttggtggaggtaaggaattcgttacggaatccgatcagtccacgggaagggatggagaactcaagacgtacagttccgtcgcttgctgtgctcataccctgaagttcacctttacgctcgctgagtttctggatgatggtaccggaaaattcctccggaacatcaacatatgcgatctcgatcggctccagtttgcgtccgcgctcgtctgtatgatagagaacctccggtttgctgactgcaaattcatatccttcacggcgcatgttctcaataagaacggaaaggtgtagctcaccacggccggaaaccttgaagcactcagttgtatctgtgtcttccacacgaaggctgacgtctgtattcagctcacggtagaggcggtcacgaaggtgacgggaagtgataaatttaccttcctgtcctgcaagcgggctgtcgtttacaaggaagttcatggagatggtaggctcggaaatcttctggaacggaatggactccgggttatctcctgcacagagtgtatctccaatgtggatatctgcaataccggagatcgcaacgatggctccgatggtagcactcttgacttcaaccttgttcaggccgtcaaattcgtagagcttgctgatctttacgcgctcgtgtttgtccgggtcatgatggttcagaagcatcagctcctggttcacggaaatggttccgcgctcaactttaccgacaccgatacggcctacatattcattgtagtcgatggtgctgataagaacctgtgtatctccgtccggatctccctccggagcagggatcgcatcaaggatagtctcaaaaagaggagccatattctcaggcttatcatcgaggttacgaactgcgtagccggcctttgcggaggcatacaggaacgggcagtccagctgttcgtcagatgcgtccagatccatgagaagctccagcacctcgtcgacaacctcctccggacgtgcttccggacggtcgatcttattgatgcagacaataacatgcaggttcagttcgagagctttacgaagtacaaatttagtctgaggcatggcaccctcgaaggcgtccacaagaagaataacgccgtctaccatcttcagcacacgctctacctcgccgccgaagtccgcatgacctggagtatcgatgatattgatttttacatccttataatgaactgcggtgtttttggagagaatcgtaatgccgcgctcacgctcaatatcgttggagtccatgacacgttcctggacttcctggttctcacggaaaacaccgctctgtttcaaaagctcgtcaacaagtgttgttttaccgtgatcgacatgggcgataatggccacgttacgaacatcttcacgcttggtcttcatataatccaaatcctttctttccatatataagtaatcttttttgttaaaaatgatgtccaaatttatagtctatcacatttttgtgagattacaagacataaaaaaatatttttggtttttcatttttcaggcatattataccgcaaatacacatagattgatatagacgaaatacacgaagaggaaggagagctacttattatggcagataaaattattgaaaacaatcaggtatccgttatgggacggatcgctacggggtttactttcagccatcaggtctttggagaaggattttacatgatggatatcctggtaaaacgtctcagcgattcggaggacaggatcccggtgatggtgtctgagcggctgatcgatatcacacaggattatgtgggagaatatatcgagatccacggacagttccgatcctataaccgtcatgaagaaaagagaaaccggcttgtgctttcagtctttgcccgggaagtgaagtttgtgggggaggaagaagaaactgtgccggtcaatcagatctttctggacggatatatctgtaaaccgcctgtatacagaaaaacaccgttgggaagagagatcgcagatcttctgatggcagtcaatcgaccttatggaaaatccgattacataccatgtatatgctggggaagaaatgccagatatgcttctgcttttgaagtaggcgggcatgtactgatctggggcaggatccagagcagggagtacatgaaacggattagtgaaaacgaaacagaaaaaaggattgcctatgaagtttcggtgagtaaattggaatatgttgagtaacattggatatattttggaatagtggtgagaacattaaggtaacacttgcatttccagccaatctgcggtaatattaaaaaaatcagaaaaatggggaattaccggtttcactaacagtaagaggaaaaatcatggaaagagaaataacagaggtttattgcgggaacgggaaaggaaagacaactctggctgtaggccaggggctgcgctttgctacacagggaaaaagtgtgatcatcatacagttcctcaagggcagggaacgcagagaactggatttccttgaggaactggataattttgatttcaagattttccgtttcgaaaaaatggacacctgctataatgacctaagtgagcaggaaaaggcagaagagagaactaatattctcaatggccttaatttcgcacggaaggtaattgctaccagagagtgtgattttctgctgctggatgagatcctcgggcttatggataaaggaatcgctccagttgagacgatcatcgatatgcttaagcagaaggatgaaagtatgcatataattatgaccggacgctggcttccggatgctttgaagccctatgtggatagtattaccacgataacaacagagctgactgaccaggaacgggaataagcaatatttcacagaagaaagaaggaggaagacaaatggcaatttttaaaggaacaggcgttgcaatcgtaacacctatgcatgaagacggtaaagtgaattttgagaaacttgaggagatccttgaggatcagatcgcgaacagcacagacgccatcgttatctgtggaacaacaggagaatcttctactctgacacacggagagcatcttcagacaattaagttcacaattgataaagttaacaaacgtgtgcctgttattgcaggaacaggttccaattgtacagagacagcgatcatgatgtccaaggaagcagcttcctatggcgcagacgctcttcttattgtaacaccttactataacaaggctacacagaagggtcttatcgctcattacacagcaattgccaatgcagttccggaaactccgctcatcatgtacaacgtaccgagccgtacaggctgcaacatccagccggctacagcagcttaccttgcaaagaatgtaaagaacattgtcggaatcaaggaagcaacaggagatctttcccagatcgccaagatgatgtctctggcagacggacagcttgagctttactccggaaatgatgatcaggtacttccgattctttctcttggcggacttggagttatctccgtactttccaacgttgcaccgaagtttacacatgacatggtcatgaaatatttcgacggcgacaccaagggagcaacagaggatcagctgaaagctcttccgctgatcaatgcgctgttcagcgaagtaaacccgattcctgttaagacagctatgaaccttatgggaatgaacgtagggccgcttcgtatgccgctctgcgagatggaagaggacacaaaggcagttcttgcaaaagagatcgagaaattcggccttaagcttgctaaatgatctgactgtaagcgaaaggtaaaggagaatatactatggtaaaaatcatcatgcacggctgcaacggacatatgggccaggtcatcagcggcattgtggagaaagatccggatgctgagatcgtagcaggtattgatattgcagatcagggaaaaaacagctatccggtattcaccgatattgacgcatgtcaggtagaggcagatgcgatcattgatttttcttccgcaaaggcaacagacaagcttcttgagtacagcgcggcacgccagatcccggttgttctgtgcagtaccggtttaagccaggagcagcttgcaaaagtggaagaaacatcccgaaaggtagcagtgctgaaatccgcaaacatgtctcttggtatcaacacacttctgaagctggttcaggacgcagctaaggttcttgcagctgcaggctttgatatggagatcgtagagaagcatcaccgcctgaaattagacgcaccaagtggtactgcacttgcgctggcagacagcattaatgaagctatggataatcagtatcattatgtatatgaccgcagccagaaacgtgaaaaacgcgatgataaggagatcggtatctccgcagttcgcggcggaactatcgtaggtgagcatgagataatttttgcaggtcaggacgaagtgatcgagttcaagcatactgcatattccaaggctatttttggaaaaggtgctgtagaagcagccaaattccttgccggcaaaccggcaggacgttatgatatgagtgacgtgatcggctgatcctgacagattgagccgcaacagaataaaattacaggtaatacagacggggttcgtgtaagatcggaccccgtcttttttggatgaaattgcggtttttgaaatttttcccagaataggatagcggaaaaagtgccatattaggaatacagaatttttcagaaaaaggagaagatcatatgaaaaaatggaaggcgattctttttggtactttgcttaccctgtctctgtgtacatttacagcctgcggcacagaggtaaacaatgcggatgaaacagtggatgaaaaagataaaaacacgaaggataaggaaaaagatacaaacgaaaatactgccgcagaagatgaaactatggaagaaaaagcagacaatgacggtgtgaaggacaatggagagagcattaaggattccggcacggataacaatgagatgtccgatggaaatattaccgtgacgcctgcaggaaatggaaataacgggacagcagcacccggagctgcggatgctgacagaaacgaaaatgacggaactgtatccggtgagctgggtgacagtgtaaaggaccttggcgacggcgtaggtaatgcagtggatgatatcggaaacgcagtgggaaatgcggtagaaggaagataacagatattttaccacagcattgcataaaactgtttcagatgctattatcagtgcatggaaagaaaatggaggacaggattatgaaattcagaccatgcattgatatacataacggaaaagtaaaacagatcgtaggaggaagcctgaaggatcagggggatcaggcggcagaaaattttgtgtcagagcaggatgcggcattctatgcagagctttataagaaggcaggattaaagggcggtcatgtgatccttctgaacggaaaggattccccgaactatgaagcaacgaaagcccaggcacttcaggctctgggaaaatatcccggagggcttcagatcggaggcggcatctgcccggagaatgcggcagaatatctggaggctggcgccagccacgtgatcgtaacctcctatgtgtttaaaaacggagtgatctcctgggaaaatctggagaagatccgtgatgctgcagggaaagaacatcttgtacttgatctgagctgccgcaaaaaagatggcaaatattatattgtcacagaccgatggcagaaatttacagaagagatcgtgacaccggagctgatggaaaggcttggaagcttctgcgacgaatttctggtccatgcagtggatgtggaaggaaaggcccgaggtgtggaaacagagcttgcaaagcttctgggacagtatacagcccatccggtgacctatgcaggcggtgtgggttctatggcagatattgaagagcttcgaaaagcaggtcagggcagactggatgtgactgttggcagtgctttggatatttttggcggaagtataccctttgaagctctggctaaaatgaaatagtatatacaaatagtgaagcagatgcttttgtcccatcaatcttctggcactggtgtgcagatatacatttgtaatgaattaattagatgaaatactctaatagttgcgcattcacgacaaaaaaaacattttgaaggaatatatcgaataaatttggaaaaaatttatgaaatttttgaaaagtgatgttaaaattcaatttaatatgttataatagcaacataaaacagcaaaggggatggaagtcatgaaatttattattagtggaaagaatatagcagtaaccgaaggacttaaaacagctgttgaggacaagcttggtaaacttgaaaggtatttcactcctgaaactgagatttcagtaaccttaagcgttgagaaggatcgccagaagatcgaggtaacgatccctgtgaaaggcaacattatccgttccgagcaggtaagcaatgatatgtatgtatccatcgatctggttgaagaggtaattgagcgtcagcttcgtaaatacaagaacaagatcgttgacaagcagcaggaatccacaaacttccagaaggcataccttgataaggattatgaagaggatgaggaagttaagatcatccgtaccaagaaattcgggatcaaaccaatgtatccggaagatgcatgcgtacagatggagcttctcggacataatttctttgtattctttaatgctgagacagagcaggttaacgtagtttataaacgtaaaggaaatacttacggactgatcgaaccagagttctgataggggattttattatcacaactgaatattgaatggaaggctccgggaatctgtgtgagaaatcggcaggtttccggagccttttatgtcacagcaaaatcaggcttcttttctgttgcaagcaataggggagaattatataatgaagacatatgcgaaaggagaaaggaaaaatgaaaaagaagcttcctgtggtgatcttaagtgtagctcttggtatgaccatgataccggctacctgtatggcagcggaatttaacagtggtgacaccataaaagaacagactgtggaggatctggaactgatttccggagaaaacaatacaaaggattccaaaaagtcagaaatacaatggacagggtttaaatgggacagctattcccaggcagagataacgcttacgtcagccgttaacggcgtctgctattataaatgggcagagcgaggggaagacggaaattcccaggtgcctcagatcgagaccggaaataccgtgaatgatgaggttttgatcagtgaggatgaagagttcgggatcacacttgcagacctggatacagaccaggcagttgatctgtatatccagattgaggatgagaatgggaaattaagtgatctgaagcggatggagcttgatcaggacagccgcccggcgaaaaaaacagattctgagaaaaaacataaagcatccaaaccaaaggcagaggacagtacggtagaggggctggattctcctctggaattctacccggatacattttatgattttaaggttatcggtgcaggtaccgataatgaggatccggaaaacggagacattaagtgggtgcctgtttactggagcacatctgcgaatccgaattccaaccggatccgaagcacctggaagatcggttccaaggaaggaatcgaccaggagggaacttttaatctgtatgttttcttccgcaaatatacctgcaaggattccaaatggcagtctacggataagatacagtctgtacagtacaagtttcagtcagccccactttctgaaaaataatactgtgtggagtgcgaatatctccttgacataacaaatatgtaactcacggagaaaaggaggaaggtaaatgaagaaaaaagttctggcactttttttaagtgctgcgctttgtgtgacggtgttcccggcaaccggtatggctgcagagtttggcagcgttgatgcagaaattacagaaaatgctgcggacagccaggaaatgttttccgcagaggaaactacagagtctatgggagagactgagcagcctgcagaagacagtgaggatatttctgaggaaatggtggataactcttccgatgcaaccatggaagatgtggaaaacgcggaaaatgtggagaacagcgaggatactttcggcggagctgaggaaggagtttcagaagagatctccagtgaggatgatccggaagtattattgacagaactgatacctgaagaagcaggagacggtatggaagaagaaaacgcagaagctatgtcagcgtcagctccggagctggcagtgacaccgacagcgggtccggaaccgacagtgacaccgacagcggatccggaactgacagtgacaccaacaccggtgccaaaaataaacgtaaaatggaccggagaaaaatgggtaagccgcagttctgtaaatgtgacacttaaagttgatgcaaacggagcctgctactacaaagctgtagcgagaaaaaaggacggaacatctgatgttccgagggtcgatacgggaaactctcgtgtggcggttactgcaaacagaagctttgtgatatatcttaagaatctggatacagagaaagaatttgatctgtatcttaaagtattgggttcagacggaagaaccagcaacctgaaaaaattaaagttgaattacaggggaacccgcccgaaatatgatgtgacgccgacaccgacctatataccttctataccagatgtcaaagatagttttgtaagagggttggattctccgctgaaatttactccgaataaatattataattttaccgtgaccggtgcgggaactacaaattcaaatcccgggcctggagatgtgaagtgggtgccagtttactggagtacttcaccaaatccaaccgataacaggaagaatactacatggcggatcggatctgccaaaggaataaacaaagccgcaacttataacatgtatatctttttccagaagtatgtttatcagaaatctgaatggaaaaagactgatgaagtacagtcagccgtataccagtttcggtccgcggcccttacaacggtaaagcttaccacgcccgggttatccggcacttccaacagccctgccggcatcgtcttcaaatggaaaaaagctgcaaatgcttccggttataagatctatcgaaggaccggaaacagcagcaagtgggtcaatatcgctaccgtaagcggaagcaatacgctggtctacacagacggatcagtaaaatcaggaaccatgtatacttatacagtccgcgcatacaagggctctgctttaagtgcttataacaaaaacggcagccggatcgtccgtctgacagctccggtgcagtacaaaccgtccagcaaggcttccgggaagctgactgtccgctggaaaaaagcagttggcgcttccggctatcagattcagtatgcggcctcaaggtccatgagaggggccagaacagtgtccaccagtgcactgacccgaacactttccggtttgaaaaagggaagcacttattatgttcgtatccgtgcatacaaaaaagtgagcggaaagacatattacggtgcctggagcagtgtaaaaaatgcaaaagtaaggaaataagatctgtaatatcccgcgggatcctcgaaaactgggtcctatgcgggatattttctattgtgttactgagaacggagtgaacaataactctgttgttcctgacatgatttgttaaataattgttcattgtttttataacaggaaagtggtagaatatataccatatgtgatccagtataacggatatcaacagagaactggaatgatccaaaattggacagatcagagacagcagtcttattcgaataaaatgattggagcagaaacatgaatgttttttcaaaagtatttggaacccgcagccagcgtgaggtaaaacgtatcatgccgctggttgaaaaaaccgagagctatcagtctcagatgcagcagcttacggatgagcagttacgagacaaaacaagagaatataagaaacgtcttgcagaaggtgcaacactggatgatcttcttccggaggcatttgccactgtacgtgaggcagccaagcgtgtacttggaatggaacattaccgtgtacagatcatcggtggtatcatccttcaccagggccgtatcgccgagatgaaaacaggtgaaggtaaaactcttgtttccacacttcctgcatacctgaatgcccttgagggaaaaggtgtccacatcgtaaccgtcaacgactacctggcaaaacgagatgccgagtggatgggtaaggttcacgagttccttggcctgactgtaggcgtggtacttaacgatatgaagccggaagagcgccgtgcggcatacggatgcgacatcacatacgtaacaaacaacgaacttggatttgattatcttcgtgacaacatggtcatctataaagaacagcttgttcagagagaccttcactactgtatcatcgatgagatcgactctgtcctgatcgatgaggcacgtacacctctgatcatttccggacagagcggcaagtccaccaagctttatgaggtgtgcgatatccttgcacagcagctggagcgtggtgaggccagccatgagatgaccaagatggcagccatcatgggtgaggaggttatcgagaccggtgacttcgttgtaaatgagaaagataagatcgtcaaccttaccgagcagggtatcaagaaggttgagaaattctttaatatcgaaaacctggcagatccggaaaacctggagatccagcacaacatcatccttgcacttcgtgcacataatctgatgcacaaggatcaggattatgttgtaaaagatgacgagatcctgatcgttgatgagtttactggacgtatcatgccgggccgtcgttactccgatggtcttcatcaggcgatcgaggcgaaagagcatgtgaaggttaagagagagagcaagactctcgcaaccattaccttccagaactttttcaacaaatatgataaaaaaggcggtatgacaggtacagcccttaccgaagaaaaagagttccgtgatatttacggcatggacgttgtagagatcccgaccaaccgtgtagtacagcgtaaagaccttgatgatgctgtttacatgacaaagaaagagaaattcaacgccgttgtagaggcagttaaggaagctcacgcaaaacatcagccggtactggttggtacgatcaccatcgagacttccgagcttctcagcagaatgctgaagagagagggaatcccccacaatgtattgaatgccaagttccatgagcttgaggctgagatcgtagctcaggcaggacaggcagatgccgttaccatcgcgaccaacatggcaggccgtggtaccgatatcaagcttgacgatgtggcaagagaggccggcggtctgaagatcatcggtaccgagcgtcatgagtcaagacgtatcgataaccagctccgtggacgttccggacgacagggagatccgggtgaatcccgtttctacatttcccttgaggatgacctgatgcgtctgtttggttccgagagactgatgaaggtgttcacatcccttggtgttgaggagaatgagcagatcgagcacaagatgctttccaatgccatcgagaaagcccaggagaagatcgagttcaacaacttcggtatccgtaaaaaccttctcgactatgaccaggttaacaatgagcagagagagatcatctatgaggagcgccgccaggtacttgacggtgagaatatgcgtgatgccatctacaagatgatcacagatatcgtagacagcatgacagacatgtgcttttccgatgacatggattcttctgagtgggatcttaatgagttcaacactgcgatcactccgatcatcccgatccacccgctgaccgcagagaaggtaaaaggccataagaaagatgagatcaagcacattgtgaaggaagaggctgtgaagctttacgaagcgaaggaggctgagttcccggaaccggaacagcttcgtgagcttgagcgagttgtccttctgaaatgcatcgacagcaaatggatggatcacatcgatgatatggaaatgctccgtcagggtatcggtctgatggcatacggccagagagatccggttgttgagtacaagatgaacgcattcgagatgtttaacagcatgatcagctccattcaggaagacactgtacgtatgctgtatcatgttcatgtggagcagaagatcgagcgtgagcaggttgctaaggtaaccggcacaaacaaagatgacagcgcaggcccgaagaaaccggttcagcgaaaagaagataaagtatacccgaatgatccgtgcccatgcggaagcggcaagaaatataaacagtgctgcggacgtaaggctgccaagatctaagaaggaagataaaaatagtctcacccagatgatgcggtggggctattttttctggaatttctgttacacaggaacagagtacagcgaatattaatcatcctgcgtcaatatagcagatacttaattttcgctgtaaaagaagggacatgataatatggcaattataaaaactgcaattcttcagacacatgtatatactgataaatttcgcaacatcacccaggcggcagaacttcttgccagcccggagcttcagggaatcgatctggcagtcctgcccgaaatgttctgctgtccctacgaaaataaatactttccggaatatgccgaaactgagggcggagatacctgggaaaaatgttcccgactggcggcagaacacaggctttatctcatagccggaagcatgccggagagagatgaagccggcaatatttataacacttcttatgtctttgacaaaaatggtcatcagatcggtaagcaccggaagatgcatctttttgacattgacgtaaaaggtggccagtattttaaagaatccgatactctgacaccaggagaccaggtgacggtttttgacacagaatttggaaagatgggcctttgcatctgctacgactttcgtttcccggaacttgccaggctgatggtggacaaaggagctcaggtgatcatcgtgccggctgcttttaacatgacaacagggcccctccactgggagctgatgttccgccagagagccgtggacaaccaggtgtacaccatcggagctgcacctgccagagacctgaacgccggatatcattcctggggccattccattgccgtagatccctggggaaaagtcctcatggagatggatgagaagctggctgtgaaggttgtggaactggaactggacgaggtaaaaaaagtccgggagcagctgccgcttctgaagcacaggagaggggatatttacgccctgaccacgttttcgttgtaatttttatgtccatatggtattgtataagacaggcaggaaatcctgcatcaatatatagaaagaaggtgaagctgtggttgagttagatcagttcaagagtattcttgcaacatacacagagccattagtggaagtgagggattcactttgacctcgctaacaaagagcagaaggtcgaagaattagagcgcgagatggaagcgcctgatttctgggataatgcggaagcatcccagatgaagatgaaacagttaaagagtctcaaggacgatattgagacataccataatctggaaacacagatggaagatatggaaaccatgatcgagatggggtacgaggagaatgatcctgagattgtccctgagatccaggaaatgctggacgagttccaggcaagctttgacagcatccgtgtgaagacacttctttccggagagtacgacggagagaatgccatcatcaagctgaacgcaggagccggcggtacagaagcctgcgactggtgcggaatgctttatcgtatgtacagcagatgggcagagaagaaaggctttgcgctggaagtactggattaccttgacggtgatgaggccggtgtgaaatctgtaaccttccaggtgaacggagagaacgcctacggttatctgaaatccgagaagggtgttcatcgtcttgtacgtatttccccgtttaatgcagcaggaaagagacagacctcttttgtatcctgcgatgttatgccggatatcaagaaggatctggacgttgagatcaatgatgacgatatccgtatcgatacctaccgaagcagtggtgccggcggacagcatatcaacaagacctcctctgcgatccgtatcacccattttccgacaggaatcgtggtacagtgccagaatgaacgttctcagcacatgaacaaggataaggctatgcagatgctgaaggccaagctgtatatgctgaaacagcaggaagctgaggagaagctttccggcattcgaggcgaagtgacagatatcggctggggaaaccagatccgttcctatgtcctgcagccatacaccatggtaaaagaccatagaaccaatgaagaaaccggtaatgttgacgcagttctggacggcggtattgacatttttatcaatgcatacctgaaatggatcgcgctggcgaaaaagaaagaataacattactgtcacggaaccccataaagacagagaaaaggactccgcaggcaaaaaaagcgcttgtggagtttcttttattatgataatatatctcttgtacaaaaacagttgtctttatgaaacggacagggggctgctggccacagtgtgaacagcagtcagagaggttactatgcagaaacaggttgaaaagaaaaaatactatgtagtaagagaacgggcagtgccggaagtacttctcaaggtggttgaggccaagagactgctggaatccaaacgggtggctactgttcaggaagctgctgaaaggaccgggatcagccgcagttctttttacaaatataaggacgatatttttcctttccacgaggagaccaagggaaagaccatcacctttatcattcagatggacgatgagccggggcttttatcaatggtgctgcagacgattgcccgttttcacggtaatatcctgaccatacatcagagtattccaattaacggagtcgcaacactgacgctgagcgttgacatccttccgggagaaggcgacgcagaggctatggtggaggatattgagcagagagacggtatacactatctgaaaattttaggcagggagtaagcatatgataaacatagcagtattaggctacggtacagtaggaagcggagttgttgaagtcatcaacaccaatcatgagagcattaacaagagagccggagatgagattaacatcaaatacgttcttgacttaagagatttcccgggagatccggttgagaaagttctggttcatgattatgaagtgatcgtaaacgatccggaggtagatattgttgttgaagttatgggcgggatcgagccggcttatacttttgtaaaaagagcgcttcaggcaggaaagagcgtaagcacatccaataaggccctggtagccaagcatggttccgaactcatggagatcgcaaaagaaaaaaatatcaacttcctttttgaggcaagctgcggcggcggtatcccgatcatccgtgcactgaattcttcattgacagcagatgagatcgatgagatcacaggaatccttaacggaaccacaaactacatgctttacaagatgagcacagagaactgtgattttgatacggttctgaaggaagcccaggcaaagggctatgcagaggcagatccgactgcagatgtaggaggtgctgacgcatgccgtaagatcgccatcctttcttcacttgcatacggaaaattcctgaattacgaggatatttatacagaaggaatcacaaagatcacaccggcagatatggaatatgcaaaagagcttggcatgaccatcaagcttcttgccacaagccgcaggatcggagattctttctatgcaatggtagcgccgttcctggtaggccagagcagcccgctttacagtgtaaatgatgtgtttaatgcagtatttgtgcacggaaacgttcttggagatgccatgttctacggaagcggagcaggtaagcttccgactgcgagtgcagtagttgcagatgttgtggatgaagcaaagcatctccacagaaatatcatgacaaactggagcagctatgccctgaagcttatggatatggatgaagtcgagggacgtttcttcgtacgtgtgtctgatactactatggatgaagtggaaaaagcttttggtgatgtacagaccattgagccggatgaccttccggacgaattcggatttatcacaccggtgatgaagcaggctgaatattatgagaagatcagcaagcttaccggaaaagtactggcaatgatccgtgtaaaggattgatgccgaagggaagaaaagaacatgttgattgtaaagaaattcggcggtacttctgtggcaaacaaagagcgtatctttaacgttgccagaagatgtatcgaagattacaaaaaaggaaacgacgtggtggtcgtgctttctgcaatgggtaagtataccgatgagctgatcaccatggcaaaagatatcaatgacaaacctccgaaacgtgagatggatatgctttttaccatcggagagcagatgtcagtggcactgatgtccatggctatggacagtctgggagtaccggctgtttccctgaacgcctttcaggtggctatgcacacaacaagtgcacacggtagcgcacgcctgaaaaagatcgatgcggcacgtatccgcagagagctggataaccgcaggatcgttgtggtcacaggcttccagggcattgataaatataatgactataccacacttggacgtggcggttctgataccacagccgtagctattgcagcagcacttcatgcagatgcttgtgagatctataccgatgtggacggtgtttataccgcagacccgcgtaaggtttcgaatgcccgcaagctcaaggagatcacttacgatgagatgcttgatctggcaactttgggtgcgggagtgcttcataaccgttctgtggagatggcaaagaaatacggcgtgccgctggtggtacgttccagtctcaacaacagcgaaggaaccgtggtaaaggaggaagtaacagtggagagaatgctgatcagcggtgttgctctggatacagatgcagtacgtattgctgtgatcggacttaaagattcaccaggagtggcatttaagctttttgataccctggctaagaaaaatatcaatgtggatatgatccttcagtctatcggccgtgccggaaccaaggatatttcctttaccgttgataaaaatgatctggacgatgcaatggatgttctggaagctaaccaggcacgcatcgcctattctgagcttcatgcggagaaaaacattgccaagctttctattgtaggagcaggcatgatgagcaatccgggtgttgctgcaaaaatgttcgagagcctttacaatgagggtgtgaacatcaatatgatcgcaacatctgagatccgtgtgacggttctcattaacgagaaagatggcgtacgtgccatgaatgcggtacatgatgcgtttaatcttgcagactaaacaaacaaatttgaaatataaaaacatgatatatttgaagtaaaatgacgcggcggaggcttggatgagtctccgccttctataacgaagggatacagaattatgagaaaaaatctgaagggctgtaagaagctggcaggggaaactctggccggtaattttactgtccctgtgatcgggagcattgcagttgcggcgatgagcgcaatttcaagctatatttccacagcactttttccgggagattccctgtatgcgatcattggaggagaggtattcagttttatcctttctctggtgatttgtgttttttccgcaggactttaccggatctatctgaatatttccagaagggaagcctactctttcggagatcttctgtactttttcagccatcagccggatcatgtgatcgtggcatcctttgtgctggcattgatcaatctggtgacatcacttccattggtgtggttttcttttacaagcaatatgggaaatacaacgaaggagcagatgaactgggcagtaacttacatgctgctcacacttctcgggttcgcgctgaacctgctggcagctatgccgttcaccatgagctattacatcctgtccgataattcggacataaaaggagtacaagcgctgaaagccagtgcgaagcttatgaaaggacattactgggaatatatgaaaatgctcttaagttttgttccgtggatcattttttccatatttacattgtatctggcactgatctggctggtgccttatatagaaacctgtatggcagttttctatcggaatatttccggagagttcgatgagccaccggcggagccgtatcctccggtgactccgatccctcagttccatgatgaaacagaagcctgatcgccttccgggaggatgcttgaaacgcaggtactttccctttcagggggaccattttggcatgggcaggtacgagggggaaagcactcaaagttgcgaagcccgcttttccccctcgagctccccctttccgggcacgcagctattgtaggctgtagaaatatgtgaagatattggaggggcgatggattctactacgttggctgtggaaggttgagccgatttatgctgacgtaaatatattggcgaagcctgttcctgaataacagcgatacaccacaatccagagaacaggtctgctacgcaggccactttcccattcatccagaagcgataaacagtgcagaagtaataatcagcgccgaagcaataaacagtgccgaagcaataatcggctcagcctgctactgccagtgcagcagaatataatccagaagcaataatcggcttagcctgtcactgccagtgcagcagaatacaagacagaatcaataatcggctcagcctgtcactgccagtgcagcagaatacaagacagaatcaataatcggctcagcctgtcactgccagtacagcagaatataagtccgaatcaataatcggctcagcctgctactgccagtgcagcagaatacaaggcagaatcaataatcggctcagcctgtcactgccgatacagcagaatacaggactgagccgatacacttacacattccacaacgcatcacagcggcgtggccaggaggggaagagcgcgagaaggggagacggccttcgcaactatgagtgcttccccttctcgcaaattacccactttcaaaaagtgaaaactataatccaaaaaaatcaaaccatccaatttcctctcacttcaaaaggtgaaaactacaatccaaaaaaatcaaaccatccaatttcctctcacttcaaaaagtgaaaactacaatcccaaaaaatcaaactacccaatttatctcacttcaaaaagtgaaaactataatctaaaaaatcaaaccacacaatttccctcactttaaaaagtgaaaactataatctaaaaaatcaaatcacataattatagattcaaaggaagtcgtcccacaacctcctttgtcaaccatcctatgagaatccccgccaggacacctgctaccagcagtgccggtgcataaaccatcaaactcgtattgctcaccacgatcatggcaacgatcagctgcccgatattatgtgtgacaccaccggccacactgataccaatcagactgaagccggaatgttttttcaaaagatccatcacagtcaggctaagcgcagcgccggccagactatacaaaatactgaacagatttccaaacataaatccgatcaccaggattctgacaacggacacgagagccgcttcttttacagaatatcggtccagtataaaaagcaccgccaggtttgcaagcccgagcttgatacccggaatccctgtaaatacagggaccagagactccacatatccaaaaatgatcgctactgcggcaaataatccgagataagctgtttttcgtttcataaataaatcctttcatttgttgcaggaatatcgttgcaggaatagcacagacagaataccatctgtcagagaaaactctacggaaaacacgcattacgcatattctccggaaattttatgtcaccgcatcaattttaggcgaactctccgaatccgaatcctctgcagtattttccccttctattacaaccttattaggaaggcagatgatggaaccgccgtgctcgtccacagccttctgtttcatacagtaatggtccgggcaggttgcttcgatcattgtaacttttccatctttgatctcgcagacattggtgtctccgatgtggatgatctggtcctgggaaagagaataggttccgaattcttttccgtcaacggtaatacggatcgtattatgggaacgtttccccgcaatctgaaaaccaagccagagaacccccgccagaatcaggatcccggcaataaaaatcaattcttttttcttcaaaacaaatctccatttctgttacagattcagaaaaaatcatatcataatcgaaattaaaaggcaaacataagttaatgatatctaaccataattcatacagctgttcccaacggaaagggaggagtggcgatgatttttcttttataaaagacataaaacagaaaaattcatattggaaaaagttataaactactaacaaaagtgtagacaagaaaaaaaacaggtgatataatacctaactgtaagttagcatcatctaattttataaaaaagattaatcaaaactaatttatgtatatggataaaaactatataatttatccaaaagacagttatacgcagagtgaaggaatagatcgagagcatctgacgcagccatatatgttcgcacagttgagcctgatgcagcaatttacggaattgttataaatacaagggagaaaagagatgaaaaatcagaatttttatatgagagtgatctccttactgctggtgatcctggctgtacttttttataacagcagcatgaaagcccaggcaaatgaaaaagagatcgcggctctgacagataaggtagatacacttcaggagcagcagaatgaacttctcagtgcgctggagacgagttatgtaaatcgtatgcagaatcaggcagcatctgcaggatcaggcagcagtgatacagatacagcaggcgatgacaaaacaacagacacttcagacggcaatgtatccgatgcagacgcagaggacacagcaaccgcagattccgataatgtatataaagatggaacctatacaggagaagccgagggatacggcgggaccattcaggtggaggtgacacttaccggtgatgagatcacatccatcaacgtagtcagcgccccaggtgaggacagtgcatatctttcacaggcagagagtgtgatcgattccatcctgagtgctcagagtacagatgtggataccgtatccggagcaacgttcagctccactggaatcctgaacgcagtggatgcggcacttggaaaggcggaaaactcatgaaaaaaagacagcgggaggtaaggctgatgcgtgcgggaatacagctggcattttttattgccgccccgtctctgttttctacagcctttgcaggaatcaaatcgatctttcttgccattgcggccggtcagccggtggagtggaattcctttctgactgtaacggcagtgcttctgatctttacctgttttttcggaagacatttctgcggatatgcgtgtgcattcggatctttcggagatgccgtatatgaaggcttttcctggatccgaatgaaatgctttcacaaaaaaaagaaaccggctctttccgaaaaaatggttcacgggcttcagaaagtcaaatatatcgtactggcactgatcctgctttcctgccttacaggtgtatacggaaagcttacgggaaccagcccgtgggatgttttttccatgctcacggcaagacggctcccgaacagcaaatatctggtgggaattgtgctcctggtgctgatcattgtgggaatgtgtacacaggaaaggtttttctgccagtttctctgtcccatgggagcggtttttgcattaatgccaatccttccgggtgcactgtttcggagaaaccgtgagaaatgtccgccgaaatgtggtctctgtaaaaaaagatgtccggctcatctggatatcgacggcgacacaggcaaatccggcgaatgtctttgctgtcacgcatgtgccgcagcctgcccgagaaaaaatattcacattggaacaattgaggaaaaatgatctatgagatatcaggctctgaaaaagaaaacttttctggcagcagctacatttacaggaattgcggtgttgtttcctgtgctgtgcatggctgcttcggaaaatgatgtacagacatataccgatacagattttgcaatggatactgtggtatcagaaacactctataccacaggtgacgatataaacagtaagctgacagctgtgctgacagatgtggagacgaaccttctttcctggaccaatgagaagtcccagatctataaggtgaatgcagacagcggaaaagatacggagatttccgacgagctttccggatacctgaaacgtcttctgaagatcgcagaggattctgacggagcctttgacccaaccatcgggaagctgatccgcctgtgggatattggaggggaaaaccagaaaattccggaagaagcagaaattaagaatgttctgaaggattccggatatcagaagatttttcttgacggaaatacggtccacatggaggagggctgttctctggatcttggagcagcgggaaagggtattggctgtgacctgatccttaaagaactggaaacaaagaaggatgtaacagcagcacttatgaatctgggaggaagcagtgtcatgacctacggaagcaagccggatggttcttcctggaatgtggcagtgacagatcccagagctgaaaatgaggatgactatcttggtgtggttgccttaaatggtacagaatttctttccacatccggagattatgagaaatattttatcgaaaatggtgtaaggtatcaccacattatggacccttctaccggctatccggcagaaagcggagtgaccggggtaacggtagtctgtgactcaggtctggaggcagatgcgctttccacagcatgttttgtgctgggggtggaaaaagggacacagctgttgaaagcttacggtgcagacggactttttgtggatgaagaccatcatgtatatctcactgaggggatgaaagagcggttcagcctgattgcagattcctacagtgtggaggatattgcagagtgaggctgatctcccggcgatccggtttatgactgtttggcagaggggaatgctcatatccgcagtacttgcgatagtaaacctggaaagggttctataaatatatcatatttttaggaggaataagcaatgcagaagtggaatctattgaaaaaaacagctccatgcattttaagtcttgcagtggcagcaacaacctttccgaccgctgtaatggcatctgatcttgatgcagccgtggtttccgaggcagagacaagagatacggaggattttagcacagaggaaacggcagaggatactgaagctgtagcagaagaagcagcagaggatgcagcagtgccagaagctgctgcagacgagacagaggatatccagcaggaagatacagcagaggaagcagacccgttctctacaggggaagaggatttcacagaaggcgatgaagtggcggaagcattttccgattctgaccagctgacaggcgagtatcagtacgtatatgcaggacttacctggggtgagtactgggcagcagaaggcgtatatgcagctggagatacaagctcttcagaagagaaggattcacatagtgagtttgatacaggagcttttgatacagtaacaagagcgactgcaaatcatggactccacagaggaagctatcagacagaagctacgatcattgctgaagacggaaccagattcgacgtatcctactgggaggataaaggaagcacactttatcttacagacggttccaaggtaaaatggaacagaggcagtataacaacagaagatggaaaaacctatactatgggtcattatgagatatatggtctgaaatatgttccggtagcagttaagaccgcagattttgcagatttctgcaaaaagtataatgtcgtacaggatggagctgtgctctccggaggatacagtgaaaacaatctccagtattacaaaggccttgtggcagacgtaaatgcacagacaaatggtctgaaatatgcggagaaaaatggtgacggctttacatttacagcaagaaaatcagacggaacagcttccggtatcaaggatcaggcgttaaaaacagcaacagagatcaagccgagtgtaaaagcagcaagcggaagctacggcgaattcctccgtgtggatctcaatggaaattatggcgatcttggtgcaaatatgcaggctgtacgctgggattattatggagatgattccacatatacaaaatgtctcgcttcttatggaaccaagtttgccgcagataactggatgcataaagcaatgggaatccagcttggacttacaaaatctgcacgctgcaagcttccgggaggaacagacggaacaggatactggaaactgacagtgtatgctcttggatataatgactatacctacagcttccaggcaactgcagagaatatcgtaaatcctacaatggagccgactgattttacaagtcttaaaacagaagtggaagctgcaaaggctctggcagaggcagattacacaattgcaacctggaagtcctttgccggtgagcttcaggaagcagaagacattcttgcaaaaacagatgcaagtcaggctgaggtaaatgaagcacttgaacatcttcagggagcagagaaagagcttcagaaggtaacagttacacttgataagacagcagcagctgtatatacaggaaaaacaacgactcttaaggcaacaacaaatgacagcgatgcaacagtaacatttaagtccggcaacacaaaggttgcaacagtaagcagcaagggtgttgttaaaggcgtaaaagccggaaccgcagttatcacagcaaaggtaggaaatgccacagcaacctgcaaggtaacagtaaaagcttctacaattaaatttgcaaaggcttccgtaacgatctacaaaggaaaaacagcaactgtaaaagcaactgcaacaccatctgcaactgtaaaatacacaagcagcaacacaaaggttgcaaccgtaaacagtaaaacaggtgttgtaaaaggaatcaaagcaggaaccgttacgattacagcaaaggcaggagccctgaagacaacttgcaaagtagttgtcaagaatcctgcattcagtcttgtaaaatcttctgcaacgatcaaaaaaggtaaaacaacaaccatcagatccaaagcagcacctgcaggcaaggttacatatacaagcagcaataaaaaagttgcagctgtaaacagcaaaggtgttgtaaagggaatcaaaaaaggtaaagcaacgatcacagtgaaatgcaacggaattacaaagaaatttgtggtaacagttaaataatttcgctgttgaaccgaatgcgagcacagatatccgggagcctctgccgcagacatagagtaatgtctgcggcagaggtctgctgatttctgaagagcaatgtctgacagaggccgcaagaaaagaggagagagtaaggaagcatggaaaaagatctgaaagataaaaagcaggaggaaaaaaatactccgaagataccctggaccaagctggtccctgcagctgctgtgattgcggcgcttgtgttttcaggcataaaggcgaagggctctgatggagagacagaagcagtcgggcaggcagagacgaccgtaatgtccgcttcagagctggaaaaatatttcgggtatgaaaaagaaaatactgtttctgacaacacagctgagaaaaacagtacaacaaaaaagaaaagctcatcgaaaaaaagttcaaaaaaaacagcagcgaaaaaaagctcaggtacaagaacggtttccgaatctgcaaaaagcaatgccggcgccgcaggacagggaaccacgcagacaccggtagcaagcgttccggcagatggatataaggacggtacgtatgaaggaagcggaaccggatttggcgggacgatccgcgtgagagtaacaatcagcggtggaaagattgcggccatagatattctggaggcatctggagaaactgcgtcgtattttgcgtcagctcagggtgtgatcagcagtatgattgccggaaatacaccgaatgtagatgcagtaagtggagcaacctattcctccaacggaatcatccaggcagttcagaatgccctctcccaggcagcggcagatggaaacagccagcaggtcacccctacacctgcagcaactgctttaccaactccgacatcagctccgtcacctacaaaaaaaccatctcctacaaagaaaccggaagatccggacagtccccaaaaatatctggacggtaaatatacagcttcggcaaagggcttcaatggagacgtgaaagtaattgtgaccatcaaggatggagtgatcgaagccctgaaacaggaaaatacggacacggagcagttttttgaaaaagcatggagcgtgctggaggaacagatcattggtacggattctgtagatgatattgatgcagtcagcggagcaacctattcctccaacggaattctcaacgctgtaaaaaaagctcttaaagaagcgatcaatccggagtatggaaagaaaccgacaccaactcctacaaagaaaccgacaccaaagccaacagccacaccgaaacctacggcaacgccgaaaccaacagccacaccgaagccaacagagacgccggcagcaaccccgacgccggagccggacgacccggatgtgacgccggttcctgaaaaacccaatgtaactccaacaccagggacagatgagccggatgcaacaccggagccaacggaagcaccggaaccggtgggaatgtacagagatggaacgtatacaggctcggcttttggatatggaggaaaaacatatctgacaattacgatctcaggaggccagatcgtatccattgagcagacaaatcaggatacaccggaattttttgatcctgcatggagcacgatctattctcagatcatggcaaaccagtcggcggatggaatcgatactgtcagcggagccacatattcctccgaggggatcctggacgctgcacaaaaggcccttgcccaggcaaagaattaaccgggtgaacgttggagcagctataaacatctgaatctaagccaataataagaggtgaaagaaacctctggacttcttgattttttttgaagttcagaggttttttgctaggtttctgaaattgcttctataaatcgataaaaaaataacaggaatgtatacagaataataggaaaaatatcagaaaatataagcggtttaaataatttgaaatgcaaattggcggggattaacctgagaaatacaataaaatttttattgcacagggcaatgttttatgttatgtttgaatgtgtgtaattaaagttgttattaaaatgacaaacaacgctgaaaggagaacaaatatgagcagtaaaattacgatcatcggagcaggaagtgtaggagcaactatcgcttataccttatcacagaggagtattgcatcagagatcgttctgatcgatattaacaaagataaggctgaaggtgaggttatggatattgagcagggaaccagtttccgtgagccgatctccatcgtggcaggagattacccggatgctgcagattctgacattgtgatcatcacttccggtattgccagaaaaccgggacagactcgcatcgagctgacacagaccaacgttaacattatgaagaatattactccggagatcgtaaaggtggctcccaaagcgctttatattatcgtaagtaatccatgtgatattatgacttatgcatttgcaaagctttccggactgccggaaaatcagatccttggttccggaaccgccctggatacggcccgtctccgctgcagactttctcagcactacggtgtatctgagaaaaacatccacgcctatgtattcggagagcatggagatacttcctttgtaccgtggtccagagcctttgttgcaggtgcgacccttgatgagtttgacaagatcgttcatgaggatcagaaagatctgcagccacttgacagagaagaggttctggagtatgttcatacttcaggatcaactgtgatcgccaagaaaggtgctacattttatgcggtagccgtatctgtttgcagactttgctcgcttcttcttgcagcatctgatacaatagtcagtgtatcaaccatgcttcacggagagtacggtgttgaagacgtatgtcttagtaccatggcttctatcggaccggaaggtgtaaaacgtatcgttcgtgttccgctgaccgaggaggagacagagaagcttcatgcaagcgccaatgctctgaaggacgtgatcgcacagattgatctttgataaatgtcagaagctgtgtaaagaggaaaaagcagcctcaggcaaatttgaaacaacgggagaaagataaaaatggatattattcaggtaattaccagagaattgaacgttgagaaatggcaggtcgaggcagcggttaagctgatcgatgaaggctgcaccattccttttatttccagataccgtaaggaagcaaccggtacactgaacgacgaacagcttcgtaatcttaatgagagacttacttatttaagaaatcttgaggataaaaaggctcaggttctgggcagcatcgaggagcagggcaagctgactccggagctgaagaaacagatcgaggcagcgcagacactcgttgtggtagaggatctttaccgtccgtaccgcccgaagcgccgtacacgtgccatcatcgccagggaaaaaggtctgggacctctggccgacatcatccttctccagatgacgaagaaacctcttgaagaagaggcaaaagcatttctttctgaggaaaaagaagtcaaaactgtggaagaggccatcagcggtgccagagatatcattgcagaacacatttctgatgaagcagattatcgtatcagtatccgtaagagaacaatggataagggaactatatgttccaccgcaagagatgagaaggagcagtctgtatacgagatgtattatgactttgaggagccggtgaaaaagcttgcaggtcatcgtgtccttgctctgaaccgtggtgagaaagagaaattccttactgtgaagatccttgcacctgaggaagagatcatccgttatcttgaaaaacaggtgatcgtccgcgataatccatacactacacctgttctgaaagaagccattgaggacagctataaacgtctcatcggaccggctattgagcgtgagatccgaagcgcccttacagaggcagcagaggacggtgccatccatgtctttggcaaaaatctggagcaacttctcatgcagcctccaattgcgggacaggtagttcttggctgggaccctgccttccgtaccggatgcaagctggcagtggtagatcctaccggaaaggttctggataccacagttatttatcccacagcaccaaccaatgagaccaagatccatgccgcaaaggaaaccctgaaaaagcttatcagcaaatatcatgtgacactgatctctgtaggaaacggaacggcatccagagaatccgagcagatcatcgtggagcttcttaaggaaatcccggaaaaggtccagtatgttatcaccaacgaggcaggtgcttctgtatattccgcaagcaagcttgctacggaagaattcccgaatttcgatgttggacagagaagcgccgcatccatcgcaagacgtgtacaggatccgcttgcagagcttgtaaagatcgatccgaaatccatcggtgttggtcagtatcagcatgatatgaaccagaaaaagctgggagaagcccttaacggcgttgtggaagattgtgtaaacaaggtcggagtggatctgaatactgcatctgcatcccttctggagtatatttccggaatcagcaaggccatcgcaaagaatattgtagcctaccgtgaggaaaacggccgtttccagacaagaagagagcttcttaaggttgccaagcttggtccgaaagcctttgagcagtgtgcaggtttcacacggatcacaggaggcaaaaatcctctggacgcaaccagtgtccatccggaaagctatgacgcagcaaaaaaactcctggaaaagctgggctacacaccggaagatgtggcagagcgtaagcttaacggtatttccgggcagatccgcgattacggaaaactggcaaaggagctggagatcggagagccaaccttacgtgatatcgtaaaggaactggaaaaacctgccagagatccacgtgacgagatgccgaaaccgatcctccgtaccgatgtcctggatatgaaggacctgaaagaaggcatggtcctcaagggaactgtccgcaatgttattgacttcggtgcttttgtggatatcggtgtgcatcaggatggcctggtccatatttccgagatgagcgagaaattcatcaaacatccgctggaagcagtcagtgtgggagatatcgtggatgtccgtgttcttggggttgatatgaagaaaaaacggatcagcctttccatgaagggaattaataaataaagagaaaacccgggacataccgcgcgaatttatgcgatcagcataaattctgtgcatcgccaggcgtgttactgagaacggagtgaaaagtaacgtatattctgcagcattctgcggcggattaccggacagatatacaataaagctataacagaaatacagcagtggtttataccctatactttatagaaccggagaaatcaggtttacagggaaaaaccactgctgtattattatattaccagatgcggattatagggaatgtttacatcaggaatacatagatcgatccgcatatgtatatcgaatgatcgatcagacaggggggattatattggatagtactgtacagaccgtgcaggaggtcggaaatcaggtaagccagtacaggcagatgtttgaaaattacctgccggacatcacaaaattcggaatcaaggttgttctggctattgttgctttctgggtaggaagcacggtaattaaatggatcgtaaagtttgtgaggaaatcactgacaaaatccaggctggatacaggagtggcacagtttatgtcctcactggtcaagatcatactttacatactcctgatctttaacatatccacaagctttggagtaaaggaatcatctctggcagcacttctcggaactgcaggtgttactatgggtcttgccctccagggtggacttgccaacctggcaggaggcatgatgcttcttctgttcaagcctttccaggtaggggattacatcatcgttaacggacaggatggaagcgagggaacggtagccaaggtcgagatctgttatacaacgctgttatccattgataacaagcacatcgtgatcccgaacggtactctttccaatgtgaccatcaccaacgtaacagcaagggatcagcgaaggctggagatcaaagtggggatctcttacaatgcagatatccagaaggccaaggatatcctggaagatatcctcaccgaggatccggatacaagagaagacgaagagatggtggtattcgtagacgagctggcagaaagctctgtgatcatgggctttcgtgtctgggtagataccgaccgctactgggcagccagatggagattgaaccagaggatcaaggaagattttgattattatggaattgagattccttataatcagctggatgtgcatatccataaataatgtgcataaaggaagaaagctaaagccctttcacatggcagagaaattgctgtgtgggagggttttttgatgaaagtaactggttttgggactattactgccattcacgataatggagaatatgaaaattattgacaaaccagtgtcggggtgcaataataccccacagagatagtatttggactcaaaactatactctggctgaaatcactggaatcttatataaaaatagccagccgaaacccgggatcgggaacggacggatatatgaaaattataaaagatacgagcctgtatcgatgataacgaaggcgttacaacagttatgggaattttgagcaactgttgaagagcatgcttttcgtgtataaaaaacaggactcaatatacagggaatcaatcagaagcgtttcagggtcgaagtgtaccccgagacgtttttttattaaatacagaagcggatgcttttatccacttgaaagttattccctgcaggaaaggacttatataagatgacaatagagatgttaaaaggaaagatccacagagcaaccgttgtccaggcggaactggattatgtaggaagtatcactgtggatgaggaactgctggaagctgccgggatactggaatatgagaaggttcagatcgtagatgtgaacaacggcagccgtttcgagacatacaccatttgcggagaacgaggaagcggtatgatctgcctgaacggagcagcagcaagatgtgtaagcaccggtgacaagatcatcatcatggcttacgcacagtacgagcaggaagaagcccgtactcacaagcctgcagttgtatttgtagatgaagagaacaggatcagcagagtgaccaattatgagaaacacggactgctgaaggatatggcctgacgcagatcaggaagataataagacgaaggtgaattcagaaaagaggctatctcgaatctataaagaaaaccggttccggaaccggaaaagaggagagcataatgcaggtaacaaaaacagtagaagaaacaagaaaacagatcaaagcgtggaaaaaagaaggaaaaacagtaggccttgtgccaaccatgggatttctccatgagggacacgcaagcctgatcaaaaaatgcagagagcagaatgatatcgtagtggtatccgatttcgtcaatcctacacagttcggtcctaccgaggacctggaagcctacccgagagactttgagcgtgacagcaaactgtgcgaaagcctgggagcagacctgatcttctgcccggagccttccgagatgtatcatgatccccacgcatttgtaagtatagatactctgtcagagacactttgcggaaaaacacgtccgatccatttcaaaggtgtgtgtaccgttgtgaccaagctgttccacattgtggcaccggacagagcatatttcggacagaaagacgcacagcagctggccatcattcgcaagatggtgcgtgatctgaacttcgatattgagattgtaggctgtccgatcatccgtgaggaggacggacttgcaaaatcctccagaaatacatacttaagccctgaagagagaaaagcagctctttgcctgtcaaaggcagtaaaagccggacaggaagccattcacgcaggaatcccggcagaagagcttctcggaaaaatgcgagcagtgatcgaagcagagcctctggcaaagattgattatgtatccatggtagatgcacttaccatgcagccggtggaaaaagctgaccgcagcgttcttgtagcaatggctgtttacatcggaaaaacaagactgatcgacaacttcagctacgaggtataatgtatgggaaaagttttaaagaaaatcggaattatcagcagccttgcatccagatatatcgggatcattatcatcgctttttcctgcctggcttttttctggcgtgacggattttcctggatgacgaactatacgtctgtatttctgggagtgatcatgtttggtatgggcctgaccataaagctggatgacttccgggcaattttttccagacccaaagaagtggtgatcggtgcagtggctcagtataccattatgccggtgatcgcctggcttctgtgtaaagtgatgaaccttccggcagatctggcactgggagtgatcctggtgggatgctgtccgggcggaacagccagcaatgtgatcacctatatcgcaggaggtgatgtggcgctttctgtgggaatgactatagtttccacactggcagcaccgttgatgacaccgtttcttgtatatgttctggcaggagcctgggtggaagtatccttctgggccatggtgctttctgtggtaaaggtaattctgatcccggttctcctgggagtttttcttcggagccttgcgggagagcatgtggataaggtatccgatgttatgccgctggtgtcggttgtagctattgttatgatcatcggaggaattgtggctgtaaatgcagagaagatcgtaagctgtggagttctggtgcttggagtagtggcgatccacaatttctgtggtatgatgctgggatttctggctgcaaaaatcttccatgtggagtattccagaacaacagctatagctatagaggtaggcatgcagaacagtggccttgctgtctcactggcagcagctaattttgcagccaatccgcttgcaacacttccgggcgcgatcttcagtgtatggcacaatattgcgggttccatttttgcggggatccgccgtgcaggtgcagaaaaccttgcagagattgaccggatcagggaaatcgactgctgtaattgcgaaaagcaataagcagtgaatgcggattgcggatatcctcctgacggggaacagaaaagctgtggaagaatgtctgtaaagaaagatccgggggagtttgagagataaaatggcagattatgtcgaaagaaaaagtcataaaatgcagaattgtggtttacaaattttagccggtatactataataaccacatggacgaacaaacgtccccaacatatgaaaacaggggggcccgctgaagcgagctgagagtagactgtaaatgtcttgacccataacctgatttggataatgccaacgtagggacatatgcacgaaggattcttaaagacacagaagatcagagagtacagaagaaatcagaagtacagaagattttcattaagtacgtaagattaagagccggttgccgtgatgcgtatgcgttgcagcagccggttttttgttgtataaacacaaagaatttatggaaggagattttttttacatgagaaattacagtacacagatggaggcagcccgtaaaggcatcatcacacctgagcttgagatcgtagctaagaaggaacgcatgacaacagaggaactgcttccgctggtagcctccggtaaggtggcaatctgtgcaaataaaaatcacaaatgtatcgatccggagggcgtaggttccatgctccgcaccaagatcaatgtaaaccttggtgtatccagagactgcaaggactacgatgtagagatgcagaaagtaatggaagctgtaaacatgggcgcccatgctatcatggatctttcttcccacggaaataccattccgttccgacgcaagctgacatccgagtgtccggcaatgatcggaaccgttccggtttatgattccgttatccactatcagagagatcttgatacgctgacagctaaagattttatcgatgtagtcagactccatgcacaggatggtgttgactttgtaactcttcactgtggaatcacaagaaagaccatcgatcagatccgtaatcacaagagaaaaatgaatatcgtttccagaggaggatctcttgtatttgcatggatgtgtatgaccggtgaggagaatccgttctatgaatattacgacgagatcctggatatctgccgcgagtatgatgtgaccatctcccttggagatgcctgccgtcctggatgtctggctgatgcaacagatgtatgccagatcgaggagcttgtacgtcttggcgagctgaccaaacgtgcatgggaaaaggacgtccaggtaatggtcgagggaccgggacatgtgccgcttgatcaggttgaggcaaatatgaaagtacagcagtccatctgtcagggtgcaccgttctatgtattaggaccgatcgtaactgacgttgcaccgggatatgaccacatcacatccgcgatcggcggagcagtagctgctatgtccggagcagcattcctctgctatgtaacaccggcagagcaccttgcacttccgaatcttgaggacgtaaaacagggaatcatggcatctaagatcgcagctcatgcagcagacattgccaaaggtgtccgcggtgcccgtgagatcgatgacaagatggcagatgccagaagaaagcttgactgggaggcacagtgggaatgcgccatggatccggaaacagcaaaacgtatctggaacgagcgcaaaccggagcatgatgatacctgctccatgtgcggtaaattctgcgcagtacgaagcatgaacaaggcacttgcaggagagcatatcgatattctgtaagaatacagaatgcatatgagcatgcagcatcacagtagaacgtggtgttggcagtatccagccagaaaactggttgatcgaatgcggatatggaaagaacagtaatgctgaaattgtggaaagtctgatgttccgataataaaacataaaccgctgtgatctaaaatgaagatcacagcggttttttgcagagttggggacattattgcagcttgcgaaaagacagggccgcgttataataaaaacagaacttacatataaacggtttacataaaaaggaaggaaaggtacgaaatgaaatttccgaaaaaattgatggcacttggcctgtcgttatgtatggctgttgttccatgcggaccggtggcggccgaagattttacagatgcacagacggatatgacagacgccattgatacttttacagatgacgggaattctgaggaatcagaaaataccgtaaacacagatcagatcgcgggagaagatactgccgtgagcacagatcagattacagaagaagagtttcagggatcagatatcggaacggaaacggatgaagctgaaagctcagagagtgaggaaatacaacaggattctgatgaaggattaattctggaagaaccttcggcggtcatcagaaaagcagaaggaacagaggaggctgcggcaccggaagaaatttttggtgacggagaaaaccaggagcagcaggaagatatattcacagatgatattccggcagcaggcacttccgaaaaagaaacagatgtggagagcacagaaatatatctgtatgcgatgaatgatacttacagcagtgtgatctccatgccggataccatgcagacatcttatcagatccagacatccggcaaaaatccggtatatacggttgtttccggttatactgcgaaagtcagcgaaaccggtcttgttactcctaaaatgcagtatgtaacctatgtagacaaaaacggaaatgacgtaaagagccagtgggaatacatgtttggagagaccctgatctctgtacaggatggaaacagtaccgtttattataaattcatactcaaagattatgcggagtattacgcagaacaaaaaatggatacattcctcaaagaaaatattactgcggaaatgtccgattataaaaaggttgagacgattgccagatggcttgccaacaacttcaattacagtcagtatcattccggctatacaggcctgatgctggatggcggcggagactgctgggccaataccagcgcagtgaactatatgtgcgaaaaactgggactgaccgtgtatgcaaggtatgcggcaaatgatccgggggcaggaagcggtcacaggaattccgtagtcattattgacggcgaaagatatctggttgactgcggatatacgggaaatgcccccagacattatgaattgtcaaaaatggactatgactattcttataagatcctgaatgatggaacactcaggctgtatcagtatgaaggaacggatacaaatatcgtagttccggataccattgacggaagaaaagtaacggttcttggaaacagtaccttccagtattgcacccaggcttctgatatagagtctgttactttgccggattcgcttacaaccatcgaaaagaatgctttttacaactgtgagaaattgaaatctgttacgattcccaaaaacgtgtcatctatagggctggctgcttttgtggagggcttgtctgagtccagtctgacagaaattaaagtagatccggaaaatccgtatttttctgaaaaagacggagtggtattcagcaaggatggcacaaaactgatcgtgtttccgtccggacgttccggagattaccagatcccggatggaactgtaagcgtgggagactatgctttttattactgtgtaaatgtttcttccataacagtcccgggaagtgtcagaagccttggagaaggtgcattcggaaactgttcgtcgcttacgaaagctgtcctgaacgaaggcttggaagaaatcggtgaatatgcattccagagcatttcagggatccgtgatattataattcccgcatctgtaaaatcagttgggaaaaatggactttgtctgtcttccgagtgcaggataagagtactgagcacagatactgtctgggcggatgatgcgttcagggattcagcactgatcgcgggaaaaaaggattccacacttcagaaatacgcagaggaccgtggctacacgtttgtggagttgtcagcagacaaccggataccgcttcagaatgaatggtttgaacagatcacttcagactatgaatataatggaaaaagccatgaacccgaaatagaatccagtgaatccgcaccggaacttgagcagggctccgattatgaagtaacttatgaaaataacatcaatgcaggaactgcgactgtaaagatcacgggaaaagatattttctgcggtacagtagagcggagtttcaagattacgccagatgaaaatggaatgtatgtgtgctattttgcggaaaataatgaaacctacctggaaaccacctttaaaggaaaaaaagtggaaccggaagtggtaattgacggactggtacagggaaaagattatacggtaacctatgttaataatgaaaagcctggtgaagctcgtgcagagctcacgggaatcggcaattataaaggatcggaaacattatattttactatttacggaaaactgccggctgcggatccaatagctgatcagacatatacaggaaaagaactcacacctgccatcgtaatccccggattgaaagccggcgaagattattatatgtactacgaggataatcagtatccgggtgttgcaacggtaaccatttatggtaccggttattataaaggtaccgcaaccattcatttcaagatcataaaaaagacagaaaggtttgtcagcaatgttaagctaaacagaacctcttacacttatacgggaaaaaccatccggccatcagtaaccgtaactgtaaatggaaagaagatcggttcgagtgcttataagctgtattacaaaaataataaaaattccggaattggaactgtgcaggtcagagggaccggaaaatacagtcgtatcaacaaaacgcttacctttaagatcctgcctccaaaaactctgctgacaggattgaaaaaagcaaacagatcctttaccgcaagctggaaaaaaaatatacaggcaaccggctatcagatccagtatgcagcagacagcagatttacaaaagaaagaaaaacggtcacagttggaaaacagtctgcgaccagatataagatatcaggactgaaaaacaaaaagatctattatgtccgcatccggtcatataaaagagtcggaaaaaaggttctttacagtagctggagtacggtaaagaaaatccgggtttgatcataaaggagtggatcttagatttatataaatggagtagaatgcttctgtgacagaattaaggcttgtaattataaaaagagcgcgttataatgaactcataaaaaagaaaatttcttcggggcagggtgtgattccctaccggcggtatagtccgcgacccgctttggcggctgatctggtgaaattccggaaccgacagtaaagtctggatgagagaagaacgcgcagtatttaaagaacgtgctcagtgccccgggaagaagctcccggggctttttatgtgaagaaattttttcgcataaagatttcttgtggaaattttctttgaatatttctgaagaaggagagagagttatgagtgaacagatattacagagaggaaatgctgtggaaagaagcagaacaagaaccatcgcgcaggtagccatgcttggtgctgtggcaggagtattgatgaatcttgagtttccgatcccgtttcttgcaccgtctttttatcagcttgatttttccgaggtaccggttatggtaggaaccttcgctatgggacctgtggcaggtatcctgatcgagcttgtgaagattctcgtacatcttgtgactaagggaaccatgactgccggtgttggtgatgttgccaacttcctgtttggatgtgcctatgtggtaccggccggcctgatctatcgtttccgtcataaaaagagcagagtacatgcagttgcaggtatggcagcaggaacagtcctgacagcgatccttgcatgctttgtcaatgcctttgtgctgcttccggcttacggtaaggcttttggaatgccgatcgagacttttatccagatgggaagcgcagtacacagttccgtaaacggactgcttacctttgcactgctgatcattgcaccgtttaatatctttaagtatgcactgacatctctgatcgtatttgtaatttataagaagatccgtgttgtactgaagggtgactgatcataagcagctgccggaggatgaagaaaagatcagaaattggtggtttcagataaatatctgagaatgtgagaaatgccatgtaatatattgccgatgggcagtaaattacatggcattttttatgttataggaaattactccgtaatgttcctataacataaaaaagccctccgggcaggatcgcactgcgacggagaggaataatgtcgctgaagcgacccgtcgcaggcggagaatcctgcaagcaggattctttcttgtgtcaggcgttttgttctgcagctttcatgactccgagctcacgtctggcaaaaacaacggccagtacaaatgcagaggtatctgcaattggtcctgcgtacataacgccatcgattccgaagaaaatcgggaaaacgacgatcagtggaagcaggaagagcacctgtcttgtaagggacatgatcacaccaagcctggcttttccaatggaggtaaaaaagccggcggacataggctggatcccgttggcaaaggtcatcagcatgaagatgcggagatatttttctgcaaaatgaaagtacaggtcgctgccgtttccgaagatgcctacgatctgatgtgggaagaactggaagcagataaaaaatatggttgcgatcacagtacataaggttacggaatagcggtatgtctggcgcacgcggctgtatttttcggcaccgtaattaaagccccagatgggctgggagccctgggagattccgatgcatatggccataaatacctggttgactttggaaatgattcctgcacaggcgatcggaatatcactcccgtaggctgagagtgctccgtaatggcgaagtgtattgttcatgacgatctgcactgcagcaatggcaacctgattgatacaggatgccattcccagagaaaaaatggcagacagattgcgtgccttaggaatcagcatggagcggtccaggtacattttccgaagtctggaaaaataaaaaatgatcagaagtccggatacgatctgaccgatcacggttgcccaggctgcacctttgatgccccagccgaatccaaagatgaaaagtgggtccaggatggtgttgatgacagcaccagccaggatacaggtcatggaataggtgggactcctgtctgcacggaccaggtgattgccgcctgtgcttaaaacgtaaaagggaagtccaatggcggtgattcccatgtaatcaatggcatagggcatgacgtccggtgttccgccgaaaaaatgaagcagtggcttcaggaacagaaggacgatgacagagagtatcgtaccggagattatcagcgaggaaagtccggttcctgcgatggagctggcttttttttcgtttcctgcgcccatttccaggttgtaattggaggcactgccgattcccaggagcagtgcagcagcagtagagataatggttacgggaaatgcgatgtttgtggcggcgtttccaagcattcctacgccctgtccgataaagacctggtcaacgatattgtacagagcgctgactagcatgctgatgatggcgggaatggcgaatttggtgatcaggctgcctacaggggcggttcccagagggttttcggcctgggcagcattggtctggtttttcaatgttttttccttctttcttgtctacagtagctgtttggtaatgtgataagtggatttttaattttatagcagggtatttattatagcactattgtgaagggagtgtaagtataaaaaattgacctttggttttggatgggataaaatgtttttagaaaaaattttcgggaaggagtttttcagatgggtaagatcaacagtgtgaaaaaacttacagataataagttcgtgaatctttatggagtggatgcgaccagtgtacatgatacgccggtttcttattttgtggcctccagggcaaagagtgtggaggatttaaagctttctacgggggagaatcatccggatggggtgatcatttacagtgtttatggagagaaacgggataaggttgtgctgatccgtcagtatcgatatacgatcggcgggtatatttatgagtttccggcggggcttgtggagcctggggaggattttcatgagggtgctgtgcgggagatgtttgaggagaccgggttgaagctggagccgatcaaggttgcggaggcttttgagaagccttattttacgacgattgggatgacggatgaatcctgtgctacggtttatgggtatgccagtggtgaggttagtaaggctgctcaggaggatagtgaggagatcgaggttgtgatcgcggaccgggatgaggtcaggaggatcctgaaggaggagagggttgcgatcatgtgtgcttatatgctgatgcattttcttgaggatgaggaggtgtttggatttcttggggagatttaaacggaggtagttatatggcgggaggggacgccagtgaggggcttctttccaggctggggcttcgtcgggggctggcttctaaggtgccggaattctgctaaaagcgcttcaaaaaatctcgaactcgcgtctgaagccgctcaaacagcgagattttttgaagcaacgcagatttccgccccctaagaatcagctcccctcctgcagagtcagtctggaaagaagcccctcactggctgtgcgttggccgtgagacgtgttaaatctcgtgggtagtgttgctagtggggtggtatgacgggagttggatgagccgtcagcgctgcgctggacggctgggaggaaaggctgagattccttgtggtatgacgggagttggatgagccatcggcgctgcgctggatggctgggaggaaaggctgagattccctgtggcttgaagaggggaatgggtcatcggcgctgcgctggatggatgagaaaaacggggaatctgcggttgcggattccccgttttggtcagagctctgtgagttttcccaggtctttgttgtatttgcagtatttgccgttttcggagataaatggctggtaggtgtcggtacggttgtctttgacgtagacgattccggtggcgatcatttctaccagggagaagcgtttgcttaagctggagatccagcggtaggttttttcgttgccggagtctgccatgagaaggttgtagccgcctgggcaggattccagggtgaagtagattttctgggaccggatggaggtgttgaagacctggccggtgatgtaggtggagaagttggtttctacaaattggcggaaggtgtagagatcgtagatcacgccggtggtctcatctttgatcttgtcgccgcgttcgatgcgggctttcaggagcttgaggacttcgatggtccaattgatgaaggagatgctgctgtaggtcatgctttcctgaagttgatcgaccagctgttttgacaggatgttggattttgatgcttcattaaaaagttcttcgttcataaggttccctccagtgttggatttttatatggttttcgctctttttttgtatcttttattataagtctgaattgtatataaagcaataaaaaatgcgtaaaatacaaagataattattgaaaaatgatatataattaacgagtacgtttggataatatcagtgttttcggcagcttgtttaaaaatggattgtaaacatctagttaagttgaataagtataaggaagagttttaccaaatatcgccattttattgataaaattttgttgtatatctcccttgacataaagccttcctccgggtgtatcatagtgctgtgttaaaggaggtagactattatgtttgagacattacaggagaagacggaagagaaagcaatggtgcagttccttgaacgctttacagattatccatttctggtaaagttcaagaattccgagtatcacatcggagagggtgaacctacatttacggtgaattttaagaaagcgattcctctggcggatctgatgaagagcacatcccttgcactgggtgaggcgtatatgcgtggggatctggatatcgagggaaatctttatgaagcgctggaccattttctgggtcagatggggaaattttctaccaatgaatctgctctgaaaaagatcatgttcagttcaacatcaaagaagaaccaggaaaaggaagtgaccagccattatgatattggaaatgacttttataaactttggctggatgagactatgagttattcctgtgggtattttatccatgaggatgatacgttgtatcaggcacaggtaaataaagttgattatattcttaaaaaattacatctggaagagggtatgagtcttttggatatcggctgcggctggggctttctgctgatcgaggcagctaagaaatataaggttcatggtaccggtatcaccttaagtcatgaacagtatgcagaatttcagagacggatcaaggagcagggtctggaagattatcttacggtagagctgatggattaccgtgatctgccgaagaaggagtatcagtttgaccgtgttgtcagtgtcggtatgctggagcatgttggacgtgataattatcagctgtttcttgattgtgtggaaaaggttctgaagccgggcggactgtttctgcttcactttatcagtgctctgaaggagcatccgggtgacccgtgggtcaagaaatatatttttccgggcggaactgttccgagcttacgtgagatcctgaaccatatggcagaggacaatttccataccctggatatcgaaaatctccgtctgcattacaataagacattgcttcattgggaaaagaatttccgggataacattgaaaaagaaaagatgatgtttgatgaggaatttttgcgtatgtgggatctttatctgtccgcatgtgcggcaacattccataacggaatcattgatcttcatcagatcctgatgaccaagggaatcaacaatgatctgccaatgacccgctggtattgattttctctttacaaatctgccggaaaggaatatcatgcttttataaaagaattaataaaagcaatcaagaggtttgatatggcaggaaaagcagagaaaaaaaacaatacaagatccaggatcatcacctatgtgatgaataaccggagcacctcaaaggtggagctttccaaaaacctgaatatgagtatgccgactgtgctgtccaacgtaaatgaactgatggagagcggtgtgcttgtagagaccggggagtatgcatccacaggaggcagaaaggcgaaaagtatcggcattaatccttcttaccgttatgcagcaggaattatgatcacggcgaatcatgtcgggatggtcctggtaaatatgcggtcagaggttgagaagacagagcgtgtaagaatgaagttttctccggagacttcttactgcctggagttgtcttccctggtcaaagattttctgggagatatggaagctcctgagaagctgcttggaatcggaatctcaattcccgggatcatcagtcgggagcagcatcttgttgtgaaatcgcatgcgcttaagatcgaaaattacagcctcagttttctggagcaggctttttcctgtcctgtttattttgaaaatgacgcgaatgcagctatgctggcggaagatcttcatctgtatcgggacgcgatctatctgtctcttaataatacgcttggcggtgctttctgtattgacgggaaactgtttgccgggcagaatcagaaggccggtgagtttggccatatgatcctggttccgggtggcagaccgtgttactgcggcaagaagggatgcgcagacgcttactgtgcatccagcgcgctgaccggtgagcgctatgagtctttggaacagtttatggacagtctttccgcaggagaagcagatgcctctgaaaaatggggagagtatctggaccatcttgccgtactgatctccaatctccggatggcttatgatatggatattatcctgggcggcgaggttggcggatatctgccggatcatatgctgcctctcggagaaaaagtgatggagtacaatggttttgaccgtgataccagatatcttaagaactgtagctaccggaaggaagcatctgcagttggcgcggcgaagcacttttttcatgagctaatcaaaaatatttaaccgaatcaagtaagtcccttgcgggggtgtgaatatccgattgaccaaatgcatagagaatacgaatcatgcagagaaaagaatctgcagctccggcatggaagaaccttgccggagctgcgggttctttttttatgtggtggatagtgaaatgtgcataaaaaaaccggatcgaatttgttcaacagggagaatcaccggaaaccctattgacaaatcctctcaaaagaacaataatgtaattactttaataaaacaattaataaaagataatacataataaacaaggaggaaaaacattatgatccagcaggtaatgacaaatccaggagagattattttcagagaggttccggttccggaggtgggagatgaccaggttctcgttaagatcatgaacattggtatctgcggttccgatattcatgtatatcacggcaagcatccttttaccaagtatccggtgacacagggacatgaggtgtccggtgagattacagagctgggaaagaatgtcacaggctttcaggtaggacagaaggtaacgatcgagccacaggtatactgcggacattgttatccatgccgccacggcaaatataatctctgcgaagagctgaaggttatgggcttccagacaacaggaacagcttccgagtattttgcggtagacgcttccaaggtcacaccgatcccggaggaaatgtcttatgaggaaggtgcgatgatcgagcctctggcagttgctgttcacgcagtgaaacagatgggcgatgtgaaggggatgaatattgctgttcttggtgccggtcccattggaaatctggtggcacagagtgccaaaggaatgggcgctgcgaaggttatgatcacggatgtcagtgatcttcgccttgagaaagcgaaagagtgcggtattgatgtgtgcgtaaataccaaggagaaagattttggtgaggctatggtggaagcctttggcccggataaagcagatgtgatctatgactgtgccggaaataacatcaccatgggacaggcgatcaaatacgcaagaaaaggcagcgtgatcgtgctggtagctgtttttgcggatatggccaccattgacctggcagttgccaatgaccatgagctggatatcaagagcacgatgatgtaccgtcatgatgactatgtggatgccatcgatcttgtgaacgcagagaaggttcatttaagaccgctgatctccaagacctttgcctttaaggattatctcaaggcttaccagtatattgatgccaaccgtgagacaaccatgaaggttatcatcaacgtgcaggagaaataacaccaggaaatgtactaacaggaaatctcccggatgtggctgtccgggagagatataagcgataagcagtaaacgaggagtaacgaaaaacaggaggagttatgggtagtgaagacagatacggaaaggtaccgctgatcagtaagatcgcgtatggttttggtgatgtaggctgtaatttcagctggatgtttgtcagtaattttttgatgatattttatacagatgtattcgggatcagtatgacggctgtttcagcgctgatgctgttctcaagattctgggatgcgatcaacgatcccattgtcggaggacttacggataagacgaagaccagatggggaaggtaccgtccgtggctgctcattgcggcgcctgttacagcgatccttctgatgatgacgttctgggcacatccggactggtcggatacatccaagatcatctatatggtgatcacatactgcctgctggtgttgggatatacctgtgtaaacattccatacggaacgctttgcggcgcaatgacacaggacattgatgagcgggcgaagatcaacacgtcccgttcggttgcggctatgatcgctatcggaattatcaacatcattactgtgcctttgatcggaaaactgggaagcagcagtcagaagacaggttatcttctggtagccatcatttacggatgcatttttgcggcatgtcatattttctgctttgcaaaaacaaaggagcaggtgaccacaccggaaaaagaaaagatctccatccgggttcagctgaaagcagtcatgcagaaccggccatatcttctggcactggtgggacaggtactgtttggtttcactctttacggaagaaacgcggatgttctgtattactttacctatgtggagggaaacgcgtcttactatacaacttactccatgtgtatcatcattccgtccattatcggagctgcctgctttcagccggtcttccggaaactgaacaacaaagggcggacagcgtctctgtttgcgctccttaccggaatttccatgcttgccatgtatttctttaatgtaaaagaatctccggctgccttttacgccctggcaggaatcacacagttctttttctccggatttaacacggcaatctatgcgatcataccggactgcgtggaatacggagaatggaaaacaggtcttcgcaacgatggtttccagtatgcgttcgtatccctcggaaacaagattggaatggcgatcggaacagcgctccttgcggcgcttctgggaaaatacggttatgtggcaaaccaggcccagaattcagccgtgctcagcatcatgaaacattcctttaccacgatccccggaatcctgtggatcgttacggcagtggtgctgttcttctacagattgaacagaaaaagatacaatgagatcgtggaagatctgaaatatggaaaaagaggataatatgagaaccataaaagctcccggatgtggctgtccgggagctttgctttatatatggagaagtgtttcaaaatccttttggcacataggccggtaatacagaaagccttggatttcgtcacagccctctgcttttaaaaattctgcaatttcttttgtttccacaccttcgcatacgatagattttcccatacgtttcagcatatggaaaacttcctggagaacgatctgggtgttttcggtcagagaatcccccaggaattttcggtcgatcttaacttcattaaagagcagatctttcagtgtatttaatgaggaataaccggaaccgaaatcatccatagagatttggatattcagctgcttcaggcgtcggatcacctgattgacagcttctgtattatttacataagtggattctgtgatctcaaaggtcagcctggaagtatccacctgataggtatgtatcagctcgcagatcttttttacaaagttttccggttcttcgaaatgaagaggagaaacatttaaggacagccgaaaattttcgggaagaaattccacagattcctgaagccaacggaaggttttttcataaacataataatccaggcggatcacaaagccgttttgctcaaaaagaggaatatatacagctggtgaccatagcattttttggtcacgaatccatcgaaccagaacttccgcactggagatatttccattttggggagttactttgggctgaaaatatatttgaaattcctcgtttttcagtgcctgatgaaaagagtggagaatctcggcctgcattttttcctggcggtcgatctcatcagaataaatacagcaaggagaaagcatttttttggaaagtctacgggctacatttgcacaggaaaggatagtttccggagtggtatcggcatcaggaacaaggcagattccggagttggtacggaaaaaatttacatggaaggtatttctcatacgcttgcagatttttcggtcaagagcttggatctctgaaagaaatgcatcatttgtaagatcagaaatatctgcaatgctgataaaaacatccgagaaaaaacgagtggtaaaaatggtaaaaggtgcaccggcaatttcttcatagaccatgttcagaatctcatttcccagggaatatccatatttatcattgataaaatgaaagttttccacatcagtggagatcagagcaagggaatgggtgtttccggtattactctgaatctgccgaatcttttcggaaagagtttcagaagaaatcgtgggaattgcagtgcctgcagaaacggaacgggaagaaaattttttatttgctgcaattttcttatgcgctttatcctgatacattttctgatctgccgcattaataagatcctgcatcataaagtagtgattttgatagctgacctcgtaaccgatggcatagcttagcggaagggtggttctgctattatattcctgtacaagggaattcagttttcgggccatctgtcgaagagaggcttctgaagtattttgttggatgatgataaattcatctcctccgtaacgggcaaggaaactgtcagaatcaaggatgcgcgtcagacagtaggagaaggactggataaattcgtctcctttttcatgcccgtaggtgtcattgacatatttcagatcattcagatcgaacatcatgacaccgatgccaaaggtactcggacggttatttagctccagaatcagtttttccagggaagttttattgtggacaccggtgatatcacggaaggcttttacgataaggcgggaaagcagctctctctgaatcagggaaagggcaagagtcaccacaagcagagccagtgcaatttccataagccggagcataggataataagaaacaccgggttcctgaagaaatttcaggagatacaggtcaatgatcagcaggattacaagcgccagtagggtgcattcacaaagatgaagtacacttttttcttttttcataaattaaataaatctccttgttgtttactgataaaatggcagagtatttcagacttgcacgatgatcattttggcaaagtcctgattgatgccgatcttgctttcctggattcgtacaatataagagccgaaaagaatcgacagaatccgtaccgttgctccttcaagaaaaccaagcgtttccagatgatggcgttcgttttcattgccgcatattttttgaatgatataatctgtgttgatatcagctaaattcagtggcatagttcctccgacaaaatggttttattttaaattagttgtaactaacattatatcgcaaagaaaagatatgtcaatggtttgcagagtgttacttttgagtaaaatttttcaaagcagttttatatgggaggacaggcagagcagtttgtgatatgataaaaaaatatcgtcaataaatataagaatgtttagaaattgtttacccgacaggcgtataaggaagatgaataaaaatgcagcaggggagatagaaaaatggatacggtaaaatatgatttcagcagactttttcgctgtatgcagcgcgccgaaagaggagaagagctgacaataggcttctttggcggttcgatcacccagggcaagatcctgaagccgctgactaatcttgtgagcagctttgccatgggaactacgattctgctgggacagcagatcggctgtggagagcggaaacagggaggacgtacggtaggaacagctatcgtgatgttcggagtgatcgcgctgatcatgactgtgatccttgtgatttttgcgcctcaggtcagcagtatcatgaatgcgccggaagaagcctttgacaagactgtggattatgtacggatctgctggtaagtatttccttcctgatcatttttgccatcgtgaattccatgggtgtgacagcttctgcaggtgtgggagtggcagaaaaggtctgtgctttcattatgctgatctcttcagcgtttatgcagtccatctctgcttttgtggctcagaattacggcgcgggacagatggaccgtgcaaaaaaaagcactgcattatggggtggcagtttcttttgccatcggcgtgggaatgtttttcctgtcatttttccatggcggtactctggcgggaatcttctcatcggataccatggttattgatgtggcggcagattatctgaaagcttacgccattgactgtatgcttgcggcgattttcttctgctatatcggtttctataatggaatcggtttgacaaagttcgtgatgatccagggaatcctgggagccttctgcgtccgtgtcccggtatcctggttcatgagccgtcagccgggagctactttgtttgatatcggactggcaacgccaatgtcctctgcgctgcagatcgcgctttgccttggctgcatgctgtatctgaaaaagaagcagcgtgtataaagtgacatggtacgggatcattatggtaatggaaatgtacttatatgaaaaaagaggaaaatgctatggtctatacaacggattatcagtcaccactgggaacgatctttcttgcggcagatgaaaaaggtcttaccggtctgtggctggaagggcagaaatactatgctgcccagataaaaaaagaagaatgcaggcaggaaaaaacgccggtgttgaaggatgcagaacgctggctggatatttattttcagggaaaagagccggattttatgccggcgcttcatccggtgggaacagaatttcaatctgcggtgtgggagattctgcgcaggattccttacggccggacgatcacctacggtgagatcgccggacagcttgccgcacagagggatgtaaaaaaaatgtccgcgcaggcagtgggaggtgcagtgggccataataagatatccattatcattccctgccatcgtgtggtaggaagtaacggaagtctcaccggatatgccggcgggatcgacaagaagatcgcgcttctgaaactggaaaaaacagatatgaccggattttttgttccgaagaagggaacggcactgtagaaaaacagaaaacgttttcagaaatatgctctgttgattcttttataattatgataaaataaataaaaattttgtacgggaggaatcatcatggagaatatttttcacagagtaagtatccgaaaatatgaagacagaccggtagagaaagaaaagatcctgcagatcctgaaagcaggtatgcaggccccaagcgcgtgcaatcagcagccctgggaattttatgtggtaacagataaagagaagatcaggaagctttccggtgcgacgccttattccggctgcgcggcaggtgcgcctgttgtgatcgttccggtatatcgcaaagaaggcctggtggtacaggctatggcacagatcgatatgtccattgcccaggagaatatctggctggaaaccgatgctctgggacttggcggtgtgtggatcggaatcgcgccgatgcaggaccgcatggatgaggttcatgacatgctggagcttccggaaaacgtggaggtattttctctgtttgccctgggctatccggcagaaaaaagagaacagcagaaccggtttgatgaaagcaggatccatttcgtggaataaaacagctgactgactgtgaagaaacataatgacagaatcgaggaacaaaaaatggaacatatcgcaaggggtgaagcatttgttttattaaaaaaatacaacaaagacccttttcatattcagcacgcactgacagttgaggcagtgatgaagtggtacgcaaaagagctgggatatggagatgacgcagagtactggggcattgtaggactgctccatgacattgattttgaactttatccggaggaacactgtctgaaagcaccggagcttcttcgtgaggctggtgtgggagaggatatcattcatgcagtggtttcccatggctacggaattaccgttggctgtggaaaaaccattgagacggaaccggagcatgaaatggaaaaagttctctttgcggcagatgagctgacaggactgatctgggcagcagcgctgatgcgtccgtcaaaaagcaccaaggacatggaactgaaatccctcaaaaagaaatataagagcaaaggcttcgcagccggctgctccagagaggtgatccagcgtggtgctgatcagctgggatgggatcttgccaagcttcttaccatgacactgcaggccatggcagacagcgaagatgagattcagaaagagatggaagcagaagaagtataagaatagtaaaaatcaccaatgctgagaagggtgttttgtgaaagaagccttttgcagaaaaaacttttctgcggtaaaataaaagatagaatctgtataaaattcaaacaggcatttatcgtagtaagttaagaaaacaggaagaggtggataacatgaaagaatacgagatcattattgaaacgatcaatccatgcggcggcgagtgtcattcccagcaggagatcattgaagcggagattgagagcccagaagcttatgtgaaacagaacggaagatttccggtgatcgatacggcgcagaatccggacggggatgtggtgatcgtaaccggtgacggaaacggttatatggtaagatatacatttacagaataaaaaaacagcgtctgcagaaagcagcagatgctgtttttttgtcgaaatggaaggcagttatgtataaggaggaacaaaacatgaaagtattaatgcttaacggaagtcccagggcaaagggaaatacagcacttgctctggaagaaatgaaaaaggtcttcgaacaggaaggcgtggaagtcgagatcgtgcgggtaggtcataaagaggtccggagctgcattgcctgtcagcgctgctacgagcttggaaaatgtgtctttgatgacatcgtaaatgaactggcgccgaaatttgaagaagcagacggtcttgtagttgccagtccggtctattttgcttctgccaatgccacactggttgctgttcttaccagacttttttacagcacccattttgacaagaccatgaaggtaggtgccagcgttgtctgtgcaagacgtggcggatgttccgccacctttgatgagctgaacaaatttttcaccatctcaaatatgcccatcgcatccagccagtactggaattccattcatggacgggagcagggagaagcagaacaggatgaggaaggtaagcagaccatgcgtgtcctcgccagaaacatgacattcctcatgaagagcattgccctgggaaaagaaaaattcgggcttccggaaactgaagaaagggaatttactcattttatcagatgaagaggtgattttgatcttcaccttactgtaatcattgacattacaacgggaaggatatatgataagaaaaaacagaagaggtgaagaagaatgcagatatccagcagatttacgttagcagtgcacatttttacatgcattgatacgtttcagaatgaatataaagtaaccagtgattttattgcgggcagtaccaatgtaaatccggtgatcatccgcaagatccttctgcagctgaaggctgccggtctggtgcaggttgccaggggaaccggcggaactaccattaccagaccgttatcagaaatcacatttctggatatatataaagcggtggagtgtgtggaagacaacaagctctttcacttccacgagaatcccaacccgcagtgtccggtaggaaaaaatatccacaatatcctggatgataagctgcagcaggtgcaggacgcaatggagcgggagcttcagtctatcactttggaggatgtgaaagaagatctggagaaatatcttcagtagtaaaagataaaacagaacagaatcgtgaaagcgcatcacagaaatgataagccgctaccaagcagagaagttatgaaatctgctgagtagcggttttttatattgtgggaaattgctcagtgatatttcatggtataaaaaagcacttgagaaaaaaatataaaaaatctagttgtaactattgacattacaataaagcgatgctatattacttgatgtaatgaagaaggttacaacaatgactggccggtcatgattataagaaaatgttatttaagcgaataataaaaataaaggagagaacgatcatgaaaaaagtagtagaatttttacaggcaaacccggtacagtatctggcaactgtaggacgcgatggaaaggcgaaatgccgcccgttcatgttctgttttgagaaagacggaaagctctggttctgcacaaacaataccaaggatgtttacaaggatatcctggctaacccggagatcgaggtttccgtatccagtcctgagtacgcatggatccgtcttcacggaaaagctgtttttgaggacaaccatgaagtaaaggtagcctgcatggagaatcctattgtcaaaggtcagtatgagactgctgagaacccgatctttgaggtattctaccttgagaatccacatggtctgatcgcagacttctccggaaacccgccatatgaattctaattgaatcaacacccaattgattctatgtcataacagactcccgatagcaccaaggcaaattcctgcattcattcctcattcaatggacgcaggaatttcctggttactgttcactctgtgaatagtaacatttccaatacataaaaagcggacatttacaacagatacatttcacaggaactgcatggaggtctgtcctttcggagcagtggaaagaaggtaagctatggagatccgtaaacatcttcatatcgtaaggaggcagaaaaaagtggactggacacagtttttatgcgggatacccgcaagagattatatatttctgaaggagctctatgaggaacagatcacacaggcttcggcatatttaaaggaagcagatcatgtgctgatcggagcaggtgccggcctttctgcagcggccggtcttacctacagcgggaaacgttttctggaaaatttcagcgattttataaaaaaatacgggctgcaggatatgtattctgccggtttttatccatttcagacagaggaagagcgctggggttactggtgcagacattcttatgtaaatcgtatcaaaccaccggctttgccactgtatcagcagctttttgacctggtgaaagaaaaagactattttgtgctgaccaccaatgtggatcaccagtttcagaaagccggattttcggaagagaggatctttgccacacagggagattatggccggatccagtgcatgaagggatgtcatcccaggacctatgatgccgtttccatgtttgcccagatggttcaggcagaaaaggactgtaagattccttcttatatggtgccgaaatgtccggtatgcggcggccctatggctatgaatctccgatgcgaccagtattttgtggaggatgagcagtggaatgaggctgcggaaaattatggaaagtatctgaaacagctgaaaaaaggcaaggctgtactgctggagctgggcgttggttttaacacaccatctattattcgctttccttttgaaaaaatggtacgtgagcacaaaaatacagagctgatccgcctgaacagagacgaggctgtgataccggaaagcttcggagaccgggggatcggaatcaatcgtgacttgtgcgacagcttacgggatattacaatagaaataaaaaagatatccgcagatcatttgcaggacagctgatataaaacccaacagaaaccaaagtgcccaatgggaaaaatctgcggaagtgttacaggcagggcaaaacagaactggtaaataacagaaggaggacatatggatcagaaacagcgtcttgattatcttgtggaaaaattcaaagaagattccggagaatacaggaaccttaaggtctcggacaacgatgcagaaaaaagaagaatccttcgttctctcatgaacattcgcatgccccggcatatggatgaagaaatcctgaaggtgcaggatgaattcctgaaggaagatgccagggaaaaaggaatcgtaaccctggatcagatcccgacggtaaaagaggcgtaccacagtactgtgccttttgcggaaaaaatctctatctggcagggcgatatcaccagacttcaggtgggagctatcgtcaatgcagccaactcccagatgctgggctgttttgtgccctgccacagatgtattgacaacgcgatccattcggctgcgggagtggagcttcgtgcagagtgcagccgccagatgaaccagaaacggatccgctacggaagatcctatgaagaaccaaccggccaggccatggtgaccggtggctataaccttccggcggagcatgtgatccatacggtggggcctattgtttactatgaagtcacggacaagttacgccaggatctgaaaaactgttacgaaagtatcctgaactgctgcctggaaaacaatatccggtccgtagcgttctgctgtatctccaccggagagttccattttcccaacaaagaagcagcagagatcgctgtgaacaccacagaagcctttctggaaaaacatggagatgcttttgaccgggtgatctttaatgtatttaaggatatggatctggagtattataaaaatcagttttaagtatccggtcagctcctggctttatgaaaacagcctcgctgaagactgcatacggttattgtatgccatgccttctgcggggctgttattttattttttaaacagtttatcattacagagatccacaaacagctgggctgttctggaaagaggtctgtcgctgcggtagcacagggacagctgtgaagagatcactggtgtgatgggaatggcacgccagggagagtagctgggtctgggaccgttctcgggaagctggacgtgaacctccatcagcagggccacacaggcctgattagtcaccatgtccagaatggaatcggttctgtggctggtaaaaacgatatttggtacaaaattggcgttctggcaggctattctagcaacaccctcaagtttgcccctcacgaagagcgcccctcaacaactttgattaccctttatatttccagcagattttccagagaaaaaattgattcccaatcaagaagttcttccattttattaagattctggtcagagtgttccagctccctggaaaaacggtaacagattgagaccagatctggaaaggaaaactgcttttgctgcaaaagccaggttcccattgccagctcgtggatcatgaaggtgcagataactgccatttttactttggcgaagatctgttcatcatatacggccccgcagaaatacgtgtagatccaatagagcaggagctgttcttcctgaatcttccagtccggataaaaggtttcgaatccaagacagacatcctggtattgttgttcggtatcacaggcggtatataacggggttaaggtttccaagaggtaatcatgccagccagagcggagaacttccatttgaggaatgatggttttccatatgttttttcgcaggtcagcagaaggctttttggcagtgatccacttgtggagttttttctggaaggaatctccgaaagcagaattttgatgacgactgcggatcgtttcccattgaaacaatttgttccggtccagacagagctgaaaatcatggccgcaggccagaagcttccggcggcgtaacgcacagggaacggaacggtcctggatcacggagaagagatagtctctggtgtccatcagcgcggtgaaaaggaaatagtcgaagtcgtcataagtctcttctggagtttccttttccacagtccggaatgtgattttttctttgtggctgagaaagattctggcggcttccgggcaggaaagagacagagacaattcccgaagtccctcaaattcttcgatatgcctcggatatttacggcaggtatcgcagagcatatctttgcccgcttcgctgtagatatcacagagattatcttcgttcagaaatgcacagcgtttttgataatgacggaaagaatgttccttccagtcgatgtcattcagaaggcggttgcgaaaagctcctttgcagtggcggtattttttgagactgttttgatcgatcatgatctgccagccggcacagcaggtatccggacagctgcctgcgatgcaggaaaattcattacaaaaagtaggtttcgtgatttgcataatagttctcccgaaggttgtaaattttacctggaattatagcactgcataaaagaaactacaacagaaatgaagcgtgatatcctgacagtgttaagaatgagaactggaaattgtcatgtaatctgataagctttttaagttaattaatgtgggctaactgtgtatagtaaagtaaggaatcaaagaagcgagcttatcatgccagatcagaaaattgacaatcttttaaatctagccctggatgctacagaagaggaacgccagaaatccggaaatctgaacacaggatatgatcctgctgggaaaacctgggatgtgatcgtgaaatacacaggcagggaggaggagctttccggagagggaatacaggcagttccgcttctgggaaactatgcagttgttacttttccggagcgtgagatcgacagctattctgaccgagaaaatgtgatctttatggaaaaaccaaaacaactttattttgaagtgtttcagggaaaaacagccagctgcatccaggcggtacagaccggagtggaagggttgaccggagaaggaatccttatgggaatcgtggattccggtgttgattatttccaccctgattttcgaaatgaggatggaagcagccggatcctgtatctatgggatcagggaattccgggaaaaccaccggcaggatatggggcaggaacagaatatacgaaagaagaaattgatgaggcgcttgcacttggagaaaaccagggcagacgccttgttccgtctgtggatatcagcggacacgggactgctgtgcttggaatcgcagccggaaacggaagggcttccggtggtgtgaacagaggcgttgcctatgaaagtgatctcctggttgtgaaaatgggaattccaaaggagaattcttttcccaggacaacggaactgatccaggggatcgattatttgatgagaaaggcattggagatgaaccggccgttggtgatcaatctgagttttgggaataattatggttcccacagaggggattcccttctggaaaactatattgatacagttgcggccatggggcggactgtgatcgttacaggaaccggaaataacggcagtcagccctggcatgcaggaggaatcctgcagcaggggaaaacagaagaaatccagttggcggtgggagtttttgaacccacattaaatgtacagttatggaaggattatgaagatgagatggaaatttatctggaaagtccgtccggagaacggataggtccattatatgaaaggctgggcccacagcggcatctgctggaaaatacagagcttctgatctattatggaaaacccggtccctaccagctgtcacaggaaatctacatagatttcattcctgagggtaattatgtggacagcggtgtctggaaagttcttttgagtggaaaacgtgtgcgctccggacagtatttcctctggctgccgggtggaaatgtactgaatcgcggaaccgggttttattctcctcgggctgtgggaactttgacgattccttccactgccggaaaagttatttctgttggagcttatgattccagacagaatgcctacgcagatttttccggaaggggaagtcagttcctgccgatccggaagcctgacctcgcagctcccggtgtatccatctccgccccggttcccggcggaagctacgccactgttaccggaacttcttttgcggcaccctttgtcagcggaagcgcagctctgcttatggagtggggaatcgtgaaaggaaatgatccgtttctttatggggaaaaggtgaaggcgtatctgaggaaaggcgcacagagtgtgggcgggtatgaggagtatccgaatgtggaggtgggatgggggagactctgtctggaaaggagcctgccaga

SEQ ID NO: 296 - DNA, 833 bp, Unknown
  gut microbiota DNA sequence
cttagtggcattgttacaatcctgagatccttccattgatgcggagatgaattcagttactgtcagagatgctagtgcaaatggcgaagcattcacgcataatgtagataaacaaaaacacaaatataaaaagaaggaggattgggtatgggattatttgataagaaggtctgtgatatctgtggagagaaaataggtttattgggaaacagaaaactggatgacggaaatctgtgtaaggattgtgcaaaaaaattgtcaccatggtttgaagaccggcggcacagtacggtagaggatataaaacgtcaactggaatatcgtgaaaaaaacaaaaaagccgtaatggatttttgtataacacgtcagatcaataccagaaattacaatgtttttattgatgacaataaggggaattttactgttgcacggaagctggatgtcaatgaaaatccggacatagttcctttatctgctgttgtgcagtgcagagttgatgtagagcgacagcagaacgaggaaacatatacaacaaaggatggagaaaccgtaagctatcagccaccggtatataagtatgaatttgattatactatgcgtattaaagtaaaaactccatggtttgatgatatggattttcgtctgaatactttttccataagcagcgataacagaggtgaattgatggaagtggagcagacaggtcatcagatcatagccgccctgacaccaaatgcggctggaatgcagcagcccgggatgaacatgaacagcggaatgcagcagtccggaatgaacatgaacagtggaatgcagcagcccggaatgaacat

SEQ ID NO: 297 - DNA, 5355 bp, Unknown
  gut microbiota DNA sequence
caccttcagaaggcacagccggtaactctggcacaccatgtaggcgcatattttgagatgttccgcagagaccgtgacagactttttgatatccgtaagagaatgaatacctgtccgcttggagcaggagcactggcaggaaccacttatccgttggatcgtgcctatactgcagagcttctcggctttgatgcaccaaccagaaacagtatggattccgtatctgacagagattatgtcatcgagcttctcagtgcattttctacgattatgatgcatctgagccgcttttcagaagagatcattctgtggaattccaatgagtaccgttttgttgagatcgatgacgcatacagcacaggcagcagtatcatgccgcagaagaagaatccggatatcgcagagcttgtccgtggaaaaacaggccgtgtttacggagcgctgacatctattctcacaaccatgaagggaatcccgcttgcatacaacaaagatatgcaggaagacaaggagctgacctttgatgccatcgacaccgtaaagggctgtattgccctgtttaccggcatggtttccactatgcagttcaacaaagccaatatggaggcgagtgcaaagagaggctttacaaacgccacagacgcagcagactatctggttaaccacggtgtaccgttccgtgatgctcacggcatcgtcggaagactggtccttctctgtctggataagggaatctctctggatgagcttccgctttccgagtacaaagagatcagtcctgtgtttgaggaggacatctatgaagccatcagtatgaagacctgcgtggaaaaacgtgtgactctgggagcgccgggaccggacgtgatggagcaggtgatcgctcagaataaagaatatcttgaaaaaaattaagataatgcttgcattttcggaaaaattggtatagtatttacagaaaagacaaatgtgtgccatagagggacacgagatgaggagagttttattatgagtgaaaagcttaaagtcggtattttaggtgcaactggaatggttggtcagagattcatttctcttctggagaatcatccgtggtttgaggtggttactgtagcggcaagcccgagaagcgcaggtaagacctacgaggaggctgtaggcggcagatggaaaatggatactccgatgccggaggcagtaaagaagctggttgttatggatatccacgaggttgagaaggttgcagctactgttgactttgtattttcagcagttgatatgactaaggatgagatcaaggcgatcgaggaagaatatgcaaagacagagacaccggttgtgtccaacaacagcgcacaccgctggacaccggacgttccgatggtagttccggaaatcaatccggagcacttcgaggttatcgaattccagaagaaacgtctcggaacaaaacgcggctttgtagctgttaaaccgaactgctctatccagagctacgctccggtacttaccgcatggaaagagttcgagccgtatgaagtagttgccactacataccaggctatttccggagcaggaaaaaccttcaaggactggccggagatggagcacaacatcattccgtacatcggtggtgaggaagagaagagtgagaaggagccattaagactctggggcaagatcgaggacggcgtgatcgttccggctaccacacctgtcatcacatgccagtgtgtacgtgttccggtcctcaacggacatacagcagctgtattcgttaaattccgcaagaaacctaccaaagagcagctgatccagaagctggttgagtttaagggacttccgcaggagcttgagcttccaagcgctccgaagcagttcatccagtatcttgaggaggacaaccgtccgcaggtacagatggatgtaaactatgagaatggaatgggagtatctgtaggacgtcttcgtgaggatactgtttatgattacaagttcatcggactttcccataacacagtaagaggtgccgcaggcggagcagttctctgtgcagaaactctgaaagcgaaaggatatatccaggctaaataagaactggatcctttacaggaaataaagaaaatcatcagaaacgggatatcggtttttccggtgtcctgtttttgcgtatgtggaaggaacaaaggagatatgcgcagaaaagtaattactacagttgtgacattttccacaaccacggctgccatgaaaatggaaagaacggccaaggaatccgaatttccgggaaggctgatcccgatcccttcagagatcagtgcccagtgcggactggcatggaaatgcgtggagcaatcagaggaggaaacagaaaaatttctgaaaaaaaaggaactggcctgggatggcatctatcgtgttctggtataaaacggatattgtttgttgtatgtaacaaaacggaaatttttgaaaattttcgcatttttattgttaaataattagtaaagtgttacaatataacaagcagatttccggaaagcgtgttgctgtgaacaaagaagcagcaacaaagtgccacgcttgctaaaaatatgtggaggtgctatttatgaacagggaggatgtagagaaactgtcaaccgctgcgaagggtaagataaacttactgaacagcaatttcggaaaatactttatgcgggcgatcatggccggattttttattgatgtggcgatgatctacagtaacgttgttggaaatgtattttccaagacattcccggaatgggggaaattccttggagccatcgtgttctctattgcggtcctactgatcgcaatggtaggaggagagctgtttaccggtaacaatctggtaatggcttttggtgcgtatgacaagagcgtatcatggaaagatgttggaaaggtctggggaatcagttacatcggcaattttgtgggatgcctgatcctggcgctgatctttgtaggtgccggagcgtccggtacagcagattattttgccggatttataaacggaaaactgagtattccggcaggacagatgtttttccgtgcggtactttgtaatttcttcgtctgtcttgcagttctctgcggcattaagctgaagagtgagtcaggcaagttcctgatgatcgtgatctgtatttcaggtttcgttgtcagcggatttgagcattgtattgcaaatatgggtatttttacagttgcattctgtatggtgccaggattgtctgtcggcgctatgcttaaaagcatggtgatcgtaacactgggaaatatagttggcggagctgtgcttctggcatggccgcttagaaagatgagtgcagataaatagtatggcaaaggctttatacatagcggagaagcccagcgtggcacaggaatttgcaaaggctttgaagatcaacggtcagagaaaagacggatatctggaatctgatgattctgtggtaacctggtgtgtaggacacctggttaccatgagctatcccgaaaaatatgatatcaagtttaaaaggtggagttttgataccctgccttttttgccgcgcgaatttaaatatgaagtgatacccggggtcaaaaagcagttcgagatcgtaaaagggctgctgaaccggccggatgtggataccatttatgtgtgtaccgactccggacgtgagggtgaatatatctaccgtctggtagcccagatggcaggagtaaggggaaaagtccagaaacgtgtgtggatcgattcccagacagaggaagaaatcttaagagggatccgtgaagcgaaggatatctcggagtatgataatctggcagcatctgcgtatctccgcgcaaaggaagattatcttatgggaatcaatttttccagagttctgaccttgcgctacggaagcagtgtcaccaattatctccattccaaatatcaggccattgcagttgggcgtgtgatgacctgcgttcttggcatggtggtgcggagagaacgggagatccgtgtctttgtgaagacacccttctaccgtgtccttggcagcattggacttgcaggcgaaaattttgatggtgaatggagagctgtggaaggcagccggtatttccagtccccgtatctttataaagaaaacggcttcaggaaaaaagagcatgcacagatgctgattgatcagctgatggtgaaccagcccctttcttgtattgtggaaaaggtggaacgaaaaaaagaaaacaaaaatccgccgcttctttttaacctggcggagcttcagaatgtgtgctcaaagctgtttaagatcagtccggacgagacactccggatcgtacaggagctttatgagaagaagctggtgacttatccgagaacggatgccagagttctttccacggcagtggctaaggagatatacaagaatatatccggtcttcgaaattatcagcaggccggtgctgcggcggcagaggttttggggatggaatcctggaaaagcattgcaaagaccagatatgtgaatgacaagcagatcacagaccattacgcgatcattcctaccggtcagggattgaatgcgcttggaagcgtgtctcttactgcgcagcgtgtgtacgagactattgtacggagatttttgtgtattttttatccgccggccgtttatcagaaggtgagtcttgtgacgaaactggacggcgaggcattcttttcatcctttaaggttctcaaagaagaaggctatctgaagatcgccacgaattctttttcgcggaaaagggcttcagacagtgagaaaaacggaaatggagaggaagacgaggtttcctgtgatactgtgctcctggaggcgttgcagaagctgaaaaagggtgatatacttcctgtgaacggtttgagtatcaaggagggtgagacttcaccgcccaaacgatacaattccggttccatgatccttgccatggaaaatgcaggacagctgatcgaggatgaggagcttcgagcccagatcaagggaagcgggatcggcaccagtgctacccgtgccgagatcctgaagaagctttttaacatcaaatatctggcactgaacaaaaagacccaggtgatcactccaacgcttcttggggaaatgatcttcgatgtggtaaattgttctatccggcagcttctgaacccggagcttacggcaagctgggaaaaggggctcacctatgtggcagagggcagcatcacggaacaggaatatatggacaagctggagcattttgtgcgggtacgtacccggcaggtggaggcaagcaattatcagtataacctgcggcagttttttgatg

SEQ ID NO: 298 - DNA, 454 bp, Unknown
  gut microbiota DNA sequence
acctcaccaactagctaatccaacgcgggtccatcttataccaccggagtttttcacactgagccatgcagctctgtgtgcttatgcggtattagcagtcatttctgactgttatccccctgtataaggcaggttacccacgcgttactcacccgtccgccactagaaacaatctaaatccgccgaagcttcaataaaaggtttcccgttcgacttgcatgtgttaagcacgccgccagcgttcatcctgagccaggatcaaactctctgataaaatgtttgattcatttactcaagacaaccgtttggctatctctcgtttttactgcttttggtttgtttaaaccgttctttaaatgtaaagaaattttcgagaatcatatgtgtttcactgtttagttatcaaggtttgttgtgtctgtctctcagacagctcgtttattttatctcatct

SEQ ID NO: 299 - DNA, 42609 bp, Unknown
  gut microbiota DNA sequence
attttggttcgttagaaccgttcttaaaaatgtaaagaaattttcgagaatcgtatgtgtttcactgtttagttatcaaggtttgttgtgtctgtctctcagacagctcgtttattttatctcatctctttttgtttgtcaagcacttttttaagtttttttcaaacatttttgagttaagatcttgttgtcgttttgttgacgacttggatactttatcatatcttctgtcttttgtcaactgtgaatttcatttttctgaaattctttttaattgtttgttttttaaaagcaattatttgcgacagctcagttataataccactgggagttatgcttgtcaaccataaatttcaatttttttagattttcctggaagtttatttttataggacaatttcttattcttatttgtaatttttaggattatctttattgttgtttattgtgttgtttatcgtgttgttttttaataataagtctcttcgctggatggcgctatgccggtcgcattttcaatgcggtaagtgcgagggaaggcgatctcagagttccgtagcccgaacgccctccctcgcgctcccaccccgttgggcacggaaggagttctgcgttgttgtatgtactgcgttgttgacttttgtctgtatgcttcggtattggatgtggaacgttgtgccgatctggttcctggattcttcggtacttatggtggtatgctgtgccgatctgcgatctggttctgggattcttcggcacttatggtggtacgctgtgccgatctggtccctgtattcttcggtacttatggtggtacgctgtgccgatctagttcctgtattcttcgatatttatggtaatacgctgtgccgatcccgtttctgtattcttcgatatttatggtgatacgctgtgccgatcccgtttctgtattcttcgatacttataggaatattctgtaccggtctgacatttcaggacaggacgcccagtccgtttccatcccccgcatgttttttcctgtcggttggaagcgtcagccagaggaaggtggcatcgggccgggctgctgcggaggaggggtgattactacttgggctgcgggagacggcgttattgcggcagggcctgctgtctgagccgcaggcgagttctggccctgccgcaatgcttttagccgtctcacggagccctagtagtatcccccgacggagtccctgcccggagcgatgcctccttcctctggcgttcctcaaccacatccacctctcaaaacctcaaaaacatccccgactgcatccactcccggagcgatgcctccttcctctggcgtccctcgaccacatccacctaacgaaacctcaaacgtatccccgcctacctccaatgctaagagcagacgtcaaaaaaaatctctcgcacaggcatgagactccgaccttctctttcccaagtcttccgtaaaaaaataaaatgtattatacttattgacaagcggataaaaacatccgccgctgtttatggcaaatatcacacaaagggaggtttttatcatggaatacagacgttttggaaacacgatctatcttcgtcttgatccgaaggaagagatcctggaggagatcggcaaggttgcaaaaaaagagaatatccgccttgcacaggtcacaggccttggcgccatcaatgatttcactgcaggcgtatacaacacagtgacaaaggaataccactctattcagttccagggagcgtttgagatcgtatcacttaccggtaccgttacccgcaaagacggtgacgtttatcttcatctccatatcgcagccggtgacgaggaaggccatgtacacggcggtcatctaaaccgtgccatcatcagcgctactgccgagatccagatccaggtgatcgacggagagatcggccgtaagttcagtcaggagatcggtctgaatctgtttaaattctgattttgccagagggatcccggacacagtctactgctttacagtttaaaaatttcatcacacataaaaagggtaagactacacagcataatgctgtcagctcacccttttctttagcttcaatattgccctcttccgcaatatctgcaatgctgtcactgctgtcgccaaactcttccgcactttctgtcacggttccggcttccgccagcggcatttcctcctgtacataggccgtcacggttcccgctgacagagatgtgactgtcacggacgccgcaagcagccaggccatgatggtactcgtcttttttcgcatacctgttcctcccttttcctctaattcactttacagttttctgtaaagctgatatcactgtgaatttgcctgatattttctgttctgtcaacaaagtggattttaacaaaatctggtcaaacagctattcgcaattgaagcagaggacttccctgattcaccgacatttacattgacaaattcccctgttatgatatactttgatgataaaactattttatactaaaattatttaacgaaagcaaatgaatgtgaggatctgattattatgaagaattttaaaatcggtgataaacttacgagatttcccctgatccaaggtggaatgggcgttggtatcagccttggccgtctggcaggcaccgttgcaaaggaaggtgggatcggaatcatttccaccgctcagatcggctaccgggaagaggatttcgaccggaataccgaagaagccaaccagcgggctatcctgtccgagatgaaaaaagcacgcaggatttctcctgacggtatcatcggctacaacatcatggttgcactgaaggagtacgcatctcatgtaaaagccgctgtccatgccggcgctgacctgatcatctccggtgcaggacttcctacagagctccctgctcttgtcagcggaagcaaaacaaagatcgcccccattgtatcaacggacaaatctgcaaaggttatcctgaaatactgggaaagaaagtacaagcgcactgcagaccttgtggtgatcgaaggtccccaggcaggcggtcatctgggcttccacaaggaagagctggattcctatacaccggaagcctacgacaatgagatccgaaagatcgtccagaccgtaaaaggctatgccgcaaaattcggcacggaaatccctgtagtagctgccggcggcatcgccactcacgaggatgtaaagcatgtacttgatcttggtgtggacggcgttcaggttgccacccgttttatcccaacggaagaatgtgacgcagacattcggctgaaagaatccctgatccacgccacaaaggacgacatcgccattgtaaaaagcccggtaggtatgccaggtcgtgccattatgaatcccttcatgcagcacgtcatggccggtgaaaaaatcccgcacagtccctgccaccgctgccttgccaaatgttcccccggcgagatcccttactgcattactgacaagctgatcgccgccgtaaagggtgacgtggaaaacggtctgctgttctgcggagcaaaggcttatatggcagataagattgaaaccgtgcacgatgtgatcgctgatctgtttggcacagagccagaatgcatctgactgtcataaagataaacctgcgctgtcaggcgcactacacaaaaagcccctgctttcattgcttttcgcagtgaaaacagggacttctgtttttctaccggttatcgatcttttccgggtacatgtcatgctctgtcaggcgtttccaggcaatctcctcccatctggttccggcctttccgtaattgcagtagggatcaatggaaatgccgcctctcggagtaaatttcccccagacctcaatgtatttcggatccataagacggatcagatccttcataatgatgttcacacaatcctcatgaaaatctccgtgattgcggaagctgaaaagatacagcttcagagatttgctctctaccattttttcaccgggtacgtaggatatcgtgatcgttgcgaaatctggctgtccggtaatgggacaaagacttgtaaattccgggcagttaaattttacaaagtaatcgttgtccgggtgcttgttcaaaaatgtttccagtacctccggagcataattgtccggatattttactttctgatttccaagaagggtgatcccttctttttccaggttttctctgctcatatttttttcctttctatggtcaggcggatatttataatccaatctatctgtcaagtgccgggtccttcactccattgagacggaatgcctctgctctgtcaatacaggttccgcacacaccgcagggcttttcgccgccttcgtaacagctccaggtcagttcataaggaacattcagttccagaccggtttttacgacctctgcctttgtgcagctgacaaagggcgcctcaaccttcagctggccgccgcttccctgatagatcgcctcgttgatcgcattgtgaaacgcactgctgcagtccggatacgcatttccggcagcatcatccgcatgcgctccgtaatagatcacactgcagttttttgacagcgcaatacttgctgccgaggaaagaaataatccgttccggaacggcacataggttgaaaccggtgagccgtcggtttccttcagctgctctgcatagctttcgtgagggatttctctgtctgaatgcttcagaagcgaacagtcactgtaccggaagatcggctccagatccagataaagatgttccactccgtaatattctgctgtttttccggcagcctcaatttcttttgtgtgcttctgtccgtaagctactgttaatgcaattacattctcttttccatatttgtttacggcaagccccaggcaggtggtggaatccacaccgccgcttgcaagtacaagtgctttcatatcgttctccctttctgcggtatttctgttatgttgtgatatattttcctgtcatactccccgtttctgcggatcccagatcaccttatgaagctggatctgaagctttacatcgttgagctttttttccataaggaaatccacgatctccaccggctggatcctgccgaaaacagggctgaagtaaactgccgtttttccgatcagtctgtacttttccaggatttccagggctttttccatatctctgcggctgctgaccacaaatttcagcgtatcctcactgcccagaagctccagattggaaaggagcatctctttttccatgccgctgtccggtgttttataatccatggtaaaggatggacgtttttttaatatatgataaggcttcagatccacgcttccattggtctcgatctccacccgctgcgatggatcctccaggattgcctcgatcagctcctccatgcctttccgtaaaagtggttccccgcctgtaagtgtcacattttttacgcctgtctcacggatccaggaaagaatctcttcttttgtcagcctttcactctcacatcccggctcatttgcccagctggtatcacaatagctgcatcgaagattgcagcctttaaatcttacaaaagcggccagctccccggcccgtctgccttctccgttgatactgacaaatttctctacaacctgatacgtactcataaccctgctgcctccctttcttcttccgattcccggtaagccgcacagttatttggtgtttcgtaaacaactgctcttttcacagaataacctttttctttcatttttctgaaaaaatactctgaaaaattctctgctgtagggcgaaagggaaccttcaccagatgaaatccttcttcgttcagtgcttccagggtttttggacgcaatgtattttcttcatagatcagcgtgtgatccatggaatctgccagctccttcagatcctttttcagatctccgaaatctaccagcataccgcgctcctgaccgtttttctccagctcacgactttctatctcaatctccacatgccagcgatggccatggatgttggaacacttcccggtgtaaccggacaaaaaatgtgcggaatcgaaatctgcttctgtttttaactgatacataaatttttcctccttctggatctttcacaccacccggatatttccataaataagaaaaaatcctgcttgcaggattcccggccgtgattcttctgtgatctgcatgtcaggcggatactcgcgattcgcattcgctgcgcagctttaaaccgaataactgcttgattcggttaaagtaaaaaaaggcagacccgccacgagtctgccctgattctcacatcttcttcagccctggttttatttatagacaggatggtacaaacgaactgtcttatatttaatttgtatggtatttccggagatactgcatcaaacgataaatcggaccagtacagcgtttcgtaaataactataccaatcgcgtaggatgtggattcgagtgtgcaggtataaaaacgcaggcgtagcgggctacgccgaggcttttatacctgtgcaatcggattcacagacaagtgagtggtatagttatttcgaaaacgctgtactagatcatccacgctcgctgctcactcatgagcgcagccgctccgcaacgatctatgggaactttcagctccggaattacggtaaatttcctgcgggattatcttcttccgcagcacttcttatatttcttgccacttccgcacggacacggatcgttcggatagatttttcttgcagatgccggctgcatcggcattgctgtcggcacaaagctgttcggcattgcagtgtgcggcttgcctgtggcaaacggccatactgctcctgaaatctcattcggtgtgtaaccgcggaattccagcattcttgtgttattgtttgcctccatgatcagctttgtaaatttctcaagctgctcatcgttaaactggatccccttctggttcaggttttccatgatcgctgacattctgccatccatggagcattctttgtaaataaagaacagtacctgatccttcaccgcatcagaaaccttcatctcatccagcaggaatctgcccagtctctggtaagaagcagattttgtcggataaccgttttcggaataatccaggatctcatctacggacggaatatagaatttccgtccaccctgacgtctctcgatatccttgtagatgttattgaccagtgcggatttcaggatcagctgatcctccgcaagctcacagatgcaggccttctccggaatggtatgatacagctcgatgaagctgtcatatccgatgtcaaagccttttctctgcctgaacatctcatatacagtttttgccggtgcagatacatacagatagcttaccatgacaagacaatccttcagccagtttacctggctgcgaagtgtccggaactccggtgtgttgatctggtcgtaaacagctgcaacctctgccggaacttctgcgtaatcatcactgtaggaaacaagatagcccatatcgttcagccactctaaagtattccactcatgctctgcaacatggaagcattttctctgaatagctgcctcaaaagccagtacttcctgatcgtctgctacgaggaagcttgctttcataacctccggtttaagaacctctgcggcaacctttgcggcgatctcttcctgttccattcccttgcagtgaagtccaagctcacctgcaatgctgagaaggtcttctttacgataggacatgaggaaatcttttactgtaggatttcttctgctgcctgtggctgcctcatctgcttttgcagctctggcagctgcctctactgctgctactgttgcagcaatgtcctcagatgctttgactgtttccgcctctgtctcagctgctgcagtgcattccagctccggtgcctctgtccagtacggatcatcctcaccctttacttcttttacaatagaaggagcttctgctgttccctcgtctttcttctcaatgtcaactctgtattccggggcttccttatccgcaccatactgacggaaagtaaaccatttctcggaatccataagctctgcagtctctgtctcgcctgcatttaataatgtgaaattattctttgcttctccgtcaccattctcacggatctgtacttttttctgaaaaaattcaatctcatataggctgcctgacggatactgaaccagtttttcaagcatggctgccatatttgcaaatgtaacgtcagccgcaacagtacaacgtctccataccggcggtttcgttccttttcttgtgatttttaactgataaaacattcctgtgttcctctcctgtaaatatatgccggatcaggaggcatacacagctcctgacccggcgtaagcaacttcccctatgttatacaaaaacatggaaattgtcaatatttgagaggcttctacaacacaatatcatatttctcaacctggatcacagcatttccgtcactgtgaaacaggatctcatctgcttccactggtgttgggatcacggtagtcgcagttttgcttccatcattgataaaaagctctatggagtttcgatccaggataaaacgaagcttcagattttgtctgccatctgtgatctggagctttcttgtacatacaacatcacgctgcaccccgctccaggttctgtcgatctccagtatctgtctttttcgatcataggtaaagaccgttgtatattcttcattgcgtgcaagctcgatctggaactcattgtacacacccaatgcttcctgatctggatttccggaattcctgcttccatccacgataccatctgcgttctgcagttccacgatcagatcgatcattcggccacggacgccttcaaggcttaagctctcacccacatttacattctcataacagcaacggtttttccgataattctcaatttcccggaccggcttctgccagatctttccatcacgatattccagttctctcggaagcgtcatcattccctgccatctctgcttctccttgatcacacagctatcccaggatttcatccaggcgatcatcactctccgaccatctggaagcaaagtagtctgcggtgcataaaaatcaagtccataatccaggctaaccggtttctcttcctggaacacatgtttctcaggatcataggatccaacaaaatacacggcattatgtccattgtggaattcatagccccgggcccgcatatgctgcggtgaacagatcagcacatgcttctcgcccagtgaaaagaaatcggggcattcccacatcacaccgatctctcctgttttgttttccgcgagaattgtttcaaatttccattctttcagatctttaccggaaaacagaactacctgtcccggaatttcttcgctgcgacatcctacgagcatatagtacgttccgttatcttcccatatcttcggatcacggaaatcaactctgctgcatttctccggaagcatatcaccggtgactaccggatttttctctgcttttacataatcttttccgtcaccccaggcaaggcactggttctgccggacttcttcttttccatcaggcagcttttctgttgtaactcctgtatagatcaaagcctgttttccatccacttcaatagcacttccggaaaagcatccctctcgatcatattcctgatccggtgcaagcgctgcaggaagctgctcccatctgatcatatcctctgtcacgctgtggccccagtgcatagggccccagtcacggctgtaaggatgatactggtaaaaaagatgtacctttcctttaaaaacagaaaatccattgggatcattgatccagccaaccggtgcagatacatgaaagtccggtttctcttcctgtgggatattttttgcttcctctatttcataaagacgtgctttttcaagtttttcactcatactctgctctctctttcttttttatgtttctgaccggtatctttttctgtttttatttctctgtctcaccaagagacttctgatactggtcaaaatatttctgtttgatcgccagataatcagacagtccatactgctccatctttttcagataggaatcccattctttatcgatgccgccattcaggatccagtctgcttttttctgttctgcatacttcttgatatccgtgtcgtactgagataccttattggtatcatcaatactcataaatacattgggatacacatatttactgttcatatccttaagatacgtttcgtgcatattgtcgagacgccattttgcatctgccggctctgttacatatacatcgtaataatcgttaagtattgccaatggtccgtttacagactgtgcttcacgaacctctaccggagaggcatctcccagatccatatgtttcagcatctgaccaccttctgcattctcggacatctcaaagatattaaatgaatctttttctccgtaagtaccccagttattctgcggagactggatcggtgcatacatctgatcgatccaggctgctgccagcgccgtattccgacagcttgtagtcagaacgcagcgtcctctgtcaaagccactggtttcactgttattctgtcttgtgatatttacaaggccatccggaccggccagcgccgggagcattacataatcttcattgttatcaatatttgcaatatcccaggtaaaacacagaccatatctgtggttcttaccttttgcaacataagttgaccattcctgggtaaaagcctccggatccaccagattttcttctaccagctgatgaagccactggatgccttctttataaccttcctgtacagttgtataaataacagttccatcatctttcactgcaaaatgatcaccggtgtcaccatatccttctccaaatccgttgagcagaattgccggatcctgatcaccgttattgataataaaggacatcgggattacatcaccctcaatatcaaattcctgttccagtttatctgcattatcacgaaaagcgatcagaacctgttccagttcctcagttgtattcggaacctccagcttcagataatccagccattttttattaatgtagggaatatctccaattgcctgaatagcttctttcccctcaccaagctgttcgatccatgggaaagaataaatatgtccgtccggtgctgtacacattgttctgtattccgggtatttttcaaatacagcctgaagattcggcatgtatttatcaatgagattttctaccggaataatgattccctgtttggcataacgaagaagatcataatcactcatccctgcgttaaaaagtccatccggaagatttccgaactgtgccagcgccagattttttttgtcattaaactgatccgatacaaaacaggtccagtcaatgtggacattggtctgcttttccagtcttttaaaaatcgttctttcattaggttcctgtgtagatgttgcaggtgcactggtaataaaagacagctcttctttttctttcagaggaaaagccacatcttccaccgggatatccggatctgtttctgctttcatgtgttcttttccgtttccacatccggcactgcataccattataattgcagaaagcccgattgccaataatgccttcattctttttttcatcattatcaacctcctgtcatcagccttttacagaaccaaccataatgccctggtcaaaatatttctggaagaatggatacatgatcagaagcggtaaacttgatacaatgatcgtagcatatttcagaagttccgctacctttgccatctgtgcagtactctggatatctgcgatcattccgggctgcggtgtattctgcacaaggatggaacgaagtaccagctgcaatggctgcagtttcgcatcattcaaataaatcatagcgtcaaaataactgttccacattcctacaaaggaccacagtgcaagcactgcaatgatcggtttgcataccggcatcataatcttgaaaaaatgctcgatttccgtggcaccgtcaatggcagatgcctctctgagttccttggggatagactgataataggttctggcaaggatcatgttccagacattaaacgcacccggaagcaggattgcccagatcgtatttaccagatgcagctgattgatcaggataaaagtcgggatcattcctccaccgaaaaacatagtgatgagaaaaataacattgaagaaatttcttcccacaaattctttcttggacattggatatgctgccagcagagttaccagaactgaaataatggtaaacaccagggaataaaaaaatgagtttgcaaagcctctccagatcatattattttcaagaactctgcggtacgcatcgatcgtccacttccgcacatcaaagctgatcccctggctgttcagcacattcggatccataaaagatgcgatcacaacatataaaagcggaaccagaatggaaagtacaaatgcacccagaagcacgtatccgattcctaaaatggctttgtcagatgccgaatatttctttttctttgcttttgccataacagcacctcctataatccctctccgtcattcagtttcttgactacccagtttacaaagatcaaaagaattacattgatcactgaattaaacagccccactgctgtagaatatccatagtctccattcagaagaccgattctgtatacataagtagaaagaatctcagatgcagggaggttcatatctgtctgcagtgcatatgctttttcaaaaccaatgctcataatatttccggcctgaagaataaactggatcacaatgatgtttttaatagccggaagctgtacataccagatctgctgcagaatatttgctccatccaccactgctgcctcttccagatccttacttgcattggcaagtgctgctgtatacataatggatgcccatccggctgtctgccagattccgctggctatgtaaatggtacgaaatgctgccggcatggtcatccagttggcatcagaaccgatcagtttattcagcggacctaccggtgaaagaaacatacgaaccataccacagagtacgataacggaaataaaattcggcgcatagatcagaagctgaatttttttcctgatcccggctctccggatctgattcagaagaagtgccaggatgattggaatcggaaatccccacagtagtccgtaaatactcagtttcagagtgttcacaagataattcataaaatccggtgatgccagaaatctccggaagtattccagtcctacccatttgcttccaaatacaccatcaatgacattgtagtcctcaaaagcgatcagtacgccacccatgggcacgtatttgaaaatgatcgtcagaagaagtgcaggcagcagaaaaaacacatacagctgccagttctttttcacatactgaagcttttctgcagcagttctttttcctgccggaacagctttcgcagaaccttttttcattctcttttcctcccttttttgttctttcgtccttgtttagtaaccggtaaagtaaccggttactttataatttgatactactatatgccatagcttctgtcaaccttttttgttaatttattcaaaaaaagtaaccggtaacttaactggttatttttttattgctatttaacgtctgtattgttatacttaattatatcaatccaatcatcctgtacggtctgcagatttctcttatatgattgcatctgcattccgtatcataactttctgctgttaaaaggagaatatttttttatggctaaaaaacaggtaacatttgccgatattgcagaatacacgggtttttccaagaccacgatctcgagatatttcaatcatccaaattctctgactctggaaaatcaggaaaagatcgcaaaagcccttgatgagctcggctacagaaaaaacaagcttgccagggttcttgccaatgggaaaagcgaatttgtagggatcattgtcccgaacctttatcttcattattattccgaaatgctgacacagcttcttcgaagttactccgactatcattacaaatttctggtttttgtcagtgatggcggcccggagaaagaaatgcagtatctggacgagctgatggcttataagattgaaggacttattgttctcagccatactctttcctctgaaaaactggcttcttataatattcctgtgatcgccattgaacgggaagcggaacgtatatgcagcgttacaacagacaattacatgggcggcatgcaggctacttctctgctgatacgtaatcggtgtgatgtactgatccacatcaatgtccatgtacctgagaatattccggcttatgaccgtatccgtgcctttgaggaaacatgccgggaatatcatgttccttatgaactgaaccttaatgtttccggcgattcctatcaggagctttttgaacagatgcgtgtgatctttcaggatattgacagtaaatattccgggcagaaaaaaggcatatttttatccaatgatacttacgcaaatatatttctcaatctgatcttccagaaatacaactgtctgccggatgaatatcagatcatcggattcgataattcgcccattgctgcggagtccatcatcccgatcactactatcggacagcagattgatgtgatcgcacagactaccatggaactgcttgtggaacagatgaacgaaatgaaaaaaagaaaaccggcaccgcttcaaaaaccgattcacaaaaagatcactcctgttctgatacgccgacagacaacaggagagtgaaaatacttacataaatatctattcagggaggaaatcatgaaaaaagatcaggaaatttttcagaaacgtttaaaccatcatcacgacgagcttcgatggctgtacacagagctttatcacaatgacgatatgtttgcagagctctgcgaccagatgtaccagtattttacagcacgccgccgcgctctcaaaaaccgcgatctcgaaagagaaaaaaatccggactggttccgccagaaggatatgctgggcatgatgctctatattgacaattttgccggcaacatcaagggagtttctgacaagcttccatatcttaaggaatgcaacgtgaactgtctgcatctgatgccgttcctggataccccgaagggccgctccgacggtggttacgcagtagccgacttccgcaaagtccgcccggaccttggtaccatggaggatctggctgcacttgcagataaatgccacaaaaacggaatgaacctgtgtatggattttgttatgaaccacacttccgaggatcatgagtgggccaaaaaagcacgccagggtgacggcgaatatatgagtcgttacttcttctacaacaaccgtgagatcccggacgagtacgaaaagaccgtaccacaggtattcccgaccactgctccggggaactttacctggcttccggatatcggtcactatgtcatgactaccttttatccgtaccagtgggatctgaactacggcaatccccgtgttttcaatgagatgatgtacaacttcctcttccttgcaaatcagggaatggatgtgatccgtatcgatgcggttccgtatatctggaaggaactgggaactccctgccgtaacctgaagcaggtacatacgatcgttcgtatgatgcgtatgatcgccgagatcgtctgcccaagtgttgtacttctgggtgaggttgttatggagccggaaaaggttgttccttatttcggaaccgtagagaagccggaatgccatatgctttacaatgtaacaaccatggctacaacctggaacagtattgccacccgtgatatccgccttcttaaaaaacagatggacattgtaaacagccttccgaagcagtacaccttcctgaattatctccgctgtcatgacgatatcggctggggacttgatttcgccaccctgaaagaatggggcatggatgagccctcccataagcgttacctgaatgatttctttacaggaaagcatccgggaagcgacagccgcggagagctctataatgatgaccctgtaactcaggatgcccgtttctgcggaactactgcttccatgtgcgggatcgaggctgccctttttgaaaaagatgacgagaagctgaaaaggggtatccgtgaggatctgatgcttcacgcatatatgcttacccagtccgggatcccgatgctttacagctccgatgaaatcggacgtctcaatgattattcctataaagaggatcctgataaggcagcagattcccgctatatccaccgtggtgctttccagtgggagcttgccggaaaaagaaaatccaaagcctccgttgagggacagatcttccagactctagaccgcatggagcagatccgcagccaggaatctgtttttgataaagactgtgatgtatatacatacgatgttcatgatgacagcattctctgcatcctccgccagaaaggaaacgaacgtttcatcggaatcttcaacttcagtgacagcgaaaaaactgcctggatgcaggaggaaggaaccttccgcgatcttattaccggacagacactggaacttaaggacgtagtacttccagcctatggatttatgtggtgtaagaggatataatcatcctgtggcagtttccaggatcatgagatcactgacttacctttaatttgttattcttgtaaataaaaaagacgcggacttacggatcgatatatttcgttcattaacaactcagtaaatgaacgaacctgtcaatccgggtccacgtctttttattatgtaatatctttattttttataagctgttctgacattcagaaattacttgcagagctcctctgccattgcatcgatctctgccacattctcatcgctgagggaggacatgatctttacattgttctcaagccatgtgatatttttgctcttctcgaacattcctttcatgactttggctgcagtcggtgcccagcttccgttctcaatgaggccgatggtgcggttctggtaattacgttctgtcaggttctcaatgaatgtacgcataaacgggaatgcttctccgttgtatgtaatgctggccagtaccagcttgccgtagcggaaagcgtcttccactgcctctgccatgtcttctcttgcaagatcgcagacaacaaccttcgagcagcccttttcttccagcttctgtgcaagaagctctgctgctttctttgtatgtccgtatacagatgtgtaggcgatcattacgccttcgctctctactttataagaagaccagatatcatatttctccagataatgtccaagattttcggtaaggatcggtccgtgaagcgggcagatggtctggatatcaagagttgctgctgccttgagaagcttctgtacctgcggaccgtattttccgacgattccgatatagtagcgacgtgcttcgcggtcccagtcctcttctacatcgagagctccgaatttgccgaagccatcagcagaaaacagcaccttgtctgtgctgtcatatgtaaccatgacctccggccagtgaaccatcggtgcaaatacgaaggtaaggacatgttttccaagtgtcagggtgtcaccgttggctaccaccagcttctttccctccaggttcattccacggaagaaattctccatcatggtaaaggtctttgtgttggcaacaacagttgtatccgggtatgctttcatgaaattctcaatatttgctgcatggtccggctccatatgctgaactacaagataatccggtttcgcaccatccagaacttctgcaacttttcccagccactcttctgtgaagccggcatctacagtgtccataactgcgatcttctcatctttgatcacataggagttgtaggacattccatttggtactacatactgtccctcgaacaggtctacctgatgatcgtttacgcctacataataaatatcatttccgattttcattgtattggtttcctccttagtctgctgtattttatttttccaatatttctgaaaatattttcttattgctctcatttattatatcattgttcgtactgaaatcaatgtagaatctataaataaaaacaaacctctgcgcctggtgaaagagccattttcccctctttacaaacctatttcaacatagtattgtataccttggatgaaggatttttttataattttttatgaggtaaactatgtgtgaaaatgaaaaaaagaaaacgcattccattgagatgacctccggctctctctggaaaaatctcctccttttcagccttcccctgatggggtcacaggtgttggaggttctttttaacttaagtgatgttgcggttgtggggcgatttgcagattatatggcacttggagctgtcggttccacaactctgctggtcactttatttaccggaatcctgatcggcatgggcgccggagtcaatgttcgtgtagcacacgagcttggtgccgaaaacagaaagggtaccgaagaaacgatccatacatctcttcttctctgtgccattgcaggacttctggtctgtgtcgtctgtcttctgttttccggacagatgctgtccatgatgaatacgaaaccggagctgatggaccaggctgttttatatatgaagatttatgctctgggtatgccggccatggctgtatacaatttcggtaacggcgtattaagtgcccgcggcgatacgaagcgaccactgatctatctttccattgccggagtgatcaacgttcttctgaacctgtttttcgttatcgtctgtcatatggccgctgcaggtgtggcaactgccagcgcgatcgccctgtatatatccgctgctctggtaatgatccacctcctccggagaaaagacgaatgcagggtatccctgcgtaagctccatcttcacccaaaggcctgtaaagcagtactgcttcttggtattcccacaggtctgcagaacggaatttttgccattgcaaatctgttcgtacaggccggcgtcaactccttcgatgcagtcacagtttccggaaatgctgccgctgcaaatgcagactccctgatctacaacgtcatgttcgccttctatactgcatgcgcaagcttcatcggtcagaactggggtgccggaaataaaaaacgtatgctgaagacttatgggatcagtcttacatatgccttcatcgcaggcgcaatccttggtggactgcttcttgttttcggtccgcagtttttgtcactgtttgccacagaaccggccgtcattgatgccggcatggaaaggatccggatcatgggcttcagctatgccttcagctgttttatggattgcagcatcgccgcttcccgtggcatcggaaaaagtatcccaccgaccatcatcattattctgggatcctgtgtattccgtgtcatctggttctatacggtgttcgcacacttccagaccatttcctctctttatctcctgtatattttctcatggggaattacaggctttgcggaggttctgttctttgctgtaagcttccgaaaaatccgggcctgaaacttcaaatatatagcgccagacgaagcattgatctggcgctttttttatatctttttcgtgttttatgtacatttgtctttacaaggcggacatgattgtatataattatcctgttgtgcttttacatgatgcagtagtagcagtttagaacgatcagccctttacaccggatcgttgctttgcggctcagcatttttcagcacacccacacaataggaaagaggaaactagttatgaaaaacctgattcaaaaatggaacagcatcaacctgatcaagcgtatcatctgcggtctgatcgttggtatcattctcggacttgcgatccctcaggcatctgtgatctccattctcggtgatctgttcgtcggtgctctccgtggaattgctccgcttctggtgttcttcctggtaatgagctctctgtgccacatgggaaaaggccagaaaacaaacatgaaacttgttgttgtactttatcttctaggaaatgtactctcagcactggcagctgtgatctccagccgcctgttcccgatcatgctgactttttccgaaaatacaaatacttccgacgtcactccgccaagcggtgttgcagaggtcctcaaaaaccttctgatgaacattgtttccaacccggttgacgcacttgtcaacgccaactatatcggtatccttgcatgggccatcatcttcggtatcgcactgaaggccgcaagcgaaactaccaagactgtcatcgaaaacatttccgatgcaacctccacggccgtaagatggatcatcagccttgctccatttggtatcatgggcctgatcttcacaaccatctccgagcagggacttggtgtactgttaagctatggccgtctgatctgtgtactggtgggaaccatgctctttgttgcactggtgatcaacccgatcgttactttcatctgcacacgccagaatccgtatccgctggttctgcgctgtctgaaggacagtggtatcacagccttcttcacaagaagctctgccgccaacattccggtaaacatggagctgtgcaaggatctcggacttgatgaggatacctactccatctccatccctcttggtgcgaccatcaacatgggtggtgcagcgatcactatttccatcatggctctggctgctgcacatacacttggtatcagcgtagacttcccgaccgctctgatcctctgcatcctggctgctgcaagtgcggctggtgcttccggtgttgccggcggttctcttcttctgatcccgatggcctgcagccttttcggaatccccaatgatgttgccatgcaggtagttggtgtcggtttcatcgtaggtgtgatccaggattcctgtgagacagcactgaactcttccacagacgtactttatacagcatgcgcctgcaggatcagaaagaataaatgatcacacttataaaccgtctggcagatattcataattgaagcaggggacttacttgactcagttaaaaggagcagatcttccgtatttggaaaatctgctcctttttttgtcttagagcgtgtttgaaaaaggctttctgcaagatgtgcgtcacaatttgtgggagattttgtccggatgagggcgccgtagcgggctacggcaactgaattcgggtaaaatataccgcaaagtggggcgtgcagattacgggaatgatttttcaaacacgctctaaccctcagttcctgcaatatctgccacatataaaattatccgcaatcggtaaataaaacatcctctacattcgaaaaagcttccagctctctcccatctgcacagccagatatacgatctcaaagatcacagctacggatccaagcttaaaaagcagggaatccacaaagcctcctgccttacagaaatccagtgcaatgcctcccggcagcggatacaggatccgtacccgtttccggttaaagcagtccagcaccagatgtgatgcaaatccaaccacaaagtaaaataccagctgcactgacaccatggatatggctgcactcaaaatagccatagccatgatcgaatgcataaaagaccggtgtggctgattttttccaaaggcacagactgcaataaaaataataactcccatggcaaccggcgccatagactggttattgcggatcttttcccagatggaaaaatcataaaaataattcaatgcgatctctgctgctacaagcagaaccgcgatcagcgtgatccggtccgcatccttatgggatttggaagttcctacatcaatgtcgctgatcagtgctccaagcattcctgttcctgccgcaagtaccagaccggaaaccgtagagggctgtgtaactgccagcactgttccgagtccgactgctgcgtgtgtttttcctgtcataattctccccttattgtaaaaaaatcttccgttattcaggattatccactgctgcagatcagacactcccttctgatcttctgcatatataaatgtatcactttatcatttaccgcagatctgaaaatacaataaggcagctgtcagccttaccttttactgacagctgcctccacgaaacagcattatatcacacaagaaaacactattctatcaaaattctccctactctcatacacgtcccgtttaactggaatatacctcacaaacgtaccagttaatcagaccaattcatacgtccatagcgaagtgcaataccatggatctctttctgaagcttcacagtcagctcccttttgcggatcctccacttccagttctttcctactgtggaaggctggttcattctgcagctgttatccaggcccatataatcctgcatagggatcacacagagctttgcactgcttcgcataaccaggctgataaagcatttatgcagctccttatccggtgtgtagttatcacagagataatccctggcaagcttacgctcttttgccataatactcttccaccatccggcgatggtctcattatcatgggttcctgtatatgccacactgttctccggatagttgtgaggaagataatcgttggcacagccggaatctctggaatcaaacgcaaactccaggaccttcattcccgggaatccactgtcatggacaagctgacgcacggaatctgtcacatagccaagatcctccgcaatgacctgcttccagccaagggcctgctccactttgcggaacagatcaatcccgggacctttttcccagtgaccgccaatagcattttccgcaccatatggaatggaaaaatactcgtcaaagccacggaaatgatcaattcttaccacatcataaaggcggaatacgtagctcagtctggagatccaccactggtatcctgtatttctgtgataatcccaacgatacagtggatttccccagagctgtcctgttgcggaaaatccgtccggcgggcatccggctacagccaccggcacattttcctcatccagctggaaaagctccggatgagcccaggtatctgcactgtccatagctacatagatcgggatatctccgatgatctggatgcctttttcattggcatattttttcagtttcatccactgctcatagaatttaaactgcatatactgctggaattcaatatcaaaatataattctctgcgatagtagtccatggcatttgcccagcgaaggcggatatcctctgcccattttgtccactcaacaccgccgaactgatcctttactgccataaaaagtgcatagtcggaaagccaccagctgttttctgcaacaaatttctgataatccggattctcgctgatgttgctgttttcgtaagctttgcggagaagcttgtaacggcctttgtagattttttcatagtctacgctgtctgctcttcttccccagctgaccttatcacagtcctcctttgtaaggacgccttcctccaccagtgccttcaggctgataaaatacggatttcccgcaaaagtggagaaggactggtacggagaatctccgtaactggtaggtcccagcggaaggatctgccagtagctctgtcccgcttccttcagccagtccacaaaatcataggcactctttgaaaaacatccgatgccgtactctgacggcagacttgtgatcggcatcaaaatgccagctgctcttttatccatatcttttctctccttatgttgagccctgcatctcagagcatcttatttattatcctctcacggatgcagcttcatgcaatctgcgcaaccgtttgcataaattatacgtttattttgcatgaagtgcaatgcatttttgtcttttctacctttcttacaatttttatatcctgattttatgcagtttttcattatatcaaacagaaatctgtctgcatctcaccacctgattctctgcgtacctgctttcacgcaattttatgcaactttccgtgcaatatgtttgacagtatccttgttatgaactacaatatctctatcagactgagataaaaaaagccggatcagatgcatagctttgatccggcatatccgtgaggaggcaaatttatggcagtaaccatcaaagatgtggcagctctggccggagtgtccccgtccaccgtttccagaacctgcaaaaataatccatctatcagtgaagaaaccaaggaacgtgtacgcagagccatggcggagcttggctatgagccaaatttccaggccagcaacctggcagcacagatttcccgctccatcggtatcatcctgcctccgtccccaaaggagacatacgagaattccttttaccttgagacgatccggggaatcagccattactgtaacgcacatcagtacatcagcaccattgttaccggtcagaatgaagaagagatccttaacgcggtacgttccatgtccagaagcggtaaggttgacggatttatcgttctttattcccgtgtgaatgatcctgttattgattttcttttcagtgagggacttctctatatcctgatcggaaaaccggcgcaatacaccaataatacgatctatatcgataatgacaaccttcttgccggccaggaggcaacggaatatctttatgctctgggccaccggaagatcgcttatctgggcgtagataattccctggtcttttccgcagaccgtaaaaccggctacatgactgcgctgatcagccacggattaaccgtacagcccgaatactgcatagaggttccggcagcttcccagaatgaatttcaggagcttcgaaagctgcttttaagtgaggagcgccctacagctgtgctcgtcagtgatgatattctggcgctttctctggagcggatctgtatggaagcagatatctccataccggaagatctgtccattctttcctttaacaactcgctttttgccagactgacttcgccgcagctgacctccattgatattaactctgggcagcttggaatggaagcggctacgcagatgatcagtcatatcgaaaatccgagccttccggccacaaagatcattgtacctcaccagctgatcgaaagggacagctgccggaggatctgatctgctttcaaacaaaaaacaggtatcttctctgctgactgtgtattaaccaccacttatcgatctgacattggtggccgatttaccgcccggcaaaaagatacctgtttttcattttttataatgctttctcataacaccaatacatatgtccccagagttcacactctcccacgttctcaaaattcagcttatcataagagcggagtgcttttacattgtccttcgcaacaagaagatgtacagctttatagccacgcttcttcaattcttccatcacacccttgagaagtttcccggcaatcccctgattctggaattcctgacatactcccacccgggagacctccgctgacggcaccatggtttctgaccagcatgtgagacattccacatttggatcatcatcaatggagatcacacctgcgatacttcccgcatcgtcccgcatacagaacagcgcatctctggaaagatcaaattccacttctttttctgaaggatactcttctgtccacacacaatagggtgtccccagcaatgaacggtacagcttcagaactgtatctgcttcttctctttttacacgctcgaaattcattttatatcttttctcccactactatcttaacaatttgatattcacagctttcagtcctggatttctcctgaaaatacattctgcccggatcccggttttcgtgaatatttatattcttccatcaataataacacttttcactgcacccatgtggaaacaatatcctctttatcatacattgaaacgctgtttcatcttctgcagcgtccagaatttccaacgcttttcgcaaattccggatatctttttccatgtgatccacatagtttccccggccaaccagcttcagatgcgtgatccctgcctgcttcagctgatacagtgcacacagtccacagccggtctcaccacagagatatccggattcatcgtatgctttcagatccgtttcctgatcccacgtctgctcctgaagagccattattttttccggaacagcatcaccattccgtacagttccaagccaataggacaccctgcaaagatatcccatctcatcacagtgaagagaattacagaatgctcccgtaaactggcacatttcattcagcacaaaggcctcgaactccattcccgcctccggtcgggtcccggcctgtttctccacctctctctgagatgcaataacagactgcatatcccggaacgtgtttttccgatgaaagatcaatctcttcagaggaaagcgccggaacattttcagcatttcgctgttcacttcccctgtttctccgctgagatggatctcgcaggaaagtcccctgtttttcagataaacaagaagtgccggatctgcaatgatatagcttcgaaatccaatttccatgcacttctctatgatatctccgatctccggatactgttccggaagataatacagggaattgaaggtgagatgcaccggctttttatatttttttaccatccgggaaaggatctccagctcactgtatgcaccaagctgaacattatagcagagaacctccctgcgatttaacggcattactgtgccgtatttttccgcccaggaaaagggtacatagccacagaaaaattcatctgctcctgcctgcacgaaacgttcatattcatctatggagcctaacccgactgttattttcatactgttatccatgtcctgttccttttttccgcaatgtatttttatcaaacggatattcgcgatccaccttcgcagcctgcccatcacctgtcatatattgacaacaatgcgatccggctttgtaccttttatatttttccacatttccgttgactccggaagtgttttatccacaccaaacagggagttataccgccctgccatgtgtaaatgttccggataaagcagtgcgtatttttcacagaatttcggacagtgctccgcaagctgctgtataccacgatctccggtggtgcacaaagcatacaatggacagtactgcgaagtgtttgtctgataaaaaggcagatgcagactgttttttcccggcggaagctcctgtggatatccgcaggactcccattcgtatctgtggatatgaaattcttcagccagaaaatcccgataaaaccccgcattcaggctgttttgctgaaataatgaggtatcaccggatttatatttcattcgcggatccttttttcgtttattgagcaatgtccccagaacaggacgcaggcgggatgtttttccacagagcatttccgccatagcccagtcattgactacgatttccacattcaccccatgaatacagcaccagttatccaccttttccagaagctttcccacagacaaaagcataaattcccggatataagaaaataccagtgtgatctccgatccctccgaatacattttatccataatagaaaaaagctgctcttctgtcggaaacaggttatggcagaactgatttccaatataaaatctgtccggtgtccggcctgcaaaataactgtgagtgaggtaattcttctgccagtaagacgccagaaaatcctgcagcggctggcgcagatattcttcatacagggaagtgcagttcaattccagggcaaactctgcactatccaaaagccttaattcttctgtacccattgtattctgtggatttccggaagccttttcactttctctgaaaaaccaccgcttcttctgttcttccagactcctgcagtgcatctcatccagctctgcaggataaccggtcagtgatttcgccagctctccatcgtctccctccagcttcagacggatatatctgttgtactctccggccagacgccgaacctcctgtacatagtccttctgttccactctcacagaatattccctgtaaaaatattttccggtttccttttcagatggctgttgatcctgcagacattgctcctctgctacactcatcccaaacctccggatctccactctcctgtacccggcttttttcatatcgtagaaacagatcagaaattgctccggttccgggcattcctctgccaggcgaaaccgaaatccatcttcacccagctctgagatccggatttctttaccgtccataaaaccggacagtaatccaaatggtatcatagagatcctcatcaggaaagcttcctcccttcaggtaaaaaagggagatgccatatgctcccatacagcacctcccactgttcctgcttatttcacttctactaattcaattctgaaattcagctctttacctgccatctcatgattggcatcgaaagtaatggttttttcatcttttgcgttaactttaaccgggaacggctgaccatactgattggagaggtatacctgctgtcctacagtaagatcctcagcgcccggaagctgttcgatctcaagtgtaaaaatcgcatccggattcggcataccgtaagcttcctcaggcatcagatgaacatccatcacctggccaacctccatgtttgcaactgccgcatcaaagcctttgatcatctggcctgctccgcagatgaattccagtggctcaccacggtcataagaagaatcgaactgtgttccgtcgttaaaggttcctctgtaatgtgtacggcaggtttttccgacattaggacctgtgatagatggctgggaaccacatccgccgccgcagcctccgcaggagtgtccgtcttcatgaccgccgcaggagtgtccatcctcatggcttccgcaggaatgtccatcctcatgatggtgatgatcacaattcacacctgtggataccagctcgcccttcagataagcatccacagctgtgtctgcatctccctgtgctccggaacataactcaatgccagccttagcaagtgcactctgtgctccgccgccgattcctccacagatcagaacgctgattccctgctctgcaagaagtcctgcaagtgcaccatgtccggtgccattggagctgatcacttcactggaaataaccttgttatcctccacctcatataccttgaaaaactccgtttttccaaagtgctgaaaaatgtttccattatcgtatgttgctgcaattttcatttgtaaaaccctccattagtcagatatgtattatattagtatatcgtgcaggcaggataaaagcaaggtttaacttctctctgccggctcttgctgtcattcaatgaatccagtataatagaagcatctgtaaaaataaaagattttttaatagaaggtttgaattaatatgaaatcatacgaagaattactttcagatattgaagaagacatggaactcatgggttcctcacacattgtttattccatggaagaggacggcattgttaccgattatgattatcttccatccgattcctgtacgatctccattaccttaaaggagcttcaggaaaagcttcagctgcagatgctctatacaaaagtttccgctcatacagccggagcagataaaaatgccccgaaattagctgttgtttttccgggcatcggatacacggctgacaagccgcttctgtactataccagccgccttgccagcaaacacggctacaaaatccgcactgtatcctatgacaccctcccggaaaatgttaaagaagatcagacaaaaatgaaacaggcctttgatctcgccctggaacagacagaacgcgccttaagcaacatcgactggaattcctatggcagcattctgtttatttccaaaagcattggtacagtcatctcctctgcctatgcttcccgacacgatctgactgtaaaaagcatcctgtttacacctcttgcagagaccttttccttcccacttgccggaagcatcgccttccacggcaccgcagatccctgggccgaaaccgattccatccgggaactggcagcgcagaaagatgtccctctctttctcacccaaaacgccaaccattctctggaaaccggtgatgtactgacggatatctttatattaaaaactacaatggagcgggtccagcgttttatttaacgccggcccgcttatttttctccacccactaaaaactgaggtgtcagcttattcagctcacgatccatagaagttctggaaatatcactgatgtccttcagggcaaacactttggaaaagccgatctccatcatgtgatccagatcccatgccgggcgctttttatcactcataaacagcttactgctgagctctttccctgtttccgcatcttcatgagcatggatacctcttccgtatttttcccacatggcagcatcatgtgcctcgtaaatctttttcttttcttcatcataaagatgcagataccagcaggcgtccgataccaaaaggcgtccgccttttttcagtacacgcagccactccttgtaagccttctgtggatcatccagcgtccatgtgatatttctgcagataaccatatcaaatgtctcatccgggaaattcagattgtggcagtccatagtcatcagatctgcggataaacctgctgcctttacattttcctttgcttcatggatcatattttcagtaatatcgatcccggtcacatgatgtccttcttttcccagcataatttcaaaaaatcccggcccgcagcctacatccagtacttccagatgttctttttccggcgcatactccagaatcagattcttccagttttctgctgtttcacttttcaattctgccttgatcccttcgctgtaaatgccagcttctccttcccagtactctttgatcttatcgttttgcatgtcacttctccttctttgtggctattacaataaattttttcccctgatatccgtatttccagaaatccatcgtccatggtctgtttagccagcggttctctctgatctggatcctggcaaagcgtaccttttttaatatctgaaagtccgtttccggacgcttctgcgatgtaaatggcagcttttcataaattccgctgttttccttcacgtcagatccatatgtttttctttctgtaacataaataagaaaatcagcaattttcatatggatcttattttttaatgtgggttcgatggtacgatagtccccatcaaaataaatgatccttccacctggttttaatacagccttccagcgtctgaaagctttttccggatcatataatgtccacaccgcatctctggaaagtatcacatcatagctttgttcttgttccaatggcaaggttacaccatcttcctcacagatttccacctgttgatgatactgtcgcatattccttctggctttttctaccattcctgatgaaccatcgatcgcttttacatcatgtcccagacgcgctgctatgatgctcataaaacccgggccgcagcccacttctaaaatacgaaggggctcaggtccaagaagtcttttcaattcttttgtccagtgagataccgttcttttgttattcaattgtttttggatcatatcatcataatcaccggaatcttctgtccatttattctcgatcttttcaaacattttttactccactacatccagtgttgcccagttaatgccttcataggcagtcggtgcaagctctacattggtcagtctggtattgttatagatataatcacggttcggataatacagcggcactgttactgcctgatcgttgatacgtgtaaggatcttatcgtataattccgtacgtttttcttcgtcctgtgtttttaatacttctccgagatctttgttcagttcctcatcgtaccagtttactgcctttgctccatcttccgcatagaacattgatttcaggaaaccatgaggcatccaggagtcttcatagctgcggtaaatgcacagatcgtagtctctggtgttccagatttcatcatagtaagctgcagattctttttctaccagttcaatacccacaccaaccttctcatattcagatttcaggtattcacacagtgacttccaggaagcatattcttcagtctggaataccagtctgaggctcagtggttctccgtctttttctacaataccatctccgtctgtatcctcatatcctgcttcctttaacagttcctttgctttatccggatcatatggataacccttgctgttttcttctgttacataaggaactgtcggagacataagtccggttgccggattgccgtaaccatccagcagatcatttacaatgctttctttatttgttgcatagttcagtgcctgacgtacgtttatatcctgaagcgccggtgtatcataattttcgatcagatagtaagaaagtgtggaaacctgctgttctgtcgataaatttttatctgcctggataatactgaagctttcggatggaatatcctgaagattcagatctgcctctccactctgaagtgccatcactctggcatcaccgtctaccacctgtttcagaaccactttatcaatatttggtttctcaccgtaataattaggatttggtaccaggacaacctcctgaccgctttcataactgtcgatcatccacattccggtacccacttcctgacaaaattctccgtcttcatccagtgcactttcacaggtgaaacggaatggtcttggatagctgaattcgatcagcagtgtatagcatggttctgcgaacttaaattctacagtataatcatctacctttgtaacattttccagtttggctgaaaagttaccgatcacatcctgttccacccatctgttataattccacatcacattgtctgcattaaaatctgtgccgtccgagaatttcacatcttttcttaaatggaacgtataggttgtgccatcttcgctgatatcccaagattctgccaatgccggtttgatttctccattttctccataacgcaccagtggatcatagatcatttcataaagacgaaagtctggaccactttttatagggtcacaaagttcaggcgtcagatcaatggatgtcattgccgtaactactttttcctcttttgcctgtacattgacacctgtcagtaaagttgccgccaccatgctcaatgctatcagttttgctacacgtcttttcttcatttcttcctctcctttgtttgttttatattttacagcatatgacatgccgcaaaatgtcctgtttcaatttctgtcaattccggtatctgctctctgcatatatttgtacatcttctgcaccggttctgatatgggcagccctgttccggaatggtatctgaaaatattttcttttcctgcgatccgattcttcgcattttcggttcttttaccggaatagaatcaaacagatcttttgtataaggatgtacggcagtctcctttaagctgtccgtatgatcgataaactcgaccacgcgtccctgatacataatagccacctctttgcagagatatggaacgttggacagatcgtgagtgatcagtaaataggtcatctcatatttttcctgcagctcatttaacagatgcaggatctgctttcgtatggaataatccagactggataccggttcatcacagatcacaagctccggtcttaataccaatgctctcgcaatattagctctctgacactgacctcctgaaatctgtccaacataacggttgcgaatatccggatccagccccgtctggatcaaagcttcttttacccgttcttcatactctccctcttgcagtttttcatgtaatttcaaaatttccagaatattttctccaatggtataaccgggatcaaataccccgctgctgctttgaaagaccatctgaagattcttgcgatatggacgaaactgcttttcagacaaatcctgcatttcctgtccctgaaaccagaattttccatctgtaggtttctccaggccggcgatcagctttccgaatgtagttttaccacttccactttcaccgatcagggccatggatgatcctgcatggatttccagacttacatcatccactgccttcacaatttttttcttgccataatatttttttaaatgttctgtctttagtaacgtactcatacttttcccctataaaactgcatccaacagtttttttgtatatgaatgctgcggatgataaaagatctcttcaactgttccgttttccactatttcgccgtctttcatgatcgaaacatcatctgcgatctctgccaccacacccagatcatgcgtaataaataacacacccagattttctttcctggatagctgatagatttcttccaggatctgcttctgtacggttacatccaatgctgtcgtcggctcatctgcaatcagataatccggtttcatggacatggcaatggcgatcataacacgttggcacatacctccagacaattcgtaaggttttttcttcatcagttcttccggatcacgcagattcatcatccgcagactttccaacgcagcttcccttgcctgttttttgctcattctgcgatgtttcctcagtccttccagaagcagttgttcaactgtaaaaagcggatcaagagcagcggtcggatcctgaaagatcattccgatcctgtctccgtataactgtcgtttttcttttcctgataacttcagaagactcttttcgttcagtgtcacatctccggatatcacctttccatttcctgcaagcagattcatgatcgtcagagaggtaactgacttgccgcttccgctttctcccaccagagcatggatccttccgcgctttacttccaggctgacatcttttactgcatgaaccattccgtgagaggtctgaaactccacatgtaatctttttacctttagaacatcatttttgggctgttccattttgtattccctcccccagataattaaatgccagaacaatgatcatgatcagtatacccggataaaacatcagtcttggataagtctggatataacttttactgtcactaagcatgatcccccattccggtgtcggcgcctgcacaccaaggccgataaaggaaaaaccggcaattgacagaatgatcgaaccgatttccattgttgccagtgcgatcacagatggcaggatatttctcaatacatgcctgaatatgatccttgcgtggccgcagcctccggcttttagtgcggtcatataatttttatttttttcctgaagtgtcaatgcacgggcaagccttgcatattctgcccaggatacgaccgataaggacaggatcagatgagcgccgctggctcctacggttcctgcaatggcaagtgccacaataaagaccggcatagccataaatacatcaatgatcctcataattatggaatcgatttttccacctacgtatccggcaaacagtccgatcggcaccccgacacatacggtgatcagaagcaccgtaaagctatagctcagtgaataccggctgccccagagaagtcttgataaaatacatcgtcccagctgatcagtacctaaaggatatgccgccgacggattctttaattttatcgaaacatccacaagcagtggatcatgcggcgccagtacaggtgcaaaaatagctgccaatacaaaaattatgaccaccatcaatcctatttttgtttttggtgaccggaatacctgtttccagtacagattctggatcatgcttttttctgttttctgctttcttctgcttcccattctatgatctctcctttactttaactggattcgccggtcaatcgcagaataggcgatatccacaagaaaatttaatactacaatgccaatagccagaataaagataaaacattgcagcaccggagtgtcttttgagatcacggatttcaatgccagatttccgattccctgaattgaaaaaatactttctatcacagctgagccacagaaaaaaccgatcacaattgataccagacgtgtcagcacaggaatcagaatatttttcagaccatgacgcaaaattacatttacagatgacaatcccttggctctgctggcacgtatgtaatcctgcttcagcacctgtatcatattagtacggatcaatctcgtcataattccaaagaaactgatatccatggcaaatgccgcgagaatcgggatacctccggcatctcctccgatcacggaaatcacttttagctttactccaaatatatatagcagcatcagaccgatccagaaagacggcatagatacactgagggacgacaaaatgcgaatgactttatccagaactctgttttcataaattgccgacaaaattccaagagggactgatacgatcatcaacaataaaaacgaagtaactgccagtttaaatgtctgtggaaaatatctttttaattcctcaaaagccggttttctggtagaatatgattttccaaaatcgccgtgaagtgcctgatccagccatttcccgtattgtaccagcaccggctgatccagtccttcctcatgccgtacttcttctatctgctccggtgacggatgctcgtattttttctccgccagaactctggccgcatcacctgccgatataaaactcagcataaaaataataaatgtaaccgccagaactaccggaatcataaatataaaacgctttgcaattacttttcccattttcatttctcctcatttttcatctgtttattcggttaaaataaaaaaagctgatatgatccagcatcatatcagcacaaaaaacaaacctccacctcaggcagagcttattccttctgtatcccatccgaatcagaattcttctatcaaaaaggcaagtctcctgactccagttcttcctactcaccatcttcccggatctctccagtgatattttggttttcgtccctgtcacagtagcggtggctgttctggcatttcaccagattccttattaagtactttgtacacccttctgactattcaattttcatagttgcaacgaataagtattataatatcatacttttctttttatataaatagtttttctgtcaaatatgaaatatctgaacatttcatattaaaacccggatattttctgcctgtctattattataggttcctcaagtaaatgacattatgtatgaacggtgacttctttatatttccgtataatgatcatataacttacgaataataaaacagctgcgctgctccatgcacagatctctgcatagtatattccatcttcgccgatcagttttggcaacagcagcgcaacactgacacgcattataaattctgcaatgccgctggcaagcggaatcaaagtattacccaggccctggatagcggaacgatacacatacagcagatacagcacccacaaaaagacagccatgataaacaaatacttatatgctatatccaatacctgtcgggtctgatccggttcaccggatacaaacagagacagtacattacgtccaaacaacaccatcatgccggaaatgaaagccgaagtgagcactgccatataagtgccgctgcgcacaccttttcgaatcctctggtattttttggcaccaagattctggcccacataggttgtaatggcgtatccatatgaaacggcagccatctccaaaactccatacagcttgttcgctgccgtaaatcccgccacaaacagaaaaccaaatccattgatcacatactgtaccacaagtcctcccacggaaatgatcacattctgtattgcaagaggaactcccagttccaaaagtcgcaggctcatagagggctgcctgtaaaaatccttcttttccaggcggatatccgggattttacgtaatacgatcaaacagtataaggctgaaaatccctgtgcgataacggtcgccactgctgctccggctataccccaaccaaaaaccgccacaaataacagatccagtcccacattgatcactgctgccactgtcattgcgatcaatggagatctgctgtttccaagtgcccgaagaatcgctgcaaatatattataagcagctatgatcggaattcccgcaaaaatcagccgcaaatatagcattgtcagatcaatgacattatccggtgtctgtaagaataaaagaacatgataaactgtaccttcacttactgcgagtacgaccacagacaataatgctgtcatgatatagcttttcgccactgcgcatttcagattttccttttcccttgctccataatactgagatacaagaatagaaaaaccctgtgtgatacctgtcatgatccccaacaccagccataccagccaatctccagcacctactgccgccagtgcttcaactcctaccacttgtccgacgatcatggtgtctgccattgtataaaactgctgaaaaatatttccaagcatcattggtatggcaaaagttatgatcagttttccgggggatccggcagtcatatctttttcattggttcccataagaatctccttttcttttcatccttatccgctattttacaagggactcttacgaaacacaatcctattttttcacaaagttttataatatttttggtagctattacatctttataatcattattttttatggagcatttttgccacgcctatcctaaaactctttcttcttcatagctctcatactatacttatacgaagcaaaccatataagcagacttagcacaataagggcaatcgcgatttcaaaatcccctattccccctatcatatgcagaatactttcttttaatcccaggttagccttcacaaaagatctaattgtataacaaatcgcaaaaataattaaaattgcgattggcagcacaattcgccctttctctccttcgaaccttatcctgatcgcgatcataattcccgcaattgcctgaaacacaaaaaatgtgatcaactccattgccagcatttccggatcaaacacctcttcaggatttatgagtaccataattcctgcacagatcattccaatgcaccatccacatgctgtcatgataaaggaaaaaatatatttttctctgacatatatttttttatttacgggtaaagaaaataaatatgtgtaaccatggccattttcatcataactgatcgtattacctgaatatatcgccagaacagatgggatatacattgcaatgaaagcagctgccttttttcctgtaagtataaaaaacaatgctacaaacgctaacaccaaaaaaagattaccaccttgccgaaaaaacaatcgaaaatccttttccaaaagccctctgattcctttcatcatctcccacctcctgtcaacatcaggatcacctgatcgagtgatccgctctccactacgatttccggataattttctatataatactgcttctcattcgtcagacaggcaattccaaaaatctcttttttctcttttaaaagatatcttttatctacttcctgatattgctcctcactgaccttcaacactgcatatttttcaagaatcgtatccatctcttcatgaagtacaatctttccttgatgaatcacataaatgtcatcacacagatgttctaagtccgaagaaatatgtgagctgatcaggatacttctctccggctcttcttccatatactctcttaaaatatccagcatcctttccctcgctccgacatcaagccctgctgtcggctcatccagcatcaggaattctgcctgatgtgtcaatgcaacgaccagattcagctttgctttcattcctgttgagtactcttttataaatttattcaacggaatctgatattcctcacacatctgatgaaatttttctgcttcgaactttggatacaatttggcaaggactgcctcaatatctttccctttcaaatatccggtaaatccagcttctgccagaacgactcctagctcttctttctctttttcacttaactcttccggcatttttcccagaatctttatctcgccggcatcataagaaatgagtccgagcaccgccttgaacaaagtactcttaccggctccgttctctccaaccagaccagtaattcttcctttttctacatttaacgaacaatctagctgaaattcaccgtagcttttctttactcctttgatctctaacataatcattcatcctccatgatgagttcaaacaatgaacggatctcttcctccttcattccgcagcgccttcccttctgaatcgctgcttccagatccgcctcaacctctttcctgcgctcttcttccatcagctgtgtattcgaagccgctacatatgttccttttccatgaactgtgactgtcatgccctctgcttccagattgtcatatgctttcttcacagtaagtgcactgatcttcagttcctttgccattgttctcacggacggcaatatatcattttcttttaattctccggagatgatctgcgccttgatctgctccatgatctgttcataaattggtaccatcgatgtattattgattataatcttcatatgttccctcctgttgtaaacagtatataacagtgtagtactgttgtcaactgttatatactgttttgcagtagttgactgctgggatatattttttaacacgaaaaaaagcacctctcagatcaaaaaactctaagaagtgcttttgttgtcatgtatatcaataatttaattttagtacagctttgcacctgccgggattttgtcatctaccatcagaaggtatgggaagtcttagacacttacttttcatgatcattaatttttatttgttacgcaaaatgaattgactttatagaccgattagtctattttgtaaataactgcaacaaaatattcttggagggatatataacgaaagctctcactaattatgataaaacaaaaatttctacagcacatgttttcctgcaatatgatcaggctacaatgatacataaatattcattacattacaattctgactggttatatattacttttattaaccgtacctatcgtattaaccgaaaaacgggaaatgttcagtggtcagataatgattttgaaacagttcatgaagccaatcataatgaagcaatgactatttatgatgttttatgttattcaaaggatagatgccatctgtcacatgaatttgtaaatataaacagcctttcctctgtccgaacaggaaatctctcaccgaacagaggatttttccagaataccgctgacttttttaacggaaaaaccgttgaattgcgtaatgcctgtatatcactttccggaaaggaactggaaaaaggagatgttgcttttaaattaaatctttttccttttttgccgattatcattcgtttctgggaagctgatgacgaattcccggcaagtcttcaaattcttgcggatagaaatactttagattacatgcattatgaaacgcttatgtttgcacttacacatctgttttccagactgaaggaagaaatgcgaattgaaaaagggtgaagaatccagacaacgcctgatcgagtgtgctgctaaattattttggaaaaatgggtattctgctactggaatcagcgaaattctcaaacaaacagaccttccaaaaggatctttttatttttatttcaaaagcaaggatgacctggcaacagcggtaacggaatactatcaacaaatcttgctggaacaatttcaaaatagttctcagggaaatgactgggaaagttttattgaagaaatctttgattttttatctgaaaggacaaatggacaaacatttgcaggctgcccgtatgcggtgatgggtatggaaacagcacttagcaagcctgcagttgcatctgtatttatggaaggactgaaaaaatttgagcagatttttcaggaagtattgttatactccggattgtctccagatcatgcaaaaattctttctcagcgcatgctttctatctatcagggatattttcttcttggacgaatcagcgccgatacttcttatttgaaaaatgccaaaaaaaatatgattgaaatataccgggaataccgggcatttcatggaatctgagaggaatttacatgagtacggtaattcgggcttgtaactgcccagtcgtagtaacggctttcactccgtat

SEQ ID NO: 300 - DNA, 131178 bp, Unknown
  gut microbiota DNA sequence
gttagcaattcagtgatgctcgcatcaacttaattgcgactcacactgattaagccaaaggcttaagaagtgtttgattcatttactcaagacaaccgtttggctatctctcgtttttactgcttttggtttgtttaaaccgttctttaaatgtaaagaaattttcgagaatcgtatgtgtttcactgtttagttatcaaggtttattgtgtctgtctctcagacagctcgtttattttatctcatctctttttgtttgtcaagcactttttttaagttttttcaaacatttttgagctaagattttgttgtcgttttgttgacgacttggatactttatcatatcttctgtcttttgtcaactacttttttatttttctgaaagcagatatatttatctgtttcttaaaaacaatttgttcctaacaactctgatagaatagcattttttccattagctgtcaacatgttttttacataaatttcatttttttctgaaaaacgtattttttcgccaaaaaccgcatttcacagacatggtcaccacctgtatcctggtgcttttccgtctgcaaaatgcggtttcttttacccaccataaaatattcctgtaaaaatacggataaaaatatttttatcataaagaaaatccagtactgtatcaccccggatcagtcccagacccttttgccctatttccgtgttgcataaaatcgtaagtaccagcattccgacccatacaaaaacaatacacttcatgcctcctactatggcgccggctattttgttgatcccacggatgaccggcaatcttgccaggagatccatggcatacgccagcacatggatcaggattgaggaaagtatgtatgataccaaaaaagaaagacagttcactgctacattggccagatatccggaaatataccctgcaaatgtattaaccgccagatattgatacaccaatgccgtattattttctgttatccccttctggaggagatccggaatatccatactgctgatcaatgccttctgttcctcctcatctatggtttcttttccatctgccagagaatccacaaatgatccgctggcagtctggattttttcataaacagacgtattctcacgtatgaactgattcacataaggattgatcagccataccagagcaacggagatcagaacaagcaatgcagatactacttcttttacaaagccatgcctgtatccatccaccatggaaaaggcaagcaggaccagcacagccagtccaagccatgtccagttcatatctgcccccttaactgaattttatggtgctgacgcctgtatccagtaccataagatatttattccatccgatcttaaagaaatcccggatcgttccatctacatttccggcatatttctgtacgccacggttgttcatcacgcagatctgcgagctgttatacatgatgatattatctccgctcatttttatagtcgtatatggaatattgaaatttttacggaatttcagctgtccgctcatactatagacttccattgtatacagatcatctttattattgtttttaaataccaggccaatcctgtcatcactgaaaaatgtacttacgatctcctgttttacattgactgttttgctttctttgggaatctggcttccctggtaagtagaaaatccatcatctcgcaaagcaatatacttactgtcactgatacattccacctgcgggatcactacattctcataggtataaccacttacgatccgatcatcctcattctgccctacatccccataattataaaatgccacatagctggtagtcttgcttccatcaacatactggaatgttaccatcatcactccgttatcagacactgctacatccatgggatatcccggatcatcgatcttagtcagattttccgcgaccagactgccatccggattataaaaattgatccaggtattatcatcattgtccaggatcactgcaaccattccattcgatgcgatccgcacttttacaatagcataagatgttgttacagttccggtcacaccttttttgtcgcagatataaagcgatgttccctcgctgtctgcaacaaccgccctgcttccattcacatctgcaataggattctgcattgtataggtttcattccagatcgtattcatgctgttgtccacaacagatactccatccggactgtatctcaggatatctccatccatgtccacatactgtgtggacacaacatcttcctgttcgcttgtatttaatactttatagctgtgatagcttcttttttctgcatagagaaaaaccaggcagactgcagcagcgatcactgccgctgtgatcacctttttcccctttcttgaaatccttcggcgatgagaagttctcccgtagtgagcgccttcctgtgtagcctgttcctgtgcaagcctggctttttgcctcatcagctttttacgcttttgttttttctgtattttttttatgatattcacaaccgtatcccttaccttaagtattttattttgtaattggttttccagttattatagcacactccatcagggtagtacaattacctgcccgggataaatgatctcattggcagaaattccgtttaatgcacagatctgttccatcgccgctacagtgccatagcggttcagactaatctgatacaaggtgtctcccgggcggatcacataagtttctccaggatttcctgcagccgctgaagtctcttctgtttttttctcttctgttttattatcttttttttgcgttgcttctgaaacagactgtttttttgaacttcgaggttccggtgttattgagattttttctcttttctgcgtggtttccgtcgggaccggagttccccgcacagcttcctgcgtctgtaccggtttttgtgtctgcaccggtttctgcgactgcaccgcctttggcgaaaccgatacactccgcaccggttctgttactgcaggtgtcatctgcaccaccgaagcagaagcggcgcgataatcttccggaacctctgtttttttctgctgattccgataaaagcccactccagccacaagaactgccagtgccagacacaccgtagccgcataagaaaaaacagaagttttctcttctccccgttcctccggatttttactatctatgatctttctgaaatttctgacagccctgtcctccacttcctcggatgcttctccgccctctttctggctgcgttcgatcatatacgtctgcatctgagaatttttctcataataaatataatacccgctcagttttgccatcatgccgccatcataacggaaaaaggcatcctcccgttctccaggatccatcagcatcaggatcttttcccctccgaaatgtctgagatgtactttcacaaaaagctccgtgatctccattgctatctgaggctgtgcaaaaaaccatcccacgatctcctgctccggaaaatactgatccttatcctcctgcagtttctgccagagtttttccgaaaagtcaatatgttctgccgcagcctccatgccatctgctgcaatggcaccttttataaaaatacaggtcatatctgcagtccattgaatttcacctgtaagtaccgccacacttccctggccttccggcttttcatcttctgccaggctgcagagaaatgtgtatacataatcttctatataaatcctgtaatctccgttcgccagcccgatctgccttacatttctcggcatggaaaatgcttcctgcgcggcttcctgttctgttgtgtcctccttataaatgacttctatcatctcatatcaccccttctgtccaagcatagcacagtaaaaatgcggattttagcagaatgtaagagtctgtccacagaatttagcgacagattccgcaccatgcatattttcccttttttcaggatatgatagagtgaaaaaagaatcgaggtttctcatggctttttacattgatgccggaaaaaacggttcatccggcgagattgcttatcttctgaaaaaatgcattcttcactgtcccaaaaaatggactgagatcgtgtttttatgcattggcagtgatcgtgttaccggagattgtttaggcccatatatcggacaccttcttcatcctcatgaaaccggacatatttttgtctacggcacgctttcctgcccggtccatgccctgaaccttgaaaaaacttcatcacttatcacaaggcttcatccacacgcccttgtaatcgccatagacgcttctcttggacaaaaaaagcacctgggctatgtgaccattggaaatggtgcactttacccaggtgctggtgttcagaaagatcttccacctgtaggggacatccatatcaccggcattgtaaatactgccggaatcatggagcagcttaccctgcagactacccggctctccaccgtagtagcacttgcagatgtgattgcctgcggaattcttaagatacttcctgcagaaacagacttatcccctgttgatcttgattatacgaactccttgatctgcttatagataccctctgcatcgagaccgtatttatgaagaagctctaatgccggaccggactcaccgaatacatcatggattccgatacgtttaaccggtaccggtgccttctcagccaggcactcgcatacagctccgccaagaccgccgatgatggaatgctcctcaacagttacaaccttgccggtttctttggcagctgcaacaacaaggtcctcatccagaggcttgatggtatggatattgatcacttttgcatcgattccgtctgctgcaagcttctcagctgcttcaagagccggtgcaacgcaaagtccgtttgcgatgatggtaagatcttttccctcgcggagaacgatacccttaccaagctcaaatttataatccggtctgtcattgataaccggaacagcaagacgtccgaatctcatgtataccggtccctgatgctcgtaagcagcagcaaccatagcttttgcttcgatatcatcagaaggacttgcaacgaccatacccggaatcactctcatcagggcaaaatcctccaggcactgatgtgtggcgccgtcttcacctacagaaataccgccgtgagttgctccgatctttacattcagcttcggatatccgatagagttacgaacctgctcataagcacgtcctgctgcaaacattgcaaaagtacttgcaaagggaaccttacctgtggaggcgattcctgctgcaatacccatcatgttgcactctgcgataccgcagtcaatgtgacgctccgggaattcttttttaaacatacccgtctgtgtagctgcagcaaggtcagcgtcaagaacgataagatcctcgtgtttttttcctaattctatgagggcactgccgtagcttgctctcgttgcgattttctttacttctgacataatgcttcacctaccttctccagatcttccattgcctgtgcatactgctcatcattcggagcttttccgtgccagcctactgcgttctccatgtaggaaacacctttaccttttactgttttcatgatgatagctgtcggcataccctttgtagctcttgcctcatcaaaagcagccttcagctgatccatatcgttgccgtccgcaacattgatcacatggaaattgaaagcttcaaatttcttgtcgatcggatatggggagcatacatctgcaatgtcaccatcgatctgaagtccattgttatctacgatcacaaccaggttgtccagtttacggaagcctgcgaacatagctgcctcccacacctggccttcctcgatctcaccatcacccagcaatgtatatactcgataatcatcattactgagtttggcagaaagagccatacctgctgctgcagagattccctgaccaagagaaccactggacatatcaacgcccggaatatgcttcatatccggatgtccctgaagataggagcccagatgacgaagtgttttcagatcctcttttggaaaatatcctctctctgcaagtacagaatagagtcccggtgctgtatgtcctttggaaaggacaaaacggtcacggtctgccttcttaggatccttcggatcgatgttcatctcttcaaaatataaataggtgaacacgtctgctgcagaaagggatccgcccggatggccggcctttgctgcatggactgctgttacgatatccttgcggacttcgttggcaactttctgaagttctaacttatccatgttattaatgtctcctttttagtgccctgctgttcacagggaatttgtatataaaagaggtttcgatcactcaccgaatactgccttgtaatcagcctgaaatttagtgatacctgcatctgtcagcggatgatgtgtcatctgctcaattaccttgaacggtaccgtagcgatatctgcgcctgcaagtgcacatgcagttacatgcattggatggcgaacgcttgctgcgatgatctctgtcgggatatctgcaactgcaaacatctcagcgatctgctggatcagctcaacgccatctgtggagatatcatccagtcttccaaggaacggagatacgtatgtagcacctgctcttgctgcaagaagtgcctggttagcagaaaagatcagagtaacgtttgtcttgatcccctcagaggaaagaaccttaactgccttcagtccctctgttgtcataggaatcttaacaaccatgttcggatggatagctgcaatctcacgtccctcacggatcattccctcagcatctgttgttgtagcttttacctcaccgctgatcggtccgtcaacgattgttgtgatctctttgatcacctcgttgaagtctcttccttctttggcgatcagagacgggtttgttgtaactccacagataactcccatgtcatttgcttctctgatatcctctactttagctgtgtcgataaaaaatttcattgttttttcctcctgtttacgttcgttctttttcttgatgattccattataacaaactcattgtgagggtcaagacacctgttttttattaataaatattttattaataaaataacattttattaatagtgcctgtcaattttttcacccaaaacagcttctttccattttcctcaattcgaatatcgccgtaattatcatagctaacaaggtttctattcaaatgtgtcatggaaactctctctatatattattattaataatttttgcgtcattatttatttttctgttcatcagactggtttctgtccagtcttgcataccccgtcgtgcggcgcgtgatcagcttcggggtatattcgatattatacaggctggcaggtctttcatccaggtaaaatttatcattcatgtcgatcttacggatgatgatgtcacaggcatctcttcccttcagcgcaacaaaatgatcaatggttgtcagggagatcctgcggatgccggaataaaaaatattatcgcaccctatgacagaaacatccttcggaacgtgtatcctcatttcatgcagcgcatcaatggcacctatggccatcatgtcattctgtcctgcgatagccgtaaatttctgtccttcctggagaagttccatggtcagctcgtagcccatggcatactcggaatccatccgcgggatctttctgtcattggactcatctgccgccttgatgagcacatgatcctttttcccctctttttcaaactcgcggacaaagccctccacacgcttggagcgctgccactgccgtctggtaagaggaggcgtgataaatgccacatccgtgtgccccagatcaagaagatgtctggccatcagccttcctaccactgtgttgtcctgattgatagcatctaccgtggttgttttttccttgttgctgatgataaccagcggtgtttcttttgcgatcttttctacctgatgctggaaatccggatgaggattgcaggtataaatgatccctgccggccgcatggtctgcatcatacggagatatttttcttccagccccgcatcgcgctgggtgttgcagataaataccccatatccctgctcattggccacagcctcgattccctgaagcagcagtacataataggggctggtgagtgtggggcagaaaacaacgatcagcttttcttttctgtcagctttgtgtttccgacgtccgggaagctcatagccaagctctctggccgcctgctccacccgctccacagtttctctcgaaaaagaaacattatatttccggttcagcaccatggataccgttgcctgggaaactcctgcgcgtgctgccacatccgatgaggttgctttcttttttgccaccagtatcacctcctttataacccggggaaatttcctggctgcttatcactttttgcaatctctcagaaaatttttcacctgatctggttaaagctccactcttccctccagtgcccggagaagtgtcacctcatcaatatactccagatcaccgcccaccggaactccgctggcgatacggcttactttgatcccggtcggtttgatcagcttactgatgtacatagctgtcgtttcgccttcaagactggaattggttgccacaataacttcctttacatccccctgaaggcgcttcatcagctccttcagtttgatatcatccggcccgatcccaagcatcggggagatcgcaccatgaagtacatgatatacaccgtcaaatttacctgttttctcatatgctgccagatccctggtattctcaaccaccatgatagtgctgtgatctcttttgggattggcacagatcggacaaagctcctggtcagtcagcgtgtaacagcacttacagtactgaacattctgccttgcatcggtaatggaggcggtcagctgctctacctggtccttcggcatattcatgatatgaaatgcaagacgctgggcagatttggctccgattcccggaagatgggaaagctgctcaataagtttattgatatggctgctgtaatattccatcagaaaggaagacctccgccaagaccgccaaggccgcctgtgagtttggacatcactgctgctgactcggactcaacctggcggagcgcctcatttgttgctgccgcgatcatgtcctcaagcatctcgatatcatccggatctaccgcttcctcggaaagtgtaacctttgttatttcacgtttaccggaaactgtaacggaaacggctccgccgcctactgttgctgtaaactctttttcctcaagagctttctggttttcttccatctgacgctgcattttctgcgcctgtttcataagattgttcatgtttcccggcatacccatgccaggaaatccacctctttttgccataatactttcctcctgttttttgtttacggatttatgactcctcatccgggtcttcttccactacgatatccatgtggatattctcccgaagtgcatcgtctactgtgatctgcgcgagattggtgtgctgatgtttgttggctaccagcatatgtatctccacgcttttgcctgtccgggcagcaataatgtcctgaagctctttcttcgcctccggattgtctacataattcatccccagaaaatcctggaattccacataaaggatggaatctcctgtttctccgttatactttgggactgcacgctgcagagactgcttgaaaagtccggtagtctgacccacgatggcacgccatcctgccacgatcttctgaagatcctcaggagctgccttctgtggtttctgctgctgtgccgttgctgcaccggtcactgccgcccccggttccccggctccgccggcctcgctctcccgaacgatcacctgctgcacaggccgttcctccatctgcttttccaggacacgaagcctgtcaagaacagagtccagatttgtctccatggccggtctgcacagcttgatcagtgcgatttccaccaatacacgcttctggcttgcaaaacggatctgattagacagatcggaaaaaatacgaatgtaacgcatcagcgtctccacatctgtcatctcgctctcttccttcagaagcttcagattctcagaagaaacgtcaatggcttcctcaggattttcggaagtcttcacaagcagaagatttcgcatataccaggtaaaatctgatacaaactgtcccagctcacggccgcctgtgatcaggtcctccagcacatggatggaacctgtcacatcgccggaaagaacctttcgtagaagtctgctgaatacctctgtatccacggctcccagaacctccaggactttatcataagtaagcacctgtcccagataaaaggaaatacactgatccagaagactcagagcatctcgcatggacccatcacctttttttgccacatagcgtacagccttctcctctgcttccaccccttctgcagtcagaagctcggaaagtctggcagcaatggtatcaatggatatccggtgaaagtcatagcgctgacatctggacagaattgtgatcggtatcttgtgggcctctgtagtcgccaggatgaagataacataagaaggtggctcctccagtgttttcagaagagcattaaatgcacctgttgagagcatatgcacctcatcgatgatataaaccttgtatttaccctctgttggacgataagccacttcctcacggatctcacggatgttgtcaacaccgttgttggaggctgcatcgatctcgatcacattcatggcagttcccgcctgaatggccttgcacatggcacattcgttgcaggggctgccatttacaggatgttcacagtttactgccttcgccaggatctttgcaaccgtagtttttccggtaccacgcgttccgcagaacaggtatgcgtgtccgatacggttcgccttgatctggttggtcagtgttgtcacaatatgatcctgtccttttacatcgtcaaaattgtcgggacgaaatttacggtaaagagcagtataactcataaaactctccttctcttcgccacagtcgccgcggaaagactcccgcggcggccagatgactcataattcattaatcgccaaaactgattccgatctgtttggctgcttttacaagctgatcctttggagataccatcttcagcttgcctgcacattcagcaagaggaacccgtttgatcttgccattgatgacgccgatcataacaccgtattcctcatccatgatcgcctgcgctgcaccggcaccgatccttgtggaaagaacgcggtcatatgcacatggctctccgcctcgctgcatatgtcccggaactgtgatacgtacctcacttccggtcaccttctggatctggtctgcgatctcataggatacagacggatatttctttgctctttccgcaagcttctctttgtattttttctttggaagctctgcatcttcttttgagatagctccctcagctactgcaagaatggtaaaacgcttgccggccttgttacgcttctggatggcttccgcaaccttattgatatcgtatgggatctccggaatcaggatcacatctgctccgcctgcaacaccggcattcagtgtaaggcttccgaccttatgtcccatgatctcgacaataaatacacgtccatgggatgcagctgttgtatggatgcagtcaatggcattagttgcgatctccagagcactctggaaaccaaatgtcatatctgtaccccagatatcattatcaatggtcttcggaagatggatgatattcaggccttcctcgcggagaagattggctgttttctgcgttccgtttccgccgaggatcacaagacagtccagacagagcttatagtaagtctgtttcattgcctcaaccttgtccagtcccttctcatccggaacccgcatcagtttaaacggctgtctggatgttccgagaatagttccgccctgagtcaggatcccggaaaagtccctggctgtaagcatacggtatttcccgtagatcagtcccttatatccgtcatcaaatccataaacctcaaggttctcaacgctgttgctcagaccctttacaacgcctctcatggttgcgttcagtgcctgacagtcaccaccgcttgtcagcagaccgattcttttaatcatagcgtcctccattctgtgccctcttatgtgcacattttatttgttgctgtctgcatataagacagatattccacctgacgtatttctgcagaacaactactgtatcctctcttttcacagagttttacacaatataatattataaagcattttcaggcagtgtacaatagccaaaaaagcacgaaaacagcgagtgtattgattgactttacctgtatctcatcgtaaaataaaattatcagtaactttcgtatgtttacagaaaattttcgccaggaaaggagcgtcctatgaaaaaaatcctcaaaaaactatcctgcgctttattagccgcagccatggtatgcgccatgactcctatcgccgccagtgcagcgatcaattattccaaaacccggatcgtttatatgcccacatccggaaaggacttgggatacgatgagatctcgatcagcaatattcctgctaaacagaacattctcaaatccaatgttaaagtggtcagcggcggttctgtgattgtactggactccttcggttccagcagcttcaaaagtaccacggaggcttttcgcaagggtgcaaaaccgtacactcactccgatcatttctacaatatcggttttgccgttaaaaagcccggaaccggaaagatttccttcaaagtcggaaacaaaacctatacttccaccatcaaggtgcttcgttatgtcaacccgttgaaatccgtctccatcacaggtgtaaaaggcaatcttgccggaaaattcaaaagatccggccataacgcctttcgttacgccaacaaggcacagaagaatgctgtcatgaaatgcaccgctgcaaatggctggaagatcacaggcgtttctttcaacaacaaccggacccatacacagtatagtaccaattacaacgctcctaacagcggggcttcttcttccacgctccgtatcggaaacctttccgcgaagcagtccgcctatatcagcttcacccttcgcaacaccaaaaacggggcggtacagtactgtacacttaatatgaactgatttatttcggtctgtaccttgacaaatctggtttcagagtctataattaaattccgcgcagccggggagatagcggtgccctgtacctgcaatccgctacagcaggggtgatgccaatctgaggcttgtatcttgcagagcagccctttataagtggcgttgacgtctgggtcttacgcaacaggaatctgtgaaccgtgtcagggcaggaatgcagcagcactaagcagaagctcttgtgtgccgtgagggtgcctgggctgagttaactgtaaaggtaacgtctgtgagaccattccgaggtgcggcgcgcgtaaaaaaggttataatatatgatctctatataaacagcattcccgccgggtccgtcatttatgactgatccggcgggattttttgtactattattttatttacaatatccggcaactacctggttgatcagcttgccgtctgcctttcccttcagatctcccataactgccttcatgatctggcctttatttcctgttgccagaacatctgcaaatttctcctcgatataagccttgatctctgcttcatccatctgcttcggagcatatttcgcaatgatatcatatcttgcctgatactcctctttcagatctgtacgttctgcagggcaggtgtcgatctgctcttttgctgttttcagctctttcaggataactttgtctacaagctctcctttgatggcatcacggcatccctcatcaatggcagctttttttactgctgcgatcagtgcggaaactgcttcctttgttaccttatctttggccttcattgctgctaccatgtcttttcttaaagcttcaagttccattttttgttcctccattttctgtcgttcctatatcaatgactttcgtttgacctgaatggattttctgtctgtaatagtgaaatccatttatgattttattttgatattttcacaggattctgtcaagagtaaatctcccgggatttttcgttctgttccgctctctctgactgtgtctgcccggcaaggcgctctgcttcctgcttcttcaggatttttgcctgcttctttttctcccgcagttccctgaaaaatgtggaaagcatttcggagcattcctcttccaataccccttctgtgatctttacctgatgattaaagccttcgatctgaagaagattcatcacagatccggcacagcctgctttcgggttcatacagccgatcaccacctcatcgatcctagattgtaccagtgcaccggaacacatctgacaaggctccagcgttacatacatggtgcatccctccagacgccagtctcccagctttttacttgcctttcggatagcattaagctctgcatgagataaggtatttttatctgtattgcggcgattgtagcctctggctatgatctttccctcatgcacgatcacgcagccgatcggcacttcctccaatgcacgggccttttttgcctggcggatcgcctctttcataaaacgttcctgatctgtcacgtttttactcctcctgtaacttcacattccggaaaaagctccgggattctatctgttcatactaagactgctctcagccttctgtccgttcgattatagcttttccggtatttcatgtcaatctgctgcaaaacagatattcgcacacagccaaaaacgccacagaaatttccacactaatttctgcagcgttttcttattgtacgacagaaaaacgcagacaacggaagctctcgcgaactccattgtctgcgtcaatgaatgcattatatctgcttttttccggaaagtcaaacagccagattatttgtgaagtgactcaccattggtagcgattacatctttataccaatagaaggattttttcttataacggttcagtgtacctgttccatcgtcgttgcggtccacgtagatgtagccgtagcgttttttcagctctgctgtagatgcactgacaaggtcaatgcagccccaggaggtgtaccccataaattatatgtttttttcttccatgagcaagtccccatctctgcttactgcttttcgcagctccgcaggaaacttacttgattcggttaaaaaggcttgcagcttttttcgggggagagtatgcttgtagtatcataaataagagaaacaaggggattttcctatgaaaatatgtggatttaacaaaacaaccctgctggattatccgggaagggtagcctgtaccatattcttaggcggttgcaacttccgctgcccattctgccagaatggagctcttgtcgtggagcctgacacccagcccgaatattcccaggaggaaatcctggctttcctgaacaaaagaaagggaatcctggatggcgtctgcatttccggcggtgaacccacgcttgcaccggagctgccggaatttctcggcagaatcaaaacgcttggctatgatgtgaagcttgataccaacggttcccgcccctccgtagtaaaaaatctcgcagcagatggactgatcgacaaggttgccatggatatcaaggcctgtccttccaactatcatgtgcttaccggtgtacatgctgatctggatggaatccgggaaactgccggatggctgctggacggacaccttgattatgaatttcgtacaacagttgtgagggaacttcattccgaaaaagattttcaggagatcagccggtggttaagcggtgcaaaagcttattatctccaggcttaccgggattccgacggagttctgataccgggattctctgcctgctccgaggaagaaatgaaaaactaccgggatatcctgtctcagacgatcccggtagtagaaattcgtggtatggagctgtgatctgcggatttgcaaaactgtttgcttatctgcatggatgccgaaatttttctgatcagatgttaataaaacagtaccagtatcctccctttccgcctgggatatgaatatccggacattccttaaagtagggaaagccaaacatattggccataaaccgttcctgctgactgtatccgccgggcactcccagtatgtactgtccccggggatttctgcacagcagaagatggccgaaattctgatatccgtacatgacaaaacggttgctgcagaagcagccgttttttctgcataaggcactgcagtccgatggtctgatcttgcggcagtctgtgaaatagccgtcgttaaagggatcatcacagggtattcccggaagtggacgagatggctccggtcgcgatggtttcggcggatgcggtgacggctggcctggccgtggtggttccggcggatgcggtgacggctggactggtcgtggtggttccggcggatgtggtgatggctggcctagtcgcggtggctccggcggatgcggaccgggagcctgatatgaatttccggtttccgatgtctttaatacatcctcctgaatctcctccaccgtcatgatcctgtctgactccttctgattttcctgcacttctggcaaggttccatctttttgattttcttcttccttttcttcccgctctctgccttttttctccgccgccttctgatattccgttcctgttttctccgtttccttccgagattccatttcttttttcttccactcgcggaaattctccggccggatcggctgatcatcccattccgttccccagaatccgccggcatcggagatcagaagcagtcctccaagctcctgaagactttttcccatgcctccaatatcccctgtatccgtctccagtgcgcactcgatccgctcccgccctgtaacacagcttccgatcaaaataccatccatcagcccttcctgccgcacaaacccatacactctgcaccgacttccaggctccagtccaacgcagcgcagatgaacctccacacggcatttcctatctctggcctccaccctcacataaccgctgctgccatctttttttcctttccgatactcgtacacatacgcaacaaaacgctgatatccagccaacgcacgtccctccggtatttcggtttcgttaatatatatgaagatcgagagaaatcattccatcaactgaaaaaagctccaggatgtacaaacataaaaaagaacccctcaaccaagggattctcaagctgttagtcgaaagaatacggctatactcgaatcagtacaccgaaacagaatattaacagacaggtgaagaattaagacgtacagaaaatttgcgcatttgtcaaaaaagcattactatcttagaacattttgcgcttgtcaggattttccgtatatgctacactgtacgggaacaatcgtgttacagggtggctgacctctagtcccaaaaggatggaggtggtgctgatgaacaacaattattttgacttcaaagatcttatggcttttggcatgttcattctagcattgcttacgttcgtattaacgttttgtaagtaattctttacatagaaaaaccaccccaaaactttggccgagtacagggtgggattttctaatcttctcttataaggtcaaccccttgtgggcggttgttctttatatctgtattatagcactgctatttaaagcattcaagaatattttcatctgtaaatataaaaaagcctctggtggtccatgctcgggacattcaccaaaggctttctcctttcttttctcattgaggtaacacaaacttacattccttcattttccacaaacaaaaaagaacccctcaaccaagggattctcaagctgttagtcgaagcgacaggatttgaacctgcgacctctgcgtcccgaacgcagcgctctaccaaactgagccacgcttcgttattctgtttcagttgtttgtgtgttgctcaactgcaagagctattatattagagtttctgtactttgtcaatagaaaaaattaaaatttttcaaaaaaatcgaattttttcttttttcctgcttcgggcatgcattttcgcagacccgaagcagttttgggaaaggttctttataacatatcaagtatattcaagtgaaatatatgcttatttcactgtaactgttaccttttttgtgattccgttgctgcttacatagataacagcttttccttttttcacacctttaacaacacctttgctgcttacagtagcaacttttgtattgctgcttctgtaggtgatctttgcctttgaagtagcaactgccttgatggctgttgttttctttgcttttacacttacagctgttttggatgtgatcttcaggctacctttttttactgtgatcctgcaggttgctttgtagcttccgcattttactgtaattgtagctgttcctgctttttttgctgttacttttccacctgcgcttaccactgcaacggatttattactgcttgtataagtaacttttccgctaacgcctgtttttttcactttgatctggcttgttccacccacaaatacagtcttcgctgaagccgaagcttttacagacggcttcttaactgtgatcttgcaggttgctttataatttccgcatttcgctgtgatcacagctgtacctgccgcctttgcagttacctttccatttgcggctacagctacaacagatggtttactgcttgtataggttacttttccggtaacacctgcggtcgttgctttcagcgtcactgtagctggagatccttttacataaagcgtcttcgctgatgcattcagttttacagatggcgtttttacagtaagcttgtactgtgcagtttttcctgctgcagatgttgctgtgatcacggctgttcctgctgcttttgcaattacttttccgttctcgtctacagatgcaaccgtttcattatcggaagcgtatgttacatccttgcaattttcgcctgttgcttcaagctgtctggagcttccgatataaagaactcctgaattttctttaaaagcaattgttccatacaccagctgaacagaaacatccgcgtgatcatcactggagactcttactgtataggtttcattttccggtctcgctacagtggaatccaaagcaaccactccatctgcggctacaccatcctgtacaagatatgttgtctgtgaatcatgtccgacacctgttgtatagaaaacagataccttcggatttttgtatttatcaagatttgcaagctttacatgggtgctgtccgtaaattccggagaaacatccatctcttctgttgcctgcggtttgatataaataccatctgcaaattcatatacatacgcaccgtctgacataatatacgtgatcctgtttacggtttttccttcaagacctgcatcttttgcaaacgcagccttatataccttcacccacatctcgttcatatgacgcataccatattttccgccatctgttgtttccaggatcattccctggatcccggagttaactgcaaaaccagcatcactctttgtgtcgcggagatattttgtgctggtttcttttactttgatctcataatctccccaacgagaagatgtattgagtgttgcctccgcatctgtcacagttgcctttacattaaattttgtagcactgtatgttccatctgcattcaatgttttatactgcccaggctctaccgtcggagtacgtccaagggtgatccctgctgcttctatatatgctccgctttccggaagttctcccgcttctgaaaggatccgcgcctctacatacgtttttgcatctgtagctacactaaccttttttactcctgcgatctcatatccattttctgtcagattctgaacatctgcatttccgaaagcagtactttttctggttgtggcagatgtaacggaatcatatttgcggctcgttgcatctcctgcataaaattcctcgtatgacagagatgccgtaccgtaaagtgttcctgtcagtgcctgatgtccatttgccgccttataataaatatccgttcccggaatttgtgtatatccatccactgctccctttacccagtaataggaaacattggaaaccgtgatcggctggcctgtcagcgtgatattttttgtcatatccacataattgtcgcttgagatcataaccgtgtagatttcatccccggccctggctacactgctgtcaaaggttaccaccccgttctctgccgctgcatgatctacaacatatgttgtttttttaccatggccccttcctgttgtatagtatacggaaaccttagggttttcatatttgtcaaggtcatcaactttaacctgggttgtattttctttcacaaaagccgcctgtaccttcattcctgcttcaggctgtttttttacaagaggcgctttgtctccaaactcatatacataggagccgtccggagtaatataagtcacctttgatattttttccccgataagcccggatcctgctgaaaatgcaagttcgtaaggctgtacccagatttcataggtatgacgaagtcctaccttcttaccgctggcagtttcaaggattactcccagtgtatttccacctacggcaaaatcaccctgtctggaattgcggagatattttgtgccgacttcttttaccaccagcatgtaatcgccccagatcgacggtgcctggatctgggcagatgcatctgtgaccgttgcctttacatcgaattttgttgcactgtatgttccgtctgtattcagtgttttatactgtcctgtttcctgtgacggtgcttcattcagcgtaatatctgctgcctctgtatagacaccctttttcggaagcttggaagcagctttcagcacctgtgcatctacataagtttctgcgtccactgcaacacttacattcttcacaccctggatctgatatcctgaagaggttacttctgtgctgtcctcattggtaaaaatctgatttttactcgttgttgccgaagtgatagcgtcatagctctcctgagtggtatcgccggcataaaattccgaataacttaaggttgtcgttccgtacagctttccggtcagagctgtctgcccgtctgccgcttttacataaacgcctgttgtacctatctgtgtatatccctctgccggctgcatggaccagagatatttcactcctgcaacagtgatctcagaagcatcctgaaggacctcgcctgcttctgccataaatgcttctccatcaccgaatacctcttttgtatcctcctgaatctgctcttcctcttcctgttgaatctcttctgctgaaatttctgctacttcttcctgaatagcttctgcatcactttcttccggctcttccgactggatatcagcttcaccaacttccgactggtcctgggaaacagactcctgatcctcgttctctccttcttcctgtgctgtatctccttgtgtttcttctgacacgtcactaaaaacttccgcctcagacgccattgccgttaccggcactcctgacgcgatcaccgctgaactcagaacgagtgcagctgacttcttaaaaagcttccacttatgcatacctgtcctcctctttgtcttttatattacacaactttataccagatcatgaccttacagctgctctggttaattgaaatttcttctgcaggatattcaacatatgtcagtttccgcagaagtgctctatcaagcacgctttagtttgtccaagctaacatatcgtcattttatcaatgcttaaattatttgtctatacatatctggcaaaaaagcctcacggttattgttgtttttttctcaactgaaaattgttttcaaaatatttatattattatctgatacttcaaacaaaaaaaaagtatatatccaagacatcatttcaggaaatgcaacagacattgccatttcctccggcattctcagatcatatactttttatatttcaatatttttgctttcttttatgcccagcggctcttctgttcttcgcagatactgttccactggcagtttccacagatttccttacgtttatccagcgcaaggattttttcctggacttcttttgtaaattcgctgaagtacaatgtctgtccggccttcagtccacatttttccagcacggcattgtcatactctgccactttatctccggtttcgcaatgtccgcccagattattcggacaggcagagcagatctcatccgtatccacatgaagccttattttctttccctccagaaaaatcttcagcatctcggccatatgtgcagtaaaaccgttactgtagccttcccccttaaaatacgccaggcacataccatgatgagggcgcagcggaatgatcattccctctgtgccctcatcagaagcatatgccgcagcactgcttttatcttgcatatttacgtacctttcctgataaaacataagccagtgcgatcttgataagatccggaatgataaacgggaacacacaccagccaagaactgccataaggcctaccggacctgtgcttcttgtgtaggcaaacataaaccatgcggttccaaaggcatagcatacgatcagtccaacgatcatggaaatgatctgaacaaccggctttctgccaaaaacgtgctcaattgcccacataacaagtgcggaaaagataaatccaatgatatatccacctgcatttccgagaagagctccaatgcctccggaaaatcctgcaaaaaccggaactcctactgctccaagaagaacgtaaaccagaactgccagagttcctctttttcctccaagcacaccaactgccataaatactccgaatgtctgcagagtaaacggtacctgtgccggaatggaaatccatgagcaaactgccatcactaccgcaaaaactgcaatgtaaacaagatcatacgtcttgcttctgcctgctgccactgttgtcataataatctgtgtcctctctttccttttctgcttttcctgtcggaagatcattcctgtcctttataaatgatatccgctctttcgctgttaacaatttaacacagcaggatttcaatgtcaacttaattttattttttaagtttacattttacaatgccgtttacaactatgtaaacctgccatttacaaatgatatcgtcaattttcactttcaaattcccctctctgatgctatactgaaaccaatgagttttcagcaaaaagggggatttttccacatggatatacacgatattcataacatcagcaccaactgcacacggactgaatttgtagggaccgcagtccttgacacaatcggactcgtgatctccggagttgatgattctctgcttaaagagatgaacgtaggtacccaataccactgtctggggcttttcagttcccgaacaggcgctgccggccagatcacagctattgacgatgcagtaaaagccacaaatacagaagtcctttccattgaacttccaagagacaccaagggctggggcggtcacggaaactatatcgtccttggcggaaatgatgtatccgacgtgcgtcatgccatttctctggctctggaactgactaacaaatatgcaggtgaggtctacatcagcgaatccggccacctggagtttgctttttccgcaagtgcaggtcctgctatccataaagccttcggcacacctctgggtgaagcatttggtttcatggcaggttctccggctgctatcggtcttgtgatggcagataatgccgtgaaatccgcagcagtatcaattacacaatatatgactccgaatatcggtaccagtcattccaacgaagtgatcatcgccatctccggtgatgccagtgctgtaaaagctgctgtactggaaggccgtcagacaggccttgagcttctcatcggtatgggaacctatccggagatcccgggtacgccgtatctgtaaaatctccggattgcaggaaatttgtgaatttccacacactacacttcacgaaacacatatctgcgtcatgcatacaaaagcagcgctgcaaggatccgcatacgatcctgcagcgctgtatttctcttaaatattctcctctggatttttccggatcagcccacctgatatacatctgcagactgaagtccgaagcttaatgcctcagaatggcttccacaatagatatccacatgtccgtaaggagttcccagatcctctaccgtataaacagtgccgttgatcagaagcttggtcccaaacggaacacctgccatagcaacggtacgtcctgctgtcggaactgttccgctggcggtaagattgccggctgtaccgcagcactgtgcacagttgcagtatgcggtcagtgtaaagtttccaagatatgttccctgactggaagaaccggaatcggacgtatccgcagaggcatcttccgtctcctcgggagctgtctcatcattggaaacctcctgggagctgtcctcggaaacatcttcggaacttccagactgtacatcatccgcttcctcttcctcctctacaacaatgtctgtacttgtagagctgctggaagactcggttgtatcctcctccggatcatagccgtaatcatcgtcagaatcagcctcttcgctgtcctcgttatcctgatcggcttcttcctgggctgccgcttctgctgcctgtctctcagcctctgctgccgcttcagccttagctttctcttctgcagccttctccgcctctgcctgctgtaccagagcggtaatactgctgtctgcattactgatatctgccatcagctgctgagcctcttcctggctggcgctgatctggtttacataagagttaatatcatcgcttgtgctggaagccatggactgcacttcctgctgtttggctgcacgctccgtcatcagatcatcaatctctgcggactccgtctcaacctttttctcattctcctggatattctcctgaagactcacatatttatccagcatgtctctgtcgtatgtagaaatctggatcgcattctccgcgcgattgagaaattctgcaaggctttcggaagaaagcagtgtctccagcgcggaagttccggcattttcatacatatatgcgattcgaagcttcatggattcatactgatctgcagaagctttctttgcttttttcagttctttttttactttatttaattcatcttccttctcagcagcctggatactaagctcagaaatgctgttggtaagatcctcatactgtgcgtttaaatcagccagatagctctccagctcctgcttcttgctctccagtgtgccgatgctgctctgtacctgcgcaagaccctcctcagcggcctgtttctccgcctgtgcctctgcgatcgcagcgtctgtacctgatgcatatacggtgcttcccatggaaagggtcagcatacctgtaagcagtaatgtgaaaacttttctattcttcatataaacacctttcgtcctttcatggattctagtataacacatttttcataaaaagcaataattttattttatttttgtaacaaatacgtaataatttaaatttttatgaactgaaaagcatttttttgttttccggagcataaaaaaactgccctctcacagatttatctgtaaaacggcagtttttattctatgctgtttcaatccaaagatcatcagctacgagaatacttctctgatgtaatcccccctgaagctgcttctcttactccgcagcctccataagaacctcattctcagcttcctcagccattacttcctgatacttgtccaggatgatcgtctggatctgctctcttgttgctgaattgatcggatgtgcgatgtcacgatattcaccgtcgcttgccttacggcttggcattgcgatgaacagccccttctcgccttcgatcaccttgatgtcatgtaccacaaactcatcatctattgtgacagacacaacggccttcattttcccttcttttgctaccttcctcacacgtacatctgtaatattcattgctacttgcccctttcatttcgctaaccgtatctgcgggaaactgatcttccgcatttataatacgtagcgttcgtttttctctacgacgatcttcacttctccttcttcgccgcagtaatatgaattcgcccggatggtatcccggctctcaacaatgcaattctcaatatgcgtattatctccaagatatacgtcattaaggatcacagagtttttgatcacacagttatttcctacaaatacatcacggaacagaacagaattctccacggttccgttgatgatacatccgctggacaccagactgttcttcacagttgcacccggattgtacttagcaggaggtacatctgcgatcttggttttgatcgccggctcctgtttgaagaaatagttccggatctccggtttcaggaaatccatatttgtctgataataagcctctgcagtagagatattattccagtagttatcgatcttatatccgtaaatcctcttcagatttttgtaacggataagaatatcatttacaaaatcatgccttccttcctgggcagcacgctcgatcagttcgatcagctgccttcttcggatgacatagataccagtagataccgtattataggaggaaacgatcggtttctcctcaaattcctcgatccgacagtcctcattcatgcgaagaacaccaaatctctcaacctggctctgatccttgcatgtagtacatacaacggtaacatctgcccgctttgcgatatgatactccaggactttattgtaatccagcttgtagattccatcgccggaagcgatcaccgcatagggttcatgactgttctttaaaaagctcaggttctgatagatcgcatctgcagtaccctgataccataagctgttatctctggtaatggttggagtaaagacataaagtcctccctgttttcttccgaaatcccaccatttggatgaacttaaatgctcattaagggaacgggcattatactgtgtcagcacagcaaccttctggatatgtgaatttgccatgttgctgagggcaaagtcgatcgcgcggtaacttcctgcaataggcattgccgcgattgctcttttgtttgataattctctcatgcggttattattaccgcctgccaaaataatacctatcgctctcattctttcccaccgtcctttgctgcaattacctggccggctgccagttctccgtcagggtagtcttcttttgttgtaacaccggcgatagcggtattcttaccgattttgacactgtccggaatcacgctgttttcgccgatagccacaagtccaaaggaatatacagccggtttcagaacattcggtgcctcctcgccgcatccgatcacaacattatttccgatgacaacatcttctgccacgatggctttatccataacaacgttctcaccaactgctgtattcttcatgataatagaatcacggatcacactgcccttgccgatgataacattcggaccgatcactgaattatgtacttcaccatagatttctgttccctcaccgatgatacacttgtccacaactgcatctgcggaaatatactgtggcgggatcacatctcccttggtgtagatcctccagaattcctcataaagattaaactccggaatgatatcgatcagctccatatttgcttcccagtaagaaccaagagttcctacatctttccagtagccgttgtactcataagcaaaaaggcgctgccccttctctttacagtacggaaggatatgtttaccgaagtcacagccattctgatccttcagggcgatcagtgcttccttcagaaccggccatgagaaaatatagatacccatggatgcaagattgctgcttggatgctccggcttctcctcaaactcagtaatacggctgctctcatcagtaaccataataccaaaacggctggcttcctcaatgggaaccggcatacacgcgatcgtaatatctgccttgttcgccttgtggaaatccagcatcacttcgtaatccatcttatagatatggtcaccggaaaggatcagtacataatccgggttatactgctccatataagccagattctgatagatcgcattggcagttcctgtgtaccattcactgcttgtgctcttctcatacggaggaaggactgtgacaccgccttcattgcggtcaagatcccacggaataccgataccgatatgtgtattcaggcggagaggctggtactgtgtcagcacacccaccgtgtcaattcccgagttaatacaattgctcagtggaaaatcgatgatacgatatttaccaccaaaagcgactgccggctttgcaaccttttctgtcaaaactcctaacctgctgccttgcccaccggccaagagcatggcaatcatctctttcttaatcatgcgatcacctcttgtatgttatgattattccattatagcatactttactgtattagtgaacattttttacaattattttagctgtattttactttttttatcgctattgtatattataaattggtaagactcatcatttttttcatttctctggtaattttcaacatttttcgatgttattttctggttacttttatattccggaaaaaaccgcttttttagccaaaagaaccacttttcaattgtttctgttggcgttataataaaacagacaaaagagctacgaaaataacatatatataaggagattattatgtatcagatagactttcataaaccgctccatattcatttcatcgggatcggaggcatcagcatgagcggccttgccgaaatccttctggaagaaaatttccggatttccggttccgatgccaaatccagcccgctgacccgcacactggaagaacgtggcgctgtgatctattacggacagcgcgcttccaacatcaaggatgatgtagatgtggttgtctatacagcagcgatccacccggacaacccggaatttgcctgtgcgaaagaaaaagggcttccaatgctcacccgcgcagagcttctgggacagatcatgcggaactacgatacaccgatcgcaatttccggaacccatggaaaaaccactactacttccatggtttcccatatccttcttgagggtgactgtgatcctaccatcagtgttggcggaatccttcctgctatccacggaaatatccgcgttggaaattctgagacctttatcacagaggcatgcgaatacaccaacagctttttaagcttcttccctaagatcagtgtgatcctgaacatggatgccgatcatctggatttcttcaaggacatcgatgacatccgccattccttccggaaatttgcagagcttctccctgctgacggtactctgatcatcaacgccgacacaccggagtatgagacgatcacccgggagcttccatgcaatgttcttacctatggtctggagcacgatgccgattacaccgcagcagacattacctgggataaatacggacatccttccttctccgttctcttccggggcaaaaagatcggcagctattatctgcgtgtaccgggtatccacaacgtatccaatgcactggccgccattgccgtaggacgccttctggaccttccggatgatgtgatcgttaaaggtctcggaagctttaccggtacagaccgtcgtttccagtataaaggtgagatcggcggtatcaccatcattgatgattacgcacatcatccaactgagatcgaggcaacccttcatgctgcaaagaattatccgcatcagaaggtatggtgtgtattccagcctcatacctacacacgtaccaaagctcttcttccggaatttgcaaaagcgctgactctggccgatcatgttgtactggctgatatttatgccgcacgtgaaacagacaatcttggtatttcttcccaggatctccagaaacagatccaggaacttggaaccccctgcgaatatttcccgacttttgatgagatcgagagcttcctcttaaaaagttgtgcacatggtgatttgttgataactatgggcgccggagacgttgtaaatattggagaacaccttctcggaaaataattatccacattatccacatgcttatgcacatttcagacgtgcctggcatgtggatttttttgtgtataacctacttgacataattcaacagccaaattcaacaaataccgcatttttcttacaaaattaaggtttttgttagttgctgataatgttatcctcgaagttttccacactatccacattttccacatggaaattggtgcacaacttctgtgaaaatagactattctcaagtaaaagcggttgtgctataatcctttttagcatggcggacttcgggatatcacctgaaatatctgctgtattttagaaagggagctgctgatcatgagcctgatttcacttcagaattcctctgaactggaggtaacgattctttccaatcgctttattgacaatttcatgcctcgtgccaacggggagttcgtaaaggtatatatctaccttctccggatggtatctgctgctccttcttctttcagcctggagcatatggcagacagccttttctgcacggaaagagatatttcccgtgcgctgaaatactgggaaggtgagaaactgatcgcattaacctatactgtagatcagaagctttccgggatcactttgctggaaccctttgcggataccggtcatagagagagtagcgcttccgtagatactttcaccggttccggcaattctgcttccgtttccgggaacacggatccgggagtcccaagctccgctgattacattctcagtctcactcctgaccggatcagagaacttaagcaaaacgaagagatcagtcagcttctctatatcacagagcagtatctgaccaaaacactgacgcctacagaaatgcagaagatcctttttttctatgatgaactccatatgtctgcggatctcatcgaatatctggtggaatactgtgtttccagaggccgcaagagtatgcgttatattgaaactgttgcactcgcctgggcaaaagacggcatcaccaccgtcgagatggcccgggatgccagctcccgtttttccaaggattattacacgatcctgaaggctatggggatcagcggccgcaatcctgttgataacgagatcacttacattgatacctggcgcaagacctacggttttgatctggagctgatccaggaagcctgcagtcgtactgtcctttccaccggacagcccagtttccaatatgcagataagatcctctccggctggaaaaagaaaaacgtacatacgctggaggatatccggcttctggatgccgcacacaaaaaacgccagcttgagaaatccgtttccaggaagaagcagccccagactcagcctcagaatagcaaccgcttcaataatttccaccagcgtgattatgattttgcggaatatgagaaacgtcttttaaataatcagtaacagaacctggaaggagcgctttatgcctttacagaattttcaatatgatactataatgagagaatacagccgccggcaggcacagaaccaccgtattctggaggagcacacagccgaagcctacggaaagatcccacgtctgaaagagatcgatgacgaggtggcaactttaagtgctgacaaagtccgtcgccttttaaacggcgaagaaaagggaacttcggatctgaaggcagccatccaggagctttccgatgaacggatcacccttcttgttgcaaacggctttcccggagactatctggagatgccttacacctgccctgactgtcaggataccggctatatcggcagccgaaaatgcacctgttttaaaaaagctgagatcgaactgctttatgcacagtccaatctgaatgaaattctcgaaaaagagaattttgacagcttttcatttgactattattctgctacaataaaaaacgaagccacgggactgtctgccctggaaacagccagacgggcctatgacactgcacagcgctttgtgcagaacttcgaccataaatttgaaaacctgtttttatatggtgataccggtgtgggaaaaacctttctttcacactgcatcgcacgggagcttctcagatccacccactgtgttctgtacttttccgcctacgatctttttgatatgatggctgcgaattctttttcccgaaaagataccggcacagacgaggaactgatctatgactgtgatcttctgatcattgatgacctgggaacggagcttaccaacagtttcgtatcttcacaactttttctctgtctcaatgagcggatcatgcgcaggaaatccacgatcatttccacgaatctgacgctcaaaaatttctcggatacctattccgagagaacattttcccgaattgccagcaactatcagatgatatcgttgatcgggaaggacatccgtatacagaaaatatttttaggaggaaattaaaatggcacaggtaaatacaaaagatttttccacactcccggtaggaagacttggactgattccccttcagagctgcagctcattaggcgcgaaggtgaatgactggctggtcaaatggcgtgccgaaagacagtatcctggaatggactcctttgcattcgagggatacaagcgcgattcttacattattgacgccaagactccacgtttcggctccggtgagggtaaatgcaccatcaacgaatctgtccgcggtgatgatatctacgtaatggtagatgtaacaaattacagcttatcctatccgatcggaccttacacgaatcttatgtccccggatgatcatttccaggatatgaagcgtgttatcgccgctgtaggcggaaaagcccgcagagtcaacgtgatcatgccatatctctatgagagtcgccaggacaaacgtgtcggaagagagtctcttgactgtgccaatgcacttcatgagctgatcgatatgggtgttgagaatatcatcacctttgatgcacatgattcccgtgtacagaatgcgactcctcttcatggttttgagactgtacagccatcctaccagttcatcaaggctcttcttaataatgaaaagggacttcatatcgacaaggatcatttcatgacgatcagcccggacgaaggaagcatgaaccgtgcgatctatctcgccaatgtcctcggtgttgatatgggtatgtactataaacgtctggattactcaagatatgtaaacggccgtcatccgatcgcagcatatgaattcctcggaccaaagatcgagggcaaggatatgatcctgatcgatgatatgatctcctccggtgatacgatcattaagatcgcgtctctcctgaaagagaaaggagcaggcagagtttacatctgctctaccttcggattctttaccgatggtcttgataaatttgacgatgcttacaagaagggctatttcgacaagctccttactactaacctggtttatcagtcaccggagcttcttgagaagccatactacatcagctgcgatatgagcaaatatattgctctgatcattgatacgctgaaccatgatacctctgtcagccaccttctgaatccggtagacagaatcaaacgctgcgtaacaaattacatgagccagcatgagaaataaataaatcataacgcacgcaaagcggctgcaccttctgagaacgatataacagtttctcagaaagcgcagccgctttatatttctgtaacagacggatatccatgatccgcatctgctgtctgctttgcttttgatctttatgctgaaatcttcctgcaaaagctcacataggaagcttctgatagggaatcctctctttatccaggatctccatttctcttttatggcaggtacttatgatcacctgtctgttttctttatgcagccacctgagagccgctgcaagacgttcttcatcatacatgccaaatacatcatccaggatcacagggaacggttcctctttgcagaaaagctctcctgctgccatacgaagggcaaaataaatctgctccagtgtcccgcggctcagtctctcaatggatacgatacgctcccctgtgttcacagacatatgcagtgcctcatccatcagaacctcctggtatctgccaccggtgatctcacttaatatctcagatgtacgttttttcagacggacccctacctgatccgtaatgtttccggaaagtgcctcaatcgtctccatagccatattcagcgcctggatctccgtttcctccggagtgatcacttctgtattttcttcacattccgtcaactctgcctgcaggttctccagcgctgtatgcttctcttcgtagtcactgtccagactgttccggttccaggtcagctcctcatgtctggaatgccagcgctctctctgacgttctctcttattcagctccctgctgagccgtatgcgaaaaaacaatgccgctacagaaatcgccgcagttgccacgcctgccagaacactgaaaatgacctgcccggaaaaagctgccagacagccggtaccggcaatcccaccaagcagcacaactgccagaactgcatctgtcagctcccgtcttctttttacacgatcgatccgaagctcaagaagatcctctgtactccgttctctggtccctatgttcatcccgtcctgctgctgcatgatccgatcacgcttctcatccagttcacggatctctctgcggatatattccatgtttgcggaaatcttttctttttccttttccagctccttttttcgccgggccgcttctgtcagatatccttttctggacattttcagcatctgcatggctcgtcccatgtcaatggaactgtcaccggttccctgatagctggccatgtaattctgcagttcacgtacgagatcttttcctgtaacgcttttcagctgtgccacagacaccgtattatcataaactgcctcacttacatttcccagaatagtcccaagagctccctgttcggcatccacaagacttccgtcatcttcacagagaagctctcccagcttcttttctttataaaaattcctggtaagacgataattctttcctttgcttgtgaaccacatgattccgccatattctgccggattttcccatggttcatattttgtatatgtatcgttcagagcagcctttccccgcagtctgcgaacgccgtaaaacatggagcggataaatgtatgtgtggtagtttttccactctcattttcaccgtaaagtacgttgatcccaggcgaaagctccatatccttgtcccggatcttcccgaaattttttatttttaaacgtctgataaccatcttatgctatcctcctgtgctgcccctttatcgccggctgcctgtctcaagcaatgcctgaagcccataatacagcgcctttttttccacggtatccataccctttttggccaaaaaatagccgatataatcaccgatcagagtaccgctgtagcgtttgtagagctcaccaagatcatacgccggccaggattcatccacaacatcggtaacatttccgagacttttcagtttctcagggatcagaagaagatccggcgaacgcattccctgaagaacgatcctgtagatattccttcctcctctgcggaaaatctgggattttaccgcttcttccagagatatctgtgtagtttcctcgtgaagtgtcattaccagctgctgataggaacgacaggcaaagggaacgaactctgtacggatccttccgttgatcagtcgtccctccatatatccatgttcccctgtatcattcctgtcaatgggctccagagccccggaaaaggccgcctggtcacggatcaggatctgcggcttgtggatatgccctaacgccacataatcgaagcctgacgccgccagagctgctgcactgagaggaatatgcttctcatcgccgccatgggccagcagaatatggattccttctttctggacagggacagcctgatcataaagtccgtcttttatttcccggtcatagtaactcagtccatatacatagacatcaagcctaggatctttaacgcaggtcagttccctgctcttgaaaaatataacattggaattccactcaaacgtattataaaaagaatctctgcttataaaatcatgatttcctgccatcagatacactctggtatctgggatggtggaaaacagataatttacttccttaagctctctcataagaggctggcggtggaacagatctccggatataaatagcaaatccaccggatcttcgcggatgcccgcaataacccggcggaaagtgctccagatttcttcctcccgctctttgctccacgggcagcccctgtcgggaaccgcgcccagatgcacgtctgcaagatgaataaatctcataatgttctcccttgtgtgtcagtcacacatatcaatacctgttgccaatttttctctgctgttctctgatctcaggagcacagaacgtcctgctgtgcaaaagtgttctgatcaaagatcgcagttctttacagttctcgggaatgggatcacgtcacggatgttgcccatacctgtaaggtacatgacacatctctcaaatccaagaccaaagccggaatgacgtgtggaaccatatttacgaagatccagatagaaatcgtaatcctccggtttcagacccagctcatccatacgtgttctcagcttgtcgtagtcatcctctctctggcttcctccgatgatctctccgattcccggcaccagacagtccatagccgcaactgtctttccatcctcgttgagtttcatgtagaatgctttgatctccttcggataatctgtaacaaataccggtctcttgtagacctgctctgtcagatagcgctcatgctctgtctgaagatcacatccccagaataccttataatcaaatttgtcattgttcttctcaaggatctcaacagcctctgtataggtcacatgtgcaaattcagaattaagcacatggttcagtctgtcaagaagccccttgtcaatgaaggaattgaagaagttcatttcctccggtgcattctcaaagacataacggatcacgtatttcagcatagcctctgcaagctccatagcgtcctgaaggtctgcaaacgcacactcaggctcgatcatccagaactcagctgcatgacgggtagtgttggaattctcagcacggaaggtcggtccgaatgtgtagatattgcggaatgcctgtgcataagtctctccgttcagctgtccgcttacggtaaggtttgtctcctttccgaagaaatcctgtgaataatcaacacttccatcctctgtcagcggaatattcttcggatccagtgttgttacctggaacatctctcctgcaccttcacagtcacttcctgtgatcagcggtgtatgcacatagacaaagcctctctcctggaaaaatttatggatcgcatatgcacagagagaacgtacacggaatacagcctgaaaagtatttgttctcggtcttaaatgtgtcatggtccttaagtattcaagactgtgtctcttcttctgaagtggataatccggtgcggaagctccctctacagatatctctgttgcctggatctcaaatggctgcttcgcctgaggggtagctaccagcgttcccttaacgatgatggctgctccaacgttcagtttggaaacctctgcgaaattctccatgttatcgtgatatacgatctgaagagtttcaaaaaagcttccatcatgaagtacgatgaatccaaacgccttggaatcacgaacacttcgtacccatccacctacggtgatctctttgtcgagatactgttcacggtttctgtaaatctctttcactgttgtcagtttcataatctatacctcattcctcatattcaggatcacacgtccctgcggacctccaaacgtccgtatcgaattaagtatagactattctcatggttcgtgcaaggagtaattgccctgtcggacagaaaaatagcgggccgccgaacagaaaaatcccgcctggcggaatgtctccggcagacgggatttttctgtctgttataccattaataataagatgcgttgatacttcctgtgttaagataagtaatgcagtaatagtagatcctcttgaatgtctttgttgtgtagtgaagtccgtcatcgccgtcatccacaccatcatagcgggcattggtcccgtagccttttttcataagtacgctgtacatatcgatgtacttgtaatccagagaaagaccggaacggatcttgctgttgaattctcttacctgtgcctctgtacgggcgcctcttcctgcttttgtgatcataatactgttgatcgggtttacagacatgtaaaagagcttacagttcttacttttcaatgtggatgcgatactggtcatatagctgacataattgcctgcatttcccaggtcattgacacccagattaaagataacggcgatcggtttggaaccttctgttttgtcgatctcttctataagctgtgcatatcctgtatcccggaaccagctcaagccctttcctgggtttgcaacaaaagaaaccccatttgttacagaactgctcatctgttttttcagtgtcgcctgtattcctgcagtacgggaatctcccacaaaaataaccttactgtacatcataccgatcgccggatgagccatctcatcggagctgatatccttctccagtgcacggttaaataccgtcgcatacagattggtgtttttgttgatccgcagaagttcgccggcttcataatccggatctgtggaagaaccggtccgtctggtcttagaccagcccataaacgtataacctgtcgcattggatacggatgggagcttaaggtaaccgccctttccaagagttactgtcttccacacggttccgtttgccttgcggagatttacctttactgactgcatctgtacggaatagtatctgatattaccggagatcttaatcttcgttcctactttttttgcagtagatgccttgccgttctttgctgttgaccagccaagatttacatatcccgatctggacggaactgcaggcaatgtgtaatatgtaccctcttctacttttttctgcagcttcttatatgcggaattggtgcttccatttccaagatagaagtttacggtatagtatctgctctttctgcggaccgcatatagagtcatatcttttctgacctttacgcgggcacctgctttatatactaccttgctactcctcttccgtgtggtccatccgagattctgatatcccacagccttgggtactgccggaagccggatcgtggtatttaatgtcacattccgtgtcagtgcagtatacgtcttacttttgctggtacctgaattattattgaacttaacggtataaacaagcttcgccgccgacaccttatgtgatgcagccggcacaaagatcagtgcagctgccacaagtgccagcaaaagccattttatgcgaaggaccttaccggttttttccctgtttttcatataaacaaactcctcctgaaatacatatccatccccgggtgcctccgtactttttacagagtattgataaatctcataaatgcatccctgccctctggtgtgcatttataaacaccggcatcctccagtacatgaacaaatacattgcccacttccctgcgaaggacttcctggatattatctttatcaagtttctcatattttggcagaaattctgcaacccatgcagcatgtttctcgattttctcattggaagcaatgtccctgccgcttaaaatgtattcttcaagaagctccagctcttctttcagacgtgccggaagaacagcgagtcccataacttcgataagaccgatattctctttcttgatatgatgatagcatgcatgcggatgataaacccccagcggatgctcctctgttgtgatattgttacgtaatgtcagatccagttcaaaggtatctcccactttacgtgcgatcggtgtgatggtgttatggggctctccgtctgtttctgcaaagataaatgcagcctcatccgtatatcctctccagcctgccagtacatgtgttgctagatcgatcagtctcgtctcgtctttgctgcggatacgcagtacggaaagaggccattttacaatgccggcttccacatcttcgtatcccgggatcgtcacatgcttttcaatctctgccttcgccatggcaaaggtataatgcccgccctggaaatgatcgtggctaaggatagaacctcctacgattggaagatccgcattggagccaaggaaataatgcgggaacagctttacaaaatcaaacagcttgataaatgtatttctctcgatcttcatcggagtatgctgactgttaaatacgatacaatgttcattgtagtaaacatatggagagtactggaagccccatggactgtcattgatggtgatcgggatgatcctgtggttctcccttgccggatgattgactcttcctgcatagccttcattttccggacaaagcagacattttggatagctgctggattttaccagcttggcagctgcgatagcctttgggtctttttccggcttggaaaggttgatcgtgatatcaatcttgccatattcgctgtctactgtccatttctgatctttttttacgcgataacgtctgatatagttgctgtcctgactcagcttataaaaataatctgtggctttttccggattttctttataagtatcccagaattctctctgcacctgggcaggacgcggcatcagacagttcatcagctttgtatcaaagagatctctgtacacaatactgttctcgatgatgcccctctttacagcctcatcaagaagttcgttcaaagtctcctcaagattgattttagcatactctgtctccggttctgtatattcgctttccccaaaggcatccagaagaagattggttgcataaattctttcgcattctggagtaataccactctccaccccatactgtaccagttttttaatactttcacttaacattgatttttcccctttcctgtcgcgcttttcccggaaaacaggaacttttttcctattttccgatttatgccaaacgggaactcccgtcttgccatcctgctgtaaccccatggccttcatccggcctgctctgtaagcatcactctatgacgttttctatataggtgagaaatacatttccggcactctcaaacagcgctgtactgtcattcattccatacgggctgatctgccctgttgccggatcataaagataggtattatattcatcatagcctacgatcaccacactggaattttctcctgtcttggcgatcaccggtctctgggcactgacctcataaagaacattgtcaagagtgcagccggtcagatcgatcaccgttcccatatcaccaaggctatcctgaagttcttttttcttccagttggctgtacgtatgctttccggtacatcctctatattcatctggagctttgtttttttgtttccacgttcccagacatactgctgcgcacggttaagtaccactccagtctgcgcatccgcgcgtttcacagctgcagccggatcggtatagatacggtcaagagaaccatatgcataaacataataaagttctccctgtggaacggtagtatccaatgttaccgatgagtcttcagtactctcgatcttggaacaaacaagcagcggactgtctgtctccggtttctgagtcatggtcaggcgaatcagcgttcctgcacggtttgtagtgatcaatgctacatctatctggcttccggatgcttttttgttattcatgatattgtcctttttctggactgtataagcattccccgattttgcagaaagttcaaactccatcatggtactgccaaccgttacgttggtgatataaaggccatcctgacgatactcttttttcacctttcctttaaagctttcaatgcggaatgtactgattccctctgtttcatgtccgttggcatcagtaagaatgtcctcatcggaaaggatcccatataccagatcttcattcataaatcccagaactctcagattttttccgctttccggcgaaatatctcttgttttcagagaatcaaattcaatttcccggatcttccctgcatcatctccggattcgatcagccatgctgcatgtgccttggtatctgacacaacaaaatggttctgtttgatcccttcttcaagaacctgtgaggttcctgtctcaatatctacctgatacagcttctgtgcaaacagcagaaacagctgattgtttttgtttacataagtgagtgttccgagatcttccttcaggaactcgtaggattctgtacttggtatgaatactttttcttccaccacattgcggtcgctattgtagtgataaacacaaacaccgctgtatccctcgtgaacaccacggttcatataaccgtacaatacaaagtccacatccccgttatctgccactcggatgatcttgatatcatgttcgtcgcgcacatatctggaatcgttatcttcctctttgcggaagctgaagatccttgtgatctttccgctggacggtgcataagaccagagatccccatcctgctcaaaagcaacaatctttccactgctgtctgaagcgtaggtgacattcttgtcacggacacccagaagcaggcctgcatcagaaactaccttctgagatggatcaaataccttcgttgcagaacgtttgaaatccagcagcatgatccttgtttctgtatagcgcatacggtaaaattccgtgacatcataaatttcggttttcccctcatcatcctgtgcggaaacctgataatccagcgtgatacttgcagtcgtttcattgatatcatcgatcagcggaactccttccatatagagcttcggagaaagggatccccagctgatattggaaagtccggaattgatggaaatattattgtaattcgttccgccagaagtatcctccgcttccagatatccggtcagcgtatctgcctgttccttgtccagacactttgtggaaaaatccctgacaaactgaagatacgcttctgtattcaactgggttctggaaaccactcttgtgtagtagtaaacttcccccgcactggtatccagcgtaatctgcatggaatactcctggttcatgcgaaggtcactgccaatctcaatctctgtacttaaacagccgttgtcctctttcgtgagattcttgatcttacggttctccataaccttacttccgtctgaagtccgtacctcataagcaagccctgttactgtatcagcatatgggttgatctcaaaagacacttttttggtagtatccaacggagtaatacttcccctcatgaaatcggtctgcatctgctgtctgtatccatacatcttatttgcctgggtacttccgatctttaccataacctccggaagtgtggcatcgttcatatcggagcggttatctgtagactggctgttcatcagaaacgaggtcccggctactactgccacaaagatcaccagcagtatcgctcccttacgtaggatcttcatcatgtcattctcccttctgtgaggctgactcttccggataaagaagcctgtccagggtaggagccacatgaagagccttcatggtatccgaaaaactgtccctgctctttttctttccggtttttactgcgcggatcagaatattctttggtgtatgttccatatcgataaattcaaggagctgggtttcatatcctttgctttccagaagctcggcacgaagaccatctgtgatcagagctgccattctttccttcaggattccataacgcataacaggctgaagcatttcgtttcggatctgacggttcagttcatgctgatagcacgggacagacaggatcacctgagccccccattccactgccttggccaaagcaaaatctgttgctgtatcgcaggcatgaagtgtcaccaccatgtccacagaagaaactccttcataccctgcaatatctccctggtaaaaatgcagcttgtcataaccataagatctggccaattcactgcaatgccgtatcacatcttccttaagatccagccctatgatgtttacatcaaaaccttccagttctctgagataataatacatagcaaaagtaagataggatttcccgcagccaaaatccaggatcgtgatctctctgtctttaggaagcttcggaaggatatccctgataaactccagaaagcggttgatctgtctgaacttatcatatctggaggcaacgatcttcccatcctttgtcataactcccagatccaccaggaacggagctgccgttccctctctgagaatatactgtttcacccggttatgaggagcgatctttatcttttcattctgcgcaggcccgtgttgttttgttttgatggttgctttccctttcttgctgataaggatacttccatcctgactgcgtccggttgcctgaagctgacgaaattcctccatagcatgctccagataagcgatcatctcttccctggtaaaattcttatgataaaccttcgtcccttctgtcatggacgcctggtaaaaaatctggcccttcagctccacaggacgaagcttcaccttggaaggtccctcgccagtcctgcggccactgacaacagcctgtatcagctgttcattaatctgttcttctaaaaattcccttattgtcttcatcatacttccattatattcactttttgttttattgtatatggacagatgttgtgcgaaccagttttggtcgcttctgccggtatcacagtatcgttcatgggtaaaccgccattttaatactcagtgcgaaaacattttctgcaccttctcctcctgcatcttcgtctggaaatctcctgatacaccagcacttcgatcagatcatccaggaatcctcccggaatctcctgtacactggtatctccctccatctgttccttcacctggtgacagatgtgatagagcatgaaacgatccggatattcatcatacagccggcttccctcataatccagaagctgacactgtgcttccgctttttcctggatccttcgggctgtatccggatagtatgatctcatcagatcaaattccttttcctgttctctctcttcattataaaaaccaggacttccctgtgtagcataaaacggataaaaatctggatagatcataactcttctgctgtcctctctctgctatctcttacagtatatgcagaagaaaaatgacggttccctccaaagttccgatcaaaccatgcgtttcagcattccctgggtcagacgtacgctgtgctcaattgcaagcttttcaaacgccggataatccatgtttgcactattatctgctttatctgagatagcacggatgatcaggaatggaatcccattaagagctgctgcctgtccaatcgctgcgccctccatctcaacagcataggcgctgaattcctttacaatattatcctttacaccttgatcacatacaaactgatctccggaagcaattcttccttcaaaaacccggatctccggatttacttcctcgcatacatcatgtgcgatcttacgaaggtactcatctgcctggaaagaaaactctttcatctgcgggatctgtcccttcggatatccgaatccggttgcatccatatcatgatgaagaacatctgtggaaagtacgatatctccaatattgatatcattgttaaggcttcctgcgataccggtattgatcaccgcttccacctgaaagagatctgccaggatctgggtgcacataccggcatttaccttaccgatcccggactgtaccacaactaccttctttccttccagaacaccctcataaaaatccattccagctctggtagtaatggatacattctccataacctctttcagtcttgctacttcctgttccattgctcctatgattccaacacatttcatgatctgtaaatcctctctttcaatatgatatcctgctgaatttcacattttttctgttcagcagtgttttttctttttctacattgttcattataacaaattttattttttatggaaactttttttgagagatgctataatcgataaataaatagaacaggaggtaaacagaatggtttataagacaaaaggcgtctgtgctcagggaattgagttcgagatcgacgataataaaaaagttcacaatatcaagtttacaggcggatgttccggaaacacacagggtgttgcacagcttgcagagggaatggatgcagatgaagtaatctcccgtctggaaggcatccgctgcggattcaaaccaacttcatgtccagatcagcttgcaaaagccatccgccaggcattgaacgaaggctgatctcacataatcttattttgtgtatctgatatatcatcaccctgcgaaaaatttccgcagggtgattttatagcaatcctctaaaataatgcatcttaatccagcccatcagagtgtgaaatcctgcgtcagatatctttcttgtctttcgcactctgctgaactgtcttaattgcattatttacgaggattgctataggataatgtgacaaaataactgtctcaacgttatttagttaaatgtccgttctatcccacttgtcacacagtgactggatatctcttgcaaaacgatccagatctttattggggcagccttcattcttccgaatcacggacatcaggcgacgtcccatagccaacagcttctcatatgcacgggcagccttggttgttttcggcgaagcagttgcctttacgatccgaacaccgacagcctcatggatacaccggttctccagaagatcatattctgttccactaaagggtgctgttgcatcatacccaagctcttctttaagcctctgggcaaaaatctccgtcaccgtatcatcaccatgcgtaacaaatacgtgttttggtttcgtctcaaaggctttcgcccattctataagtccgtttacatcagcatgaccgctgattcccggcattttgcatatttcagcagctacctgcacattctcaccaaacagcttcatctccgcagcaccttccaataatgcccgtcccggagttcctatagcctggtatccaacaaaaagaatggtatttctgggattccacagattgtgtttcagatgatgtttgatacgaccagcatcacacataccgctggcggaaatgatcaccttgcagtcctcatcaaaattgatagctctggaatcatcggtagtaacggaggtcttcaatccctggaaggataacggattgatacctttattcaaaagatccattgcttcctcatcatagcaggtatatgcattctcactgaagatcgtggttgcctcattagcaaggggactgtctacatataccgtaaaaccatcatggctgtgaaccagtccctgttctttaatctgtcggataaaatacagcatttcctgagtacggcctactgcaaaggacgggatcaccagactgccgcctctgtcaaaggtcctctggatgatctctgccagtattgccggataatccggacgttctccatgactgcggtctccgtaggtagattccatcacaacataatctgcctcccggatatataccggatccctgatcagcggctgatcgatatttccgatatcgccggaaaaaacgatcttttctgttttgtcctcttccgtcatccagatttcaatactgctggagccaagaagatgtcctgcatccacaaatcttacttcgattccctctgccggtttgatgatcttatcatatgggcatctgacgaagttccggagcacacccatggcatcttccatagtgtatgcaggaataaattccggttttccttctctccgcccctttcggtttctccactcagcctcgaacatctggatatgtgcgctgtcacgaagcatgatatcgcagagattacaagttgcctctgtcgcatagatcggcccctgatagccttttgcatacaaggccggaagatttccggaatgatccatgtgtgcatgtgtcagaagcacaaaatccagatcacccggagccaccggaagctccttattttcataataatccggtccctgctccattccataatccaccagaaacttccgtcctgccgcttccagataataacagcttccagttacctcatgcgtagcaccgataaatgttatcttcatgcacaagcccccttttccgtcccacgttctgaaatttccatatcaaaaaaagcctgaaggatttctctgtgatatccgatcatccagaaacgctgtgatatacaattccaagaagaaataatcgactttttgtttattaacggtttgttattgtatttattatacacgaaatatatgttttttgacagtctttttgtgaaatatgtttctttttttaaggggatttttttagattttttgatattattcagaatttttagacattccccagcgaaggtaatgtaaagtttactggatttttttattttttggggtgtgacatcgctggggatgtgagagttgatttgttattttactaaaacaccgctggttaatgttgtagttgattccttgcttccatcttttgctgcatgatatcctcgtacgcgataataataaccgctcggaacgataactgtcagtcccttatttaaatgatctacattgtttgctgtataactccaacttttataagtagaatatgtaccttttactttccgttccaaatatatctccaaatatactttatcacaaacatgatgacactgtgttattcctgaaacagccaccttattgctagccatttttttcacagaagttgttccaaaatttaaattgttgcctcttaacatactgtatgtagtatcttcagcataatccgcatctgtatccgtatccactgaaaaatcatctgataaattctctgccattacaggtgacgcaaacaatatgctgcaacagcatactaataataaatttcgcacaattcttttcattttctctttcatatagtgcctttccacctttaaacttccattacaatatatatacgagttaagaaataaattatctcgtcaaaatcttatgttttttatcatttttaaaaattcttctttttccatctttccacttatctcataaaaagcggtattatccttccaataagcaacataattttcttttttatcctgattatcttttattttttttatttcaattacaatattttcatctttccacttaagtgtttctaatgtttctccatctaaattataatcactatttttactgctatcactatgatcattaatatataatgttataattacatttttataatcatactctatcaaagcattgccaatatccgtgttaatttcatagcttttaaatttaagtccaactggtctgtacataaattggggaattgtatttaaatttaatttatttttcacttcatctaacgccatctgctcatccttctgcgctctctcattttcttcatcattttcaattgaaatactcgtatcatccccagcccaatacctcacagaatcaataaaataactcctgttcgcctggctggtcatgcttgcggcgaagataccggctgagcatacaagtactgctgccgctacgcgagctgctttatgacttttcttttcgggcagataaacgatttttacattctctttatgatcatcagttttaatactgtcagtttcgtcttctttgtaaacaccatctgctttcagtttttctacaagcctctgataagcagcctttgcctcctcttctgtttctccatcatcaggaatcactccatctggaaacaggattttttccatctcttcggtttctttttcatattcttctgccaaccattttttcagttcggcatccctgaaattttccattatttttctcctgtaatcctatctttccttgacaattcctccgttagagttcatatttaatgatagtatatgactattcaggaggaatccaaatgaaacacatcgtacttaccggcggtggtactgccggacatgtaactccaaatattgccctgattccaaagctcagggagcttggttataagatttcctacatcggttcctacgaaggaatcgaaaaaaaactgatcgaagaacttggaatcccatattatggaatctcatccggaaagctgagacgttacttcgatctcaaaaacttctctgacccgtttcgtgtactgaagggattcagccaggccagaaagattctgaaagagctgaaaccggacgttgttttttccaagggcggtttcgttacggttcccgttgtgatcgcggccaaacgtttaaaaatccccgcattgatccacgagtccgacatgactccaggtcttgccaataaactctgtctctcttctgcatccagaatctgctgtaattttcctgagacagtcgccaatcttcctgctgacaaagcagttcttacaggaactccgatccgccaggaacttctttccggaaatgcggaaaacggtcgtaaattctgtggtttcactgctgacaaaccggtacttatggttatcggtggtagtctgggagctgcttctgtcaatgataatgtccgcaagatcctccctgaacttctgaaggaattccaggttgttcatctctgcggaaagggaaaaaccgatgaatctctcaacggtactgccggatacgtccagtatgaatatatccaggacgagcttccggatctgtttgccatggctgatatcgtgatctcccgcgcaggcgctaacgcaatctgtgagatccgcgaacttcataagccaaatcttctgatcccgctttctgccaaagccagtcgtggtgaccagatccttaacgctcgatccttcgaacgccagggcttcagtaaagtgctggaagaagaggagattacagaagaaaagcttctggaaaccatccgccagctctataccgatcgtcagaaatatacagatgctatggcaggaaacggccaagtagattccatcagtaagatcactgatcttattgaagaatgcgccagagcctgactacatttccacaacagccatatgaaaactctgccactcccttccgggctggcagggttttcttttattcgtatactttgcgaaattcttcctgcagccagcgcttcgctttatatatcctgttattgacaccacttttcgtcagaccatattcttctgcaactgtttcaacggaaatctccagatatttgacctgaattaagatctcataatttatcggctgttcctttcgaaatcttctcagcaccatatacataaattctttcttctctttacgcagaaatacctcttccgcatcgaccgaattctgttcttccagaaatgccgcaacttcttcctgacagacaaactcatgcttggagcttgatttctttatataatccaaagccttattcatagatgccctcttgatcagagaaaacatcatcttttcattatcaatattcaggccatcctttatagtatacattttgtaaagtacatcctgactgacatcatcagcagtactccagtcatggagaaccccatacgcataccctctggatatttttcggtatttaagataaaactcttcaaatgtctgattattcatttttcctctttagtggctatttgtcattctttaattttctttaagatttcatctctcacctcatcgctgagttctccgggtttccaggttaaaccaacaccatctccctcatatctcggaatcagatgcatgtgaaaatgaaacacagtctgtcctgcgatctctccattgttctgcacaacattaaatccatcacagttcagtgcatctctaagttttcctgccatttttttagccaggatcattgcttttccggcagtctcatccggaagttcataaatattcgctgcatgctttttcggcagtatcaatgagtgtcctttgcttgccggtcccagatccagaatcacacgaaattcctcatcctcataaagtgttgctgatggaatctctccatttgcgattttacaaaatatgcaatctcccattattttgtcctccttgtttgcaaaattattttatctatattcttattttgtcgtattttctcgaatttttcaatactgttcttgttgatatttgaaatttctgatgttaatattttttcgaggtgataatatgtgcaacgatactacagtcagtaaattgaaaaacgattttcattatacactttcaaaattttcacatgaactccggaatcctctgactcttattaacagcggactccagatgatcgcatctgcacatcctgaggtcaaagaatatgagcactgggatgatgttatggataatcttgattatgtaaaagaacttcttgatgaactttctgcatttaataatgcaggccatgtcaaaagagaaaacattgacacctgcagctacctccgaacgatcctttcctccataaaacctactctggattatctggagatcacacttgaaacagatattccggattcattgccatcgatggctcttgaccggatccgtgtccggcagatgcttctgaatcttctgaaaaacgcatgggaagccgttcctattcccggaggaaagatttctttttctgtcattccggaaaattccggcatccgcattgatatccgggataacggatgtggaatctcaaaggaacagcaggctacgatatttcagccattttttacaaccaaagaatccgggaccggccttggccttgctgtttcaaaacagatcgctcaggcacacagtggagacatcacgcttgagagcgctcccggtcagggaactgttttccatatttttctgggatgataaagaattacagcgatcaggaaaccactcaacaaaccgcctatatgcgctacgttatccacgccttcacttgcaaatccgaaatacagtgaaaatgcggccatgatcagcatctgtctgacagttagatccgccactcttcctctgtgccgtatgatcacatagatcataccgcccatgactgcaaaaacagctccggaagctcctgcagataaagaagcgtttcctgcatacatatcaaaaaacaaagagagcatatttccgcccagaccaccaaatatatagatcagaaaaaattttatctttcctgttaccggttccagtctctggccaagcacaaacagaaccaacatattattgatcagatgcggcgcaccaaaatgcagaaacatactgctaaacaaccgataccactgtccctgttccaggatcagcggtgcataagcagcaccgcattccagcatatgctgcccgttctccgagccgccggtaaattccaccacaagaaagatcagcgtatttatgaggatcagtaaaactgtcacagggtctttttttatttcttccaattccggcctctttccacagcggttccggaaatatttcccataactcgctgttataatctgaaaattcgaatttatttcattattttaacagattttcatcaggcggacaacctacggtcccatattagtacgatacaaaactggatttttcgctctgttatttcaaaaaaatataacgggcctgtgcaaaatcgacttcatcctcatcctccagcaaataatcttctcctgttttcagaagctgtccatttacagaagtcccatttctggagttcagatctgccagataatatgccccctccctttttcggatcttggcatggatcctgctgacagttggtatattgatcactgcatccgccgcagtttccagttttccgatcactgtgatatctctttccagataaatggtagccaattcccccggttcccggcttactaatgtagcaggacctttggatgcacctgccgaaagaactactgtttcaccaaatccatctaaaaaatcttccgcttttgtcgggatattttttttgatcttttccagttcttttctgctgtcatcagcattgctccctgacagcgtaccagattctttctgatcttcagaatatacagctgcctctttttccgccgcaccatatttctgctcaggcaccggcgtatccagttttttcctttttccacagacttttttgatcagaatatagctcagcatccccagtatcattgctgcaagaattcccagaagaaaaatttctttgcttattcttggaatatatccgccggccattcctgccgtaattcccagaagaagcaccaatgctgcaccaaatccagccactggcttccatattttgtttgttttccgcttctgtgagtccgctgaagattttttctgtttttcatttccggacacactggctctttcccagccttccacctgccacagatcctctgctttttcctcctctgtcatcctgttttcttcctggaccactgttttctttttttcatatggagaaaaatcttcctcgtcgctgttacatattttatataactcttccttgatgtattccagatgaaagctgtcctccagtgcacgtctgtatacattatatcccaacatgaccgcttttccgtcttcatgatccagctttggaaggatatactccgcaagactctgaaactgtttctgtatttccccatgaaatcccggaagataacaaaatcggacactttttctttccgcatccagatagatatattccggttccaggatcagctgacagggattcaaaagatactcggacatttcttccatgatctgtataaagcctcccagtatcacctgaagcgactccagatccatctttttttcctcaaaaagcgcagtcatggaatgcctggaagttatatcataatacaccatgaattttccgtcgattccctgtatccgacactgaagaagatcaggcacagcattggccacgatcatccttacctggtaagaatctgtatcgattctctcatctcctgtcaggatcagataattatgattcatatctcttttatattccgttctcattttatggcgtcacctctcccagcatatccacagttccttttaccttgcggatccatcccacaggccgcagaggctttgccttaccactgacttccagcttccatttctgccccaggaacccggcaggtacttccagtctgtaagttactttcacagtttttcctacatttgtctgcatgctcagattctctcctcccggcagcccgatatctcccagcattctaccctgtatatccgccttttcatatatgttccctttctttttatatccttccatactgccactgactgctgcctcataagctgccgcagtgagatatgctctgtcatgtacaaaaaaatccagatacagcactccgatcagtatcataagcaccagaggcatgagcaatgcagcttctattgtaaagctccccttttttatttttctcacaaaaatatccctcccaaatatccgatcaacagaaacggtacaaaaggaatttcctcacttcgactcttttttagcataagatactcaatgcctgagtagattccgcacaacaataatgcaccacagaggatccctgccagttctccggcccccagcacagagcccattgtcagtatcagcaatccgtctccaaatccgaccattcctccactgatcaaagcgatcaaaattataaatactccgattcccatggaaataatccctgccggccagagaagtccctgcctgattcgccacaggatcccgcctgccagaaaaataaaaagcaccggtaaacagatttctttttttcggatatctgtccatgtattaattccaagaagtacagtcatgcaaatttttacactgctcatgatctctcccttcagccacatcgcccgcaggcactcatttcaccggaaacctctgtttctttcaccatccgtacagatcgtttcaatgcgctgcagctttccctgttatgaaaacggttactcttttttgtgatatataccactccggccggttcctgcccacgactgcacagctcacaggcctgatacttttctccatatgcattttttaaagctttaaccgaagagcctgatatctgctgaacagacagattcagataactgcaccccagttttctgtgatacacacttcctgattctgtcacatacaccataggctggctctccactgtatcctttccattttcgtatatcacaccattccacgtatgaacctttaccgtattatggaaccatattttaggaagcgggatcagaccgcctatgggttgataggaatatacgtccggcaatgtaatcgtttctgtacctgaaccgccggcaccatacgcatacatacctgcttcctttgctttctggcacaagccggtcagatgctccgtctgtaccttgtaaatatccataaaagaaagcagcgtgagcactccgaaaaaaaacagcggcaaagccatcgcagtctccagagtgagacttgcttttttcagaaaggtgcacagggatacttttccagaaagcgttttccggcttatcggggaaagcaggaaaaaagctcttcgagagcgcctttctcttttttgatccagtctgtttatctgatttttatcttctttttctttctgaaaaagcatccctgtacacctctctttctattcatacatatactgacgcgtaactgtaaatattttccgtctgtttgcttttacatctgcagaagcttccagggcagtgatgcagtggtccatctgaaaacccggtctttttcccttttcacgtacagagcactcgatcatgtccattcctctcagaactttatcctgttttcctttcgccataagcagaacctgaagataatcctcataagacattccattccctgcatcctttcttgaagaatccagtttgtccaggatattgggcagattactcaaagacagctgccagtctgaggagttttttataagaggtacatgtcctcctgcaaaaagttcccggacatccagaatactctccgcaaatgcccagcaaaaaatcagtgccgcttcgatcactgctgccgccggtgggatcagaaaacctgatgcaatcgccagcgccagtgtttcgacctgtatccgttttccaccatctgaaagcagatactccatgttaaccccctgacggatcaccagaagttttcctgccacggacttcagattttcccgatcactgttcttccctccaagaatatattccacctgataattcaaccccgccgctgccggtcttcgataatttcccagtttctttagcagatactgtccaaacaatattccggacgtatacgaattatcggatcgtatatccgtatccaacattagtcctgtctggagctttcttccagatgtaaggctttttctgtctgtaaccgcatccgatattccccgttcggatggtactaccagatcaagaagtcccattttacggactcttctgatgattggaataggattttccacgctttcatcaacaccgccggtaaaatcatccccatttcctgcatccgaaaaatctccctggtttttttgttgttcctgttcttttttggcttcttcgctcttctgcgcggcgtccgtaatagcagaatcataggaatccaacgttcctttattttctgcctgttctccttttttctctgcatcctctgtcttcttttcctgatccttcagttttccgagaagagtctgtaccccctggcttcccagagtttcacgcatatactgaacagcctgctggtaaaaaatctcgccttttccgtcgctcagaagctgataaccattgaatccgccctggagaagctccagtttctgactgttctgtttcaatacaggtttcatataagtctgaaaatcatcatatacagaagccatatccagttcttcttttccacctgcatacagtgcaaacagctcataatcttccaaaagcgttcggtcatactgtccaaataaggaatataagccaatatccatactgttaagtatctgtgtcctggcagctgccatgcgtacagattcaatgctggcacacacaagagaaagaaccaggctcaagatcagagccagaaagatcgtaatgctgccttttttcacatttcctgccaaggggtacctctcctttccaaaacggaaatatcagcagatatcaccgttttttctcattttcagatcgtgttgctttgttttgtgatttttgtaaggatttttttcacaagtgctgtaagctgttccttaaagatgatgaccagactgatcagaaccaccagaatcaggatgatctccacaacacccaccgcatcctcttccatcgcaaattcttttacatacttccacatattttcatttgtcacctcacatttcctttctctgttctccagtcctaccctccgtaaaaggaaaggcatgccggcagcatgatcaccgccatcaccaccaggagcatcaagaccatcggaagaagcagttttgttgctgctgtatctcccagcactcttgcttttctttttcgctcctcccaggcttccacggattccttttccagcagatcggccagatacctgcttcctttctggaggttctggatcagtagtgttgacagagttttatactttacctgtccgcaccgttctccaaatctccggtaagcctctgcttcggaaatcccactgtccatctcataacaggctactcggatttcttcgtaagcctcacgttttttaccatcttctctctttccgtaatccagtgctattttctggaacgcttttctggcagttaagcctgcctgcaccagaagggtaaatttcatgatcagtcctggataatccatcagcatctgttctcttctttttatctgagcattctgttcttcccgtttttttgcaatgacagctgctgccgctgctgccagaccaagagctgaaagcaggtttcctgttttgtcttttggctgctcccattcaagatgttttccattccattcatctggaagataatagtactgcggatcgttttttttctgattatattgtacgatcatgtcctgcagctctttctcgcgctgctgttcttcgctaagttctgtttccggttcttcttcggatccttctgtttctttttccggcacctgcacatacagggaaccggcttcttctccgtctacagatactttgaatttctcttcataagcacctgtctcctctttttccatacggtatccggatgaataaaccttatctccgccactttgaaatgtcaggagcataccgatgatatttccggcaagcgctatccgtataaacagtttcttttcttccggatttccggcttccggaggcagccgccccatttttcctgccagaaacaccccaaggatcaccataaatatcaaaatatgtatccacattatcctcacctacacttctatgtctacaatcttcacacccagccagtaagacaagccatagatcaccatgcaaactgtcatggcacagattccgaaaggattcccataaagtacatccaaaaatcccggcgaagtcagtttcagatagcagatgataccggccggcatgatactcataaccatctgttccgatttctttgcggccagcgttgcctcgatctctttttttacctcgatcttatcactaagcattctggctactttctggatcacctgcgtcatatccccgcctgttctttttgctgtataaaatactgctgcgaaattttcaatatcttccactccgctgcgttttcccagatccaggaacagctcttccaccggaacactcagacgcaactggctttcgatataccgaaattcatccaggatatcacttcccttttcataaagtctccccagatcctttacactggcacgcaccgcattctccgcggaataaccggcctgtaccgccacattcatggccgtcagagcatcccggaactggtaattcagctccctctgctgccgtgcagtgcattttttcctctgcattttcagaaaaagcactggtattggaagcataaacagcaacacaggaaggctctgataaaacagatagtcggctgcagcgcatacggcagctccctccagaagatactttgcggtctccttccccgtaaaatgatacatcctgtaatctttcctcgtagatctccatttctgattctttcctttccgctctttcatagtctgattcctgcccgtttcattttttcacaatgcaaaagttctccggtttttacaagtccctttccttcttcccagcgatacagcggcctggtctggatctctccgttttcaaatccacatacttctgtgatttccagcagctttctgcttttatcccgcatacgcccgagatgtaccagaatgtctaccccggaagcgatctgccttcggatcgcttccaggggaagatcgatccccatcaatgtcatcgtttcaattcgggaaagcatatcctgactgctgtttgcatgaagtgttgaaaggcttccatcatgtcccgtattcaggctctgcagcatatccactgcctctcctccacggacttcccctacaattatcctatccggtctcattcgaagggctgaccggatcagatctcggatcgttactgacaccgcgcccgccatattggccatttttgcctccagacataccaggttatcaattccccggatcttaagctccgcattatcttcaatggtgatcaggcgctcatcttttggaatatattctgtaacagctccaaggaatgttgtttttccactgcctgtacctccaccgatcacaatagaatatcttgcctgaacaagtttttttaaaaactgtgcacattcttcggtgatgcttccaaaagcgatcagtttttccattgtgataggatcatccggaaaacgacggatcgtcaggatcggaccattcagagcaaccggataaaccactgcattcacacgtgctccgttttccagccttgcatctacaatgggcatggactcgttgacaacccggttacagcgccctacgatctgctggatcacatcctccagcttctcttctgacgtgaagaccttattccatctggtcagttttcctccacgttccacaaaaatatgatccggaccatttaccatgatctccgtaacactttcatcatcaatcagttcctgcagaacatccagcttgcgcacagaacagaacagctcctgtctgagctctactttctccttcagtgaaagaaacagttcccttgcctgagttaatatcagttcatcgatcacccccaggatctcatcatcggacagctctctggaaacatccagctgttccatgagcagatcatacatttcccggaatttttctctgttcatgaccgctcctttctcaaaagttcacggatataatctcccagttcactccagaccagctgttctacgtaagcgtcagaagagatcctatccatatgaaagggcagatgcaccttttctgttttttccaggatcttttctttattccagatacgcaaaagattttcgaattgtgtcaccttacagacagaaagtgtgtcattcaaaaccggcatatagatttttctgcacatttccagaagccggaaatcctcatctccattttctcccatatccaggatcagcacttcataggaactgtgaagtacgatctcctgcaacagccgctcccagtcttcccagtccacggtccggatatctgaaggtgttcttacaggcggtataaaatccagattgtttactgtctggatcattccgttcattctatggatcaggttttcatttccctggcgaacataataaaacagatcactcagattagccggaaattttttcccaagaagttcctcaaaaccagaataggattccagattcagataaagaacggcacgttctttcgccagtatctgtcccagcgcaagtgcaaaggatgtcttcagacatctgccaagaggagaaaaaacaccgatgatctccattgtctttttcaacacaggaaaagttaccggatcaagagacttctcttctccatagcaggccatcacctcccttatcacatctgaggaagattgatatttatacacacttgaatactgatccagttccggaggatgcacaccctctgaaagaatgatgatctttccgataccaaggtcacggacttcttttcgcattgctttatcggaaatcagcagcaactcaatatgattttcttttccgtaggcaatgagactttccgccgtggtaaatgcctggatctcaaacggaagattctttttctggttcagataatccataaaattgaaagcataatccacctccagatcacagactgcaaatatgtttttcttcaatacacacctcctgcataaagcaccgcactcaaaaatatgggtaccgtaaaatgaaagttctccggaaagctcatcccctttctgtaataaggacgtatctcaccggtacagtagaactcattcatatactgatataaataaaggaatcgtcggcggataccgcctgtagaaataagaattgccagagaaatgcctgcacctgcaagcagagaataaacaatacattccataactgtccgcggtcccatgatcccgccaagtgcgcacagaagcttgatatctccggcgccgatcatatggaatatgaaaaggattcccaaaagaagcaccggcacagccactcccgccagaaagatcactccacctttcggcccgttttctgtgacctggatcaggaaaccaatcataaaagaaaaaaggatccatccattgtctacagatgcatctttaagatccatccagaccgccatcgcagatatcaccacggataattctccataaagaaacatacacgccccctttccttcttaaaatatatgtttattcagttatgataaaaatgggatttcccgcctgacctggcggtgatcgataccagaagatctctggtgaaattaattataaaatttcaggagcattttgtccagcattttcgttcgacaaattctgacacgaattttgctgtcatctgctcctgaaactctttttatcttttaatttttttcgctttatcttctatgatcttatcggatctttactccgtccttgatcactgccttcagttccagatcctgatccagcagtaccacatgagcttttttacctgcttccaaagatccgtactgttcttctaccccaaggcttctggccggatttatggtcgcgcaggccacggctgtttccagcggaagatccatctttttaacaactgtacgcatacaatccatcagatttgtggcagatcctgcgatcgcaccatcagataccagcgtggcaagtcttcccacaaccttaacatccagtccgcccagtgtatactgaccgtccggcataccggtagctctcatactgtcgctgatcaggatcatcctgtcagctcccatcatctgaaaggtagctcgaacaacagacggatggatatggatcccgtcacagatgatctctgccataacatccttactatcaaaaacagcacctacgacgcctggtgcacgatgcgtaaacgcaggcattgcgttatacagatggactgcatggtttgctcctgctctgcatgcttccattgctgtatcgtaatctgcattggtatgtgccagagaaacattgaccctttcatgaacttcccggataaattctgctgcatgctcactttcttcaggtgcaatccctataaattttaccagaccttccgaggcctttaaaaaacggtcacagatttccacattgcatggcaggatatttctcgcgtcctgtgcaccttttttcgccgggctgataaaaggcccttccatattgatccccagaaaatctgccttacggcagtcctttgtttcttttttatattctgcagctgtatggaggatctgctccagttcctctaccggtaaagtcatggtagctggtgcgatcgctgtaactcctaccgatgcctcatattccgcgatccttccgatcgcagccttgtctccgtcgcagaaatcatctcccttgcatccatgaaaatgcagatcgatcagtcccggaatggcgtagcagccttttccgtccagaacatccccgttaagctgcggcgcatccttttcttcataaacctgtcggatcttatccccatccaggataatcccgccttttacaaatgctttgtccggtgtaaaaacatacacattatcaatgatcatagtaaaacctcccaaaatccccatttgtgatcataaacaaaaaagcaaccagaaacatgttctgattgctttcagttaatagccagtacgggaatcgaacccgtgtttccgccgtgagagggcggcgtcttagccccttgaccaactggccatattcttttgtttctgtcgtttgatttcgttttttgttgtttccctcaaccgacttcgttagtatataacactttctttcaaaatgcaagtactttttttaatttttttaaaaaattttcatgtttttcacgtttattcgttttttacccattttccggtatttcgtacgcttgaccactgctggtgtaagtgctactatcaaagcaccaatacgaaaataatcgactgcggataatgatccgcccggtataacagaaagaaggaattggatgactcgcattttgtgtctcggagacagtatcacagattgcggacggcttttctccgcagatcctcttggaaaaggatatgtgaagcagctctcctgtctgcttcataacacagatcaccgattttccattgaaaacagaggtattgatggtttcaccctggaacggcttcttcagaacacagatttctggctggaaagctctgatccggatattgttaccgtcctgatcgggatcaatgatgtggggatcatgatgaacacccgccgttcatctgcacaacagcaggatctgatgaacaaatttgtcacccgttatgagctccttgcaaaaaagctatcctgcacaaactcccggaaacgaaagctctatttcctggaaccctttgtttttccatggccacgctgctacgcttcctgggctccccttctttcacagatgtccgtgcatattaaaaagatcagtcaggatcatggcgccgtttttgtcccgctgcagaacgatctggatcaggaagctgcacggtccgggcctgcatcaataacttctgacggtatccatctcacactacaggggcatcagatcctggcagataaactttataaattgatcatatcagaaaggtaatactatggaaacaacgatcaaaaaaatcgaagatatgtcactgaacgcatggccttctcataaaatggaactttatgacggatggatcttacgtttttcttatttctatacgcacaggaccaacagtgtggaacagttcggaacctccacacttccatggcgcgaaaaaatcccctactgcgaacaggtctataagcgtctgggaactcctgcgatctttaagatcagcccccttgtatccccggattttgactatatgctggaaaacaggggctattccgttcagcacataacaaatgttatgactgtagacctggacagtgccgttctggatgcgcctgtcaccgatgtgcttttttccaatgaaattccggatttctggatccacagcctttttgatctgaaaagaactacaaacccgatccatcgaagcgtcgttccttccatgtaccgtgccattcttaaggaaactgtctgcgcttccataacaaaaaacggcgagatcattgccacaggtcttggaatcctggatcgcgactacatcggtatctatgccattcatgtgcgtgaagattatcgccgcagaggatatgcccgtcagatctgtaccggtcttctcaatgagggcaaaaaaagaggcgccagccacgcttatcttcaggtggtaaaaaacaatacttccgcagaaaagctttacagctctcttggatttcagtattcctatacctactggttccgtgttcagcctgtaggaacacgttttcagtaaatgcatggattttccgtaaatccctgtagaaatcaaaaaatctttttgctataatacccttaatatgtataaaatctttcctgccttcatatactgatccttatcaatcaataaggagactgatccgatgaacgatccgcaggaaaaaaacacccaaaatccctatcatatttattacgataattatctggataccaatgcctgtactgaatgcacgggtctgatcaatcatggaatcgacagccgtgagcaatgggattctttccgccagatctttgactttataccggcgttggaaaaccatgatcttacagataaacaggactgaccgttatcccgggtcggaggacacaaatgaaaaaactgtctgctgcatgtatgattctcggcctttccctttttgcgggaggctgcagcaatgatcagatcgatgatcatattatttctcttcaggataaaatttcagacgttactgcttcagattccacagaacaggaagatcaggagccttccacggaagaacgtgtttatatggatgagcttaccggcacactgctggattttgacggtacacacctgacgatttccagcaatggagaaacctatgtatttgatgtttcccagacaaggcttgaatgcaaatacggcgttgtatccagtgatcaggtcagtgtgatctaccagggacagctttccggaacggatatcagcaccatttcccccatcaaaataaccgacaaatatcataatgaaactcctctggaggaccgcactttaaagggcaaagtgaaatcactcacctccaatgcccttgtgatagttacagaaaagggaaataccgtaaccttccctgtcaccggtgtcagacaatactacaaaaaaggcatcaaggccggcaagtgggtctatgtccattttcgcggtaaattcatcaacgaaacactcgtgggtgacaagcagtatgacggcagtttcacaaaagtgatcagtgtctccgatacggatccactgaaagtacctgcagcaactcctactccttctcccgaaccgaagaaaaaagagcagcatctccgtgcaaagatcgtaagtgtcagcaccagcacaatgactgtcatcccacaggccacaggctcggaactgactgtttcactttcctccgttcctgtatatttcaaaggaggcatggctcctggatcttatgtaaacattatctataccggtaaatttaatggtgaatccatcagcggcatgaagatccggggaatcaccggggaggatccggacatactttccgtacgcaacattacttctactgtaaccggcacgatcctgggcacaaccgccaataccgtgctgctccagacatacgacggcgtaaagatcctctgcagccgtgaaaacgttccggacctttcctcaagcggaatggaagaaagtgccgatctccgggttactttcaaccctgcgaaatcacgcacctccaatatttatacctgtattaaattcgaagacccgtgacggaagatggtacggatccttttttctccatcttccatccagcttcgtactgcctgcgtatcacccagtatatcaaaaaaagctctgctttcatcctgtacaccctggccgtgaagaacctgatatgcaccggcatcgcttcctactgccacatgaaccttcttttcaaaagctttcttcagattctgctcgcctgcctttataatagatgcaaggatcgtatcttcaaatctgccgcagcctttaagattccgcacagttacaagtgtcggaacccacacgctttcgctgtctgccagcatggaaatcgtctcatcatccatatagttcccatgctcaatactgtcaacaccagcctccactgctgcctgtacgccatagcatccatttgtatggctcatcaccgcaaatccctcttcatgagcaatatgtaccatttctttcacatccgttgctgaaagcggcgttcccgtaattttcccgtgatctgcaaaatccagaagccctgtagtcatgatcttgataaaatccgcaccttcagcggcagcttccagaactcttctgtgatattccttcatgtctgaaaagctttttccaacgattttcccgtaatgaccctctttataaatggcaaaaaccggtgtgcgatagtcaatttcatattccagggccagtctggcagcccgttttgacacaccgtaatgatctcctccgtctctcacaaaacggattcctcttttccggtattcctcaagatgagcacggatcagtgcatcccggggcccgtttttctgtgtctcaacggctttccggtaatcatagccattgagaaatatatgtgcatgacattccccaaacattttcatcactgctcaaaaaagtttcggatctctttctcagatgcctgcaccgacccctgtacaaagaacggctttccgcctccgcgtccgtttaatttcgcattcatctcttttgtaaactgacggagatcgccgtctttttcgcccattgcatacttgtagcttccgtctgcatttccggaaaataccgcacagcagccctggcaggtctgcgtcaccgcatctgcaagcttccgcacactgtctgcatccattccatccataaagatgagaacgcttccgcttcctgcataacgctctgcctctttccggcacatgtcgtctaccagctgcccaacctgtcctttcagtcggaaattctcttcctgaaggcgttccactgcctgcgcagtcttatccatttttgcggaaagctttacagaaatctggtggttctggtcattgaccatgttcagataatccagcacacgttttccgcagatcatctcaatacggacaccttcacgaaatttttccacggaaagaagtttcaccattccgatctctccggtatgtgtcacatgagttccgcagcatgcacagatatccacccctggaaattctacgatccgcacctgaccagtaagctcttttttgcttcggtagtcgattttttccagttcctccgctgtaggatatatgatctttatctgcgtatcttcccatatcttttggtttgttttccgctcgatctcagcaagctgcgtctcatccaacgggccattcagatctatggtaatggtatcgcttcccatatgaaagcctacattatcgtatccgtaagcctcgtggatcagtccgctcaccatatgctcaccggaatgctgctgcatcagatcaaatcttcttgcccaatcgatgcgtccctgtacttctgttccggcttccatcggctgatctgtataatgaagaagttctccctccttttcatgcacttcctttactttcacatcgttgagatatccggtatcgcttggctgtccgccgccctccgggtaaaaagcgctctcatccagaatgatatgaaaaccttttttggcttctctgcactccaggactttggctgtaaattcttttttatatacatcttcataatataagcgtttcgtctctgtcatttgtctcatcctttctgcatctctgctttgacgacttatagtatagaccaaattttctctccccgctatataaaaacggcatttatccaatgatttacatatttttccataaaagctgaagtctttccttcaggttccgcgttataataaatgaaacgggaagagaagggagctgattgcatcacacaggaagaatatctggaatatctgatacatacataccaaaatttaatattttccatttgtctgaaatcggtgggcaatccctttgacgccgaggatctgacacaggatgtttttctttccgcctacaaaaatctctcccgttttgatggcacctacgaaaaagcctggctcagcaagattgcagtcagaaaatgtctggatcatctgaaagcagccggcagacgtaccattcccacagaggacacctattttgaacagctccatgataaagagttttccccggaggaggcatttctggacaaagatttcaaggatcggatccgacatttatgttcagcgctaaagagcccctacagggaggttgccattgagcatttctgcgaagaaaaaaccgccgcagaaattgcaaaggcgcagaataaaaatatcaaaacagtccagacgcagatctaccggtccagatctatgctgaaggcactgctggaaaggagtgattagatgcacataccacaggatgaattccagaaattccaggacggaaccatgaatacggatgaaatgatccgttttctggagcatatggatcaatgtgatttctgtctggatgaacttcttcagaatgaggatgccgcttctgagtatgctccatcctatctgcaggatgaaattctgaaaaaagcagcttctccggaagttcaggcttccagaaaaatacatgaaactgcttattggatgaagcttctctgtgcaggcttacggactgccgtaggcatgggtgttgcgctgatcatgcttttttctgtatctcagacagattttacggctcttcatccttcaccggaaacaaaagttaagatttcttcatcccttgacattggttccggcctgaaccagctttccagagaggtaggttcccagctcagtgaacattctcagaagattagtaataatctgaatgatcttacgaataaaattataaacggaggcaagtaaatttatgaaaaaacaaaaacatggtttctgggtatttatcttttccctgatccccggtgccggggaaatgtacatgggatttaaaaaacagggactcagcattatgctgctgttctggggatcgatcgcactggcatccataaccggccttggatggctggccatgtttctcccggtgatatggttctatagtttttttaatgtccataatctgaaatccctatcagaagaagaattctactctgtagaggataattacattcttcacatggatcagctttccggtgatatgggaaaattcttacaaaagcatcagagtgcagctgcatgggtcctgatcctgcttggtatctgcatcctgtggagtcgtttcacaagtcttttgtacctcattgtaccgactaatatggccgactatgtatacaatatctgcaacagccttccgcagatcgtcattgctgcaggtatcattgctgcaggtatttatcttcttactcagcagaaaaagaaactgaaacaggaaaccgaaacaaaagatgaacattactgggaaccctatcgtccatatcagcagctgacagaaaagcctgttcatacttctgataactcagacaaagatacagcttctgaagcttcttccattactgatccggaaaataccgaatctgatcctgcttcatctacaaaataacagagaaaaaaaagatccactgtcagtttcctgacaatggatctttttatatgctttaaatttactgcttatgtgttaccttaagacgtgtcatcgctctcgcaagtgccatctggttcatatgatactcctggatgctctgtttctgacgaagctgctcttctgcacgttcctttgcttcctgagcacggcggatatcaatctcgtccggactctctacgctgaggcagaacagcttggcacggttattgatcatctcaacaaatccgctgctcacagcaaacacatactcattaccgtcagcatcctcaaaacgcatctcaccgggaatgatggcagctacaacattcgcatgatgggcaagaaatccctgctcaccatccactgccgggataataagcttctgagcacgtcctgcataagccagtttattgctggcatatatttccaggccaaatgtctcactcatagctgctccttactgccggttctcctcggcttttgcttttgcaattacatcatcaatggttccaacattaaagaatgcgttctccggataatcatccatctcgccgtcaatgatcgccttaaatccgcggatcgtctctttcagaggtacatatttacctttgataccggtgaagttctcagctacatggaacggctgggaaaggaacttctggatctttcttgcacggaatactgtctgcttatcttcctctgagagctcctccataccaagaatagcaatgatgtcctgaagttctttatatttctgaaggatctcctgtactctacgtgcaacctcgtaatgttcctcaccaacaatatctgcctccaggatacgggaagtagactcaagcggatctacggccggataaataccctgctcaacgatcttacgggaaagaacggttgttgcatccagatgggcaaatgttgttgccggagccgggtcagttaagtcatcggccggtacatatactgcctgtacagatgtaacagaaccttccttggtagatgcgatcctctcctgaagctcacccatctcagttgccagtgtaggctgatatcctactgcggacggcatacgtccaagcagagcggaaacctcagatcctgcctgtacaaaacggaagatattatcaatgaaaagaagtacatctctgtgctcctgatcacggaaatactctgccatggtaagtcctgtctcagcaacacgcatacgtgctccaggcggctcgttcatctgtccgaacactaaggctgtcttttcaagaacaccggattccttcatctctgtccaaaggtcattaccctcacgggaacgctcaccgacaccggtgaaaatagaatatccaccatgctcggtagcgatattctggatcagctcctggataaggactgtcttaccaacaccggcaccaccgaacagaccgatcttaccaccttttgcatatggagcaagaagatcgataaccttgatacctgtttccaggatctcaactgccggtttctgctcctcaaatgaaggcggatcacgatggatgacccaatgctcttcaccgtccagggaatcaccgccatctacggtatctccaagaacgttgaacagacgaccaagtgttttatctccaaccggaaccttgataccgcttccggtagctgttacttctctgtctcgctgcaggccctcgctggctcccagcatgatgcagcgtacgatattatttccaaggtgctgggacacctccataacgcatctcttaccgttgttctcgacttcaagggcatccttgatatccggaagctgtccgtcttcaaaaacaacgtctacaacaggtcccataacctgtacgatcttacctttattcatagtcatcacttccttttttgtgctttagcaccgctgataacctcagtgatctcctgggtgatcgcagcctgacgtgcacgattatactgaatggaaagatccttcagcatcgccttcgcactatctgtagaggactgcattgctgtcattctcgcactgttctcactggcatatgcctctacaagacatccatagatcacacctgtaaggtagttggggatcatagtatccagaagcacatctgcagacggagataacacgatctcctcctgataaatatctgccgggatctgacccaccttaaaatcagcctttttcagcggtaaaagctgcatattcacattttccattgccatcgcattcagcatctgtgtatagacaatgtgaatttcatccagctctctttcaagaaatgcccgtacgatctcttccgtgataaggcgtgctctgtgcatagtcggcttctgcacggtataatgaaaactgccgtccatatccacatctctcttgccgaaatactgacgccctaccataccaaggacatacagcttgtgatgtcccggtacctcttccatgaaatcttctgtcattttctgtacattatgattgtatgcaccagccatacctttatcacctgtaatgacaatggtacctacctttctttcatccttcggaacaagatgacgctcactgaagaaaggatgctggatgtccggcatatgacggaggatcctggcaatggcagcctgcatattatagaaatatggttccgtatcctgcaggatcttcttggccttctgcatcttggaagaagaaatcatgtacatcgcattggtgatcttcatggtgtcctgaatgcttttcatacgagtctgtatttcttttgcatttgccatatcaacacctacctgctcttatctctgaattcttctgccgcctttacgattttctctacaagctcatcagagagctgctttgtagtctcgatctctttgccgatctcaggatatacattatcaaagtactccagaagatccttctgatatttcttgatctctttcttttctacatctaccatcagcttgtgagtcgcaacgcagagagtaattacctgctgatgaagacttaacgggctgcagagcggctgtttcagaagctccatcagacagcttccgtatttcagctgtgcagttgtagcctcatccagatctgaactgaactgggtgaacacttccatctctctgtactgtgccaggtcgatacgtacactaccggaagctttcttcatagccttggtctgtgcagcaccaccaacacgggatacggaaagaccaacattgactgccggacgcatacctgagaagaacagatcactttccaggaatatctgaccatctgtgatggaaattacgtttgtaggaatgtatgcagatacatcaccggcctgtgtctcgatgatcggaagtgccgtaatggatccgccgcctgcctcttcactcagacggctggaacgctccagaagtctggaatgaagatagaatacgtcaccaggatatgcctcacgtcccggagaacgctcaagcagaagtgacaatgcacgatatgccactgcatgcttggaaagatcatcatatacgatcagtacgtctttaccctgatacatgaaatactctgcaagagcagtaccagcataaggagcaatatactgaagtggtgcacagtcgctggctgttgcggagaatacggttgtatactccattgcaccgtatttttcaagattggaaactacctttgcaacggtagaagctttctgtccgatggcaacatagatacagatcacatccttacctttctggttgatgatcgtatcggttgcgatggatgttttacctgtctgtctgtcgccgatgatcagctctcgctgtccacggccaatcgggaacatggaatcaatggaaaggattcctgtttccagaggtacagttacagacttacggtcgatgattccaggagccgggttctcgatcgggcgatattcctctgcctggatctctccctttccatcaataggctcaccaagtgcgttcacgattcttccgataaatttatcccctaccggaatacctgcctgcttgccagttctggcaaccttggtgccttccttgattcctgtatcctttccgaaaagaatacatcccatgctgttggcacggacatcctgtaccatacctttcagaccattctcgaaggtcacgacctcaccgtacatggcatgatcgatgccataaacagttgcgataccatctcccacggagatgacagtgcctacttcctggtccttgctgatttcgtcatagttctttatttcttccttgagaatcgaaatgatttcatctggatttattgcacccaattcaatttcacctccgggttaatttctgtttcagtttcttataacgtccgatgaggctccagtcgtactcacgatctcctgccctgagaacaaatccacctacaaggcttttatcctctgtaagggtaagttccacttctctggcagaaaactggctacggagaaactccttcatcttattttcctgctcttcggcaggacgtgttacataaagaagctctgccttgagaattcctttctgttcccggctgtaagcatcataagcttcaaggatctctccgattctgtcaatcttctgatacttacacgttactttaagaaaactcttcatttcctgcggaaaaacccgctctattacctgttctttttctttgagggaaacaagtggattttcaagcatcttacctatctcaggtgtattcttaaaaatccttcctgtttcgcagattgcctcccccgggacagaaagaccgtataatgcttttgcataattaatggacgtctctgtcatgaggatcacctgctccttctaaaaactggtcatatagggacatatcctgtgcttcgtcgttcttttttcccatgattctggatgctgcatccattgccagctcagccactttgccttccatcgctttcatagcagcttcctgctcagtactgatatctcttcttgctttctcaagaatctgaccagcctgatcattagctctcttcacgatgctgtctgcctgtacttttgcctcgtccttagcctgctctacaatactgaaggattcctccttcgcagatttcagtgcatcctcatactgtcctttcagctggtttgcttcagtggttgtcttctctgctgaagcaaactgctcatcgatcatggcttttctcttctccataacaccaatgatcgggccgaaaaggaacttcttcattaaaagataaagaacgatcaggtttataatagtaaagacaaggttgatatcaattttaatcacctggtccacctgcctctcttaatcctgaattagtatctcgtctttacctattagccaagcatgatgatgatcagaagaccgattacgaaaccgtaaatagctgttgcctctgcaagagcacatccaagaagaagtgctttactgatcttgctctctgcctccggctgtcttgcgatagcttctactgctttagatgttgcaagaccgataccaatacctgctccaatacctgtaagaactgcgatagctgcaccaattgcgattaacatagttttttcctcctgtaaaatacaattttttcatttttaaatcaagcggagcttccgcttcactactcaattgcttccttgatgaacaaggatgttaagaatacaaatacatacgcctgtatgaatccatcgaagaaatcaaaatacaggctgaatggtatgggaagaatggccggacaaacaaactccagcaacttcataactacgaagcttcccagaacattaccgaacaaccgcatgcagagagatgtaggtctgatcgctatttccagaatgttgatcggaagcatgatcggaaccggctccgcaaagcttttcaggaaacccttcagtcccctcttatgaaagcctgcatactcgatcagaataatgctcatcagcgccagcgcaatggtaacattcatgtccttcgttggtggtgtaaaaccaaatacgcctgcgatattggctattccgatgtagattacggttgacatcaaataaggcacatactgtttgccttcttctccaaggatacccatgaagaaatcctgaagaaaacttaccccggtctccagaagcagctgcttcttacccggattttccacactgagattccgaactaagatcagagacagaatcacaagaaccgccatgatgacccatgtgactaccacgcattctgcaattggtattccaccaaacaccggaatggtaaaggctgtcttgctgtttagctcttctgccagtgtacttgataaatctcccgtttttctccctccttttctcttggcgctgatcgcatctttttgtaattggtatgaccacgccttgtagttgactttattttactccgcatttccagaatgtcaatattatttttgcctgttttgtacaaaaaagaatctgttttttatacaaaatacacaatttatttcaattgaccttaatccgactttctgcgtacagatacctctccataagaaagcagggtttctgaaccatcctgttctcttacaagaagccttccatctggtgctatggattctgcataagcttccctcgtacactgtccgtctgtgatcacgatcatgtttccaggaatgatattattttctgtatattctctggaaagtcccggagtctccacttccatgagaagctgattgacgatctccgccacaagaatactgcagtttatatgctctgcgtcattcctgttttcaaataatgctccagccgtttcctgtatatcttcaggaaacccatcttccggcatatacagattcaaaccaattcctacaactgcaaactcaatgttcccgctttcaaagtctgtaacagcctctgtcagtatcccacacactttcttattatgaagatacagatcattgacccatttgatcccaaggtcgatcccgcagattttcttcactgcacggcacactgcagttgccgccgctgtagtgatcaggagtccttccttcagagttcggtcaggtcttagaacgatactcatataaagtcctgcattttcaggagaataaaaacttcggcctcttcggcctcttccgcttttctgtctgcgcgccagtatcagtgcaccatgacctgcttctcctgaaaatgcagcctccttggctgcccggtttgtagaatccagttctctgtatatttttacagggacatccggatgatcgaggtaaagccgtattccttcttccgataaacggctgcctcctcgaagcacatagcctttgtttggtccagcttctatggtatatccctcttcacgaagggatttcacagctttccagatggctgcccgtgtgcagtttagttctgctgctgccgcctctccggatatcagttcattctcgtgctgctccagaagcttcagcattcttgcttttacagtcatatcttcaccgtccgtaatctgcctgaaatggcaaaatttattccctcctaagagtcgaaagcattatagcacttaagcatcgcgatgtctattatcttttttatatatgctatctatattatttttatatttcagatgcagctattatatgatttttctcatttttgtctgttttcatttatttttttatatattatttctgttgaaaacctgcagactcaggagtgaattttcctgaatctttattatatacagattttctttatcatatatttatcatttgtaattagaaagacttttctcaagaaattcccggtacttatcgcgaacctcatccggtgacgcgatcaccgcatccgggccaagactggctatccagccaaagaactggtcactgatatttacacgaaccagtgttttgaaatgttcaggatccttcctgtgtatcataatatctctgccaaaccgatccagcaccaccccgaccaagcggttatgtgcttccagacatatggttacttctctgccgccaaacatcccgaaggtcctggatgtcagctcccctatatcataattctcaaaaaattctctgccgcatcgcacctccttctctatacggatctgctggagcttatctacctgatactgcttaacccttccacacttctcgtcgtaagtgatcagataatactcctcattctgccatacaagtccccagggactgaccgaatatcgttccccctcattctccggatacagcttcttctccacagtccattcacaatactgaaaagaaatctgcctgtcctcagttaatgcacgctggatcatatcaatactgtaatacacattctcgtttatagtccggatactgttctctgcaaagccctgtcgccgcagctgtctggactcataaacactggcaaggctctccagcttcctgatcagctgtcgggatttcccattggtgatacatctggaggactgtactgcatccaccagaagtctcagctccggaagctcaaattcccgactggcaagataaaaaccggccgggtgctcccgccggttcaggatatccattccaaaattccgcagggtttcaatatcatcatagacagtcttacgctctgcactgattcccagactattcagataggagatcagctccttcacagacatcggatgctcttcgtccgtctgctccagaaaaatgcgcatcagatataaaattttaatcttctggttaaagacccttggcatcctctctccctccgttctattacttgtctgtcagtgatgccaccactgcaaaatataataccatgaatgacaatacaacggcaacgatatctgctccacggaaatcaaaattaaacagcattgccccgccaagcatgatctccattgtaagaagtgcgcccagtaccattgccattcctgaggaaagcttctgtctgccgcaatgtccgttctcagcatccacatatcttccttctgccaatactgccttcctgctgctctctgtattccacataagatccatcctccctgtcctatgttcgtctcacgttttatcgaacatattttccaaacatattttctgtatgtttgcattatagctcatttttagtccaataaaacggtataaatatggtttttccgaacatttgtttattttatacaaaaatatgttcgtctttaagatccgcaaaaaagaatgctgcctgccggtcactccgacaaacagcattctttttttatatccgcaaccgctatttatttcagcacaccactgtcagccagtccccacttacaggttagaatataattctcataggtaagtgaagaatcaaaccgggcaaatttcgcattcaggacatacggatctgccatggtttttgccacatagcgacctgtttttttcaggcagctcagatacatcttcatcatcagtttataatcgtcctccagctgtatattctctgtcccggcattctttgccgcgatcagctgcgctctcagtctgtctacctgcagccgcagcaccatcgcattatttaaagaaaaccatgccttattataatcctccagggtcgggcagtccatcataaatgccacagctttgcagatcttatctgccactcccacaactttcgcaagattgacactgttttcccacatcggggcaagtgccttcttatcaaagagccagatcgcattcttttcaacctgatctgccaggaaatccttcataagtatggacatcggctggttcatatactgtttcagctgcacaacaccattatacaggccgctgtctgacggaagctgactgatcacacgatctacgagcttctgtcccactgcctggacagtcagaaatgtcatcaggaagtccactgcatcgattgcaatatccgcaccgtcaaaaacagactgcacatgatcccatctctgcactgtatccggttttgtctgtcccggtttcagcggaagctccttatatccattcatgtactgcagcatcttcagggcttcttcctctgttatccatccggttccgccaagctcctgggcagcttttttcatggtatctccgtctttaaatatcttatcaccgccggatttaaactttttcagcactttatatgctctctgaagcccatcctggattcctccgcttaggtcctcatctatggaatactcggcagtatccacaaccagttccagtgccaggcttctgttcaccttctcttctgtaaatttcgggtcttccagaactgctttgatcagtgctgaatgcccctgctgcatcaaggatttcagggcagcccaccattcatcgctgaaggtcccgcttgtatgtccgctcataatggaaaaacagtcattctgcagatcattcaggatcttgctgtatccctcgtttttcagatactccggatactgtcgcaaaagcatctcggttgtgatatccgtaacctcataggctgtattgccgccgcccgcattacagatgatctgtgcgcctgtaattttctcatttcctacggcaaatttaataccattccatctcacttttgctcctgagaaataaactttcttcaggctgttgcagtttttaaatgcgttgctctccacagaacttaagaatgtaaagatcatgatctcactgatctttgtacagccttcaaacgcattcttacggatcgtttccagtgatctcggaagataaatctctccggaaagtccgctgcagcctttcataagttccgcctcgatcactttaagtccgtcaggaaacgcaattgtcttaagggcactgcagccgtaaaaagctcctgcaccaatggatgtgatacctgtaccaagacgtacttcctgcagggatttgcagtttttgaaggcattctttccgatagatttcatatatttgtccgaaatggaaaccttcttcactttcgtgcctgcaaaagcagagttcccgatggcttttacattgaactttctggaatccagcgtgatcgtatccggaacctttactgttgtcgctgttccgatatatttcaaaagtgtgatcttgccatcactttccactttgtaattccagtttgcagatgcggaattcgccattccttttatggaaatataaaactttttggaagcagccggataaatcttatccgcacttgttttcgtggaaacattcagggtaaatataccgtttccgctggcagtaagacgcatgttcttgtccagccatgcggaagtccttgcgctgttttccacagaacaggaataagccgcattaccttttacagaaatctgcagtgcctgactgaaaatctccttacttaatacatatacaccttttgtcttatcatatttcaaaaagctctgctgcttcagctggatgctctgtgcgccctgctgtattacatttacttttttaactgctgctttatagtgcttcgtctcatcggccttgatcgtgatcacagcagctcccaccccagccagtttcagtttgtttttatccttattcacaacctgcacagccttggaattgctgtaaaagtgaagctttgtgccatcactgttctttacggctgcattcagtgtcacggtttttcctttctgggaaggtttgcagatcattccgccggcactgatggtctgtgtggcttttgtaatcgtaaattttacggtcttctttgtttttccaaaaagaccttttcccttgaccgtgagcactgcggttccaggctctttattttttgtacaggaaaccgtataatgggtgccttttttcagggttgttccctggaatttcacagttactgccggtgtctgtgtctttccattccatgtaaaactggttctggacagagtcaccgttgctttgccaatatctgccttcgtccagtgtgcataaagcgtctggttctttgtcagtttaaacaccttagacgcagttaccttactgccgccggatgccttggtgtaccagccaaggaaataatatcctctgcgtgttggagttggcagtgtaccgtatttgctgttggtctttacctgttttgaggtggttttcagagttgcgttctttgcatttttgttaaacgtgatcttgtggctctgattctggctctgatcctgatagtttgtggttccgtagtggaaacgaatgcagtgattagcgtgataggatatgttctctggatcggaaccactgcagtcataatagccaaatgctactgtatcctctgaaagcttctcccactgtgccttggtgccttcataataaaaatccactttatctacagttccaggataataaacgccgttgaaactgccaccatgtacagcatccgtgcccaactctccaaatgcatattcgcctaatttctggagacttttataaacaacaacccttttgcaaaaggatagattcctaaacgcaccttctcccaattctttaagattcttgggaagtatcagctcattcatactgcagccgacaaaagcatcctcccctatttcggtaatattgtccccgaatttaacagacgtcagtgccgagcatccaaaaaaagctctttcagcaatcgttttcatcgaattcggcaatacgatattattcaaagattcgcagaattcaaatgctttgtctgcgatttcttgtagcctgtttccaaattttacagttttcagctttttgcaattgttaaaagcttccccgccgatatattccagtgaatctggcaatgtaacagctgtcagagaagtgcagtactcaaatgcccaagagaatatatactgtaaattgtttggaagggtaacttcttttagatccctgcaaaagcaaaaagtgttataacctatactttttactccgtccggaataactatttttgttaatccggtaaactcaaatgcaccgtcaccaagctctgtaagatttttagaaagctgtaccgatttcagcttcttacagcttgcaaaagcacactcgcaaataacctcaacactatccggaatctttatctctttcagtgactcacactcattgaacgcataactccctattactttcaaagagtttggaagctgtacactctccagatttttgcatttcatgaaactgtaatttccaatttctgtgattccttcttctataactaccttccggatctgatcatcataagcagcccagggctgcagcagtttcagctcaagattataaccatccaaccactgagagctcgtaatttctccatttccagatatcgttaacgttccctgcgaatccaacatccattttgctgtatctgttatattggaaccgtcttcgtttatatttttttctggcatcccatatttatcttgtaacggtccgcaatttcccgaagcaacgatccccgccgcactgctttctcctgctgaaaccagttcctccgctccgtccagctgatcatcggataatttctcctcttccagctgatctggctcctcagcctccggtgacgcaagttcttccgtttcctcagaaatctcttcggccccatctgccgcaccattctgatcctgatcctgttcttctgatgattcctcggattcctctgtcttatcttccggttcttctgttacatccgaagtaaaatcatctccggctcccgttcccatgtcttctgaactattttccgaattgttgtcggaaacagaaataccactggttacctcttctgtctgatcctggccttccggatctgcagtttcatccaccgcttcgctgtcccactgcacgtccggctgctggctgaaatcttctgccagtaccacagaaggcacactggtgccaagcattgccgcagtcaggaacagtgacaatgcacttgtcatctttcttttcatatgcactcctccattattttattgtcataagtgtttatatatatattcttcaaaacacttataaccttttaggtacagtatacatgttatcacattactactgcaacttatttctcaccctttttcccatgacaataaaaaaacgttgctgttcactccgttctcagtaacacgcttcgcgggatattaccaacgaacaacaaaaaaagcctgccgtaaacgacagacttgtaaaatgtgacactttgaaagggcatttgaaatccccaatgatatctcctcttacatcattcccgcaaacacagacgcacctataaccgtaagcaatccggctacggcaatggcaaggctgctcatggctccttctaccgggccaagctccatggctttggctgttccgatagcatgggcagatgttccaagtccaagacctcttgcgatcggctcctcgatctttgcgatcttgtagacaacctctgcgagcatatttcccagaactcctgtgatgatgatcacggcaacggtgatggtcacgataccgccaagctcctcggaaacacccattccgatggcggttgtgatagacttcggaagcatagtgacatattcctgatgatcaaagccaaacaatttcgccataagcagaatgctgcaaagcccggccagcgttccggaaaagatcccggcagccactgccttgagattttttttcagcagatggatctgctcataaaggggcactgccagacagaccgttgccggagtcagcagatagctgatatattttccaccttcattgtaatcatcataatcaatgtggaagagcaaaagaacaccgataacacagatgatggagatcaaaagcggattaaagatcgccattttaaacttttttttcaggatcagaccgatctcataggcgatcagacttatcattgctccgaaaaatgcggagttttttatgaattccatcatttttcagttcctctctttcccatacgaatcactccctgtgttacttttcctgttacgaccattacgatcaccgtgctgataaacgtcatgatgagaaccggtacacagatcggtttcagagtgctccaggctgtgatcagtcccgcacctgccggtacaaacatcaccggcatgatctcaaccagaaaatctgccgcacctttgacctgatccagcttcagaatacctgtgagcaaagccaccagcataatgatcagtccatagacactggccggtaccggaagtggaagaaaggttttcagtaattctccaatgacggaaatcaacaggatgatgctgaactgttgcacatgcttcatgttgcatccctcctgattcatgtaaagcgcatattcacattttgctttactgcatactcatgaacgcagctgcgttcacagtctgcgctcaaacgaatttttcaaaagtggtaagaccacttttgttttaaacgtttttttattatacgctacaaatccaaaattacaaggattgtatccaataaaatacaaaaaatccttttatgcatcagcgtattccagtaatctccagaaacggatctgcataaaaggatccataaacagggttatgatcatttcctggaattttccgccaaaatgattttttccacctgatattttccatcctccacagtcatcaccgccatggtaacctccgcgccgaaacgacttcttccacagcttcccggattcagccacattctgccatcgatcatcttctcaaaatatttgtgagtatgcccgaagatgaccacctgtgtgtcccccagctcccacgcaacgtcttttttgttatggaccataaaaaatttcacgccgtcaatggtaaagcttagactggtgcgaagattttccgcccagtctttatcattatttccacggaccacatagagatttcccatggaacgcagtacatccaggatctcatctttattgacatctccggcatgaagaatgtatttgcagtcttttaagatttccagtacctcaggccgcagaagaccgtgagtgtctgatatgatgccgattttttctttcatgatctctatcctgctccaatcctttatcattatcgccttttaccttttgcagctcacgctatgaccggcaatactcttcacaatacataaatatttaacagctgcttcttttcacaccatttcagaaattttcttaattggatcaagccgatattcgcaaccccgcagaggacttacctgattcgcttaaaacaattctatttttccatattctccgtcagatcccggtttccgcaccacttctcctgcacggagccgccggatgccttccgccagaacttctccgccggcttttcggatatcttccggcggaacctctctcaatatggtaaattctgcacccagtctttcaagcagcgcctcgtactgtccctgaacttttttgcttgccgtggaaaatcccatgcaggcggagatcacctccggcagcggcatcaggctttcatatgggcggccgctttccggcatggccgctgaactctcgtcacggtcagataactgcaggatccggtgatccacacccatagtcagcttctttccgcagaccgggcagataccgttatacatctctgcttctttcgggctcaggcacacgccgcacttccggtgaccgtcgaaatgatactttccttcttccggaaaaaattcaatcgtcccttcaagaccttttccgttctgcactgcatcccacaatccctgataggaaagctctatatccagaagatccgcttcccttcccagcttcgacggtgaatgtgcatccgaatgggacaccagctgatagccatccagcgccgaaatctgccagttcatcgccggatctgaagaaagtcctgtctccagggcatggatgtaaggtgtcagttcttcaaagcattcttctatggtatcaaatccggacttcgctccaaacagggaaaaatgtggggtccagatatgcgcggggatatagataccctcctcactgacctccagcatcatttccagaagatcatgacagggcaaccccaaaataggacgtccatctgaatggatatttccgatcttttccagccttgcggcaaaagcatctgcctcattgaatcccggaagcaggatcaggctgtgcaccttcctggtttttccgccttttttatagatggaactgatctcaccggacagtacgaacctgggtgcttttccaggatagcgtgccgcctccggcaaaacatattcctctttcagccggaacagtccctgttctgcagggatcagcttcgccttcaactcctgccgccagatgggatgtgtcatatctcctgttccaagtagtgtgattccttttttccgcgcccagagatccagcatctccggcgtgccatctttactggttgccatggaatatctggaatgtatgtgcaggtctgcgatctgtttcaaaacttttcctcctgtatcatcttttcctctgtccacatgtacatcctgtctttttaacaaaaacgcagacaaagaaattaccgtcttctttgtctgcctgaatgaccggatcgtatataactcaccagaaatccatctgtaacatgatcagatatctttataatacgatggtgatatcacgtcatactccctacaggagcatccgttctcatagctgtcacagcagtcacagttggaacaatacatatgcgcgtcattaatataaaataaaccgccgtactgcatggaagtgcgctgattcttggatttcttcttgctgttgtcgtagtaggctccgttggggatcatcatattctccggggagaagctgctgaaatcaaagaaatgggattccgtaccatgatgtggtaccttgatacaccagtaatgctcatgaagcggaatcctcccatcatagttttctgcgatcatcctcatgtactgtggctgtacatctccggtaaacagaagattcagctctccgtcgccggtattctgaaatgccagactgatcttgtggcggaactgacgcagaaaatgcccctgtttttccgcactttccagaagtgcctgaaattctccggttgcctgtaattcacggaatttcttttccagcttttccggtttaaggcgacgtgctctctctttttcggcttcttccggagcctctgctgtatcctcagctgctgcgcctgtatcttccattataagctccagcttctcctgcgtatatccttcgttttccccaccaggctctgtctgtcctgtcaaagaacgttcggattcctctgtatactcttccaccaaagatgcctcagacagtggagcagatttctgctctgcttccggcatctcctctgtcatggacaaaaacagctgacgtacctcctccgcaatgttcacaagctcggtcattgcgttttcatgattctcgatcagggaattaaatacgtcctccgtttcccggctgacttccctgagatccggccagagcgctgtatattttccttcaaactctgagcctctggataaaaggtcgatctttacccttctggcgcaaagagcttctgcaagggcaaaaaggctgacacgtcttccgggaagactggccttttttgtcacatccgcaaggagcagaagcgccagtgtgtatttcatttccggaccggaaaatacatccggaagatagatcttttcaaattcgtaggcatctcttcggtaacgcatcatataaagcaatccggaaacatggtccggatgaaaatgtgtcagaagcagattttttttgcggatagtggtaaggtctgagatgatcacatcaaagacctctctccgtggccgcccttcgatcttgctgttggctgccccgaaatccacaagcaggctgctttttctgtcacggatacagaaacagtctccgaaccccacattgtacattcgtattctcatttatttttcctctggtttcttattcagctgacctttgtttttgcagctgactcttcttttttcttctgttactgtcttcatttctcagaaccagatctgcatatcataccaggttgccccgccatgacaggaatctgccacacccagcttcttcagtccgtggctctcatagaatgggatcatatgctccttgcaggtaaggatcagagctttttttccacgctctttcgcaagctccttgaaatattccacaagctctcctgcgatcccctgatgacggtattccgggatcacattcagtccgaataccgtctggatctccccgtcctttctgtgaagagtgatatcatgataaaattcatccgggagtactggtttatctgtggttcctccgttgataaagcctacgatctgctcatcctttactgctacaacgaaattctccgggaatgctcccatacgcttcacaacttcctcatgacttgctgcctccgcaggtggaaaacagattgcctcgatctctgccagacgatccgcctcaccgggatctgccagtctgatctgtaaattttctgtcatttttcgtggtctcctctatatttattccgttttcatccggtttcgattcttttttaattatatcgggtgagggaaaatgcgtcaacgtgtaacctgcaaaaaagccctcagtattcgcactactgagggcttcgctcttttgtttttgtctgtcattatcacagcaccgaccggatcagctgctccgtatactctgtcttcggatgctcaatgatctcttccggtgtcccttcctcttccacatgtccgtcatgcatcacgatcacccggtcgcagaacagctggacaagggccaggtcatggcagataaaaagaaaggacagctggttttctttttttaacttctgaagcagctccatgatctgtttctgcacagtcacatccaaggcgctggttgcttcatcacagatcagcactctgggttccacagccagggctctggcaatagccgctctctggcactcccctccgctgacctgatggggataccggtctgcatattccggagtcaggccgcaggtaagcagaagcttttccacacggttcctggtttccttcttacttatccccatattccggagactttccccgattccgtccccaagagtgcatctggggtcaaaggattctgccggtgtctgaaaaatcatctgcatttcccggtagatttcccggagattttttccccttgcatgtgtgatatccctttccatgagaaaaatttctccggcggtgggttctgtcagatgtgtgatcatcttcgccacagtgctttttcctgagccggattcccctacgattcctaatacttcccccgttttcagagaaaagcttatgtcttctacagccgtgaaggattttttaccggtggtgaagctttttttcaaatgatgcacttccagaatgtttttgttttctgtcatcatctgcctccatttccggtacctgtacgtttcaaacgaggtaccgaactcataagttcttttgtataaggatcctccggagctgtcagaacctgagctgtttttccgtattccctcacctttccgtttttcagtaccagaaccttatctgccattttttccaccacgctgatgttgtgtgtgacaatgatcatggctgttccgtattccttacgcatcagcagcatttcctcaactacctgtttctgtatggttacatccagggcactggtaggctcatctgccagaagaagcgacggattctgcagcatggaaatacagattcccacacgctgattcataccgccggacaattcaaatggatagctttgcaaaacacgttccccatccttgaggccgatcttagccatcatccggacggcgcgctccgcacactctttacgactgatcctttcatgctcccgcatactctcataaatctgatcgcccacggtgcggatgggacaaagggctgctcctgaatcctgaaaaaccatggcgatctcaggacccagaagtctgcgtaattctttttccggcatatccaccacattttttcctttgtaccagatatccccttctgtcaccatgccttcatttcccagaagtcccatgatcgctttgatgatggtactttttccgcttccggattcgcctaccacccccaggatctcccctttattcagttccagatccacatcatgtacaaccggttctccgttgtaacagatcgtcacatgctcaagcttcaacaatgattccatcttatttcacttccagatctgccgtgatctcgtaataatcacatgggtgagcagtcagccctgatacatttgactttgacacaagccccatgttcagatgagaaacaaagaaatacgcatcatcatctagaatggtctgctgtgcttccacagcaagcttgcctctctcatctgtatcaaaggtctcatgcagcttcgctacgatatcatcaagatctgaattgctgtatttgccataatttttggcagcgtcagatacaactgtacttgtgaagaaatattccggatcaccggtaggtgcagttgtaagcgagcttacatatacatcaaattctccattctttgcatacgtcgcatggtctgctgtattgttgacatcgacctcaattccgatgtcctttaaagtggactgtgcatattctgcaagcttaggctgttccagacgggttggataggtcagccatgtgatggacagcttctttccgtccttatctgcatagccatctccatccgtatctgtccatccggattcttccagaagctttttcgcctcttccggatcataggacggtgcctttactgcatcatttccataagaaaaactgcccgggaaagcacccactgccggaacgcctcgtccctccatgatcacactgcagaagccgtccttatcgattcccatctcaatggcttttctcacattctgatcctgcatcagttcagacttcatattaaactgtccgaagaaacatcggcttgttgctacagagctgatctgatagtccggatttccgtcaaaaagcgcatagttatcatactgaagtccataggttccctgtatatcgcctgtctgtaatgctgctgtcagggcacttccgtctgagaaggattttacgataacgttgtctacctttacatctccgccccagtaatcctcattttttaccagcttaatctctgttggagatacctctgttgcaacataagggcctgttcctgcaacatttgcagagccgccctctccctgtacgccataatccatatcaatgatagcaccatatggatcaccgagataattgatcagtgccggacatggttcggaagtatggatcgttactgtcattccatctgcttcgatcttatcgatcttcatatcgtaaggtgcacggtcatggtttgcgatcagatcctccaggcattcctttaccgcttctccgtccatggttcttccgctggaaaatttcacaccatcacgaagggtgatctttactgtattatcgtctgtaaattcatagtctgtagcaagccatggctctacctccatgttgtcattgtacttaaacagtgtttctcctacgccataacgaagacagctccatccggaataattgtcatgagggtttaatcctacatctcccatttcttcactatatccggtagttccgtaaacaaaggtagttccttcactcttttctttgctttttgctgctgccgaaactcctgtcatgctcatgaccattgccgctgcaatcactgctgccagaatctttttcttcataatctccgctctcactttctctgttatgtttatttataagtgcctgttatccttttctcctgtttcgttccttcggatccatataatcccggatcgtatctcccagaagattaaagatcattactgtaataaaaatcgccattcccggcgcaagtaccatccacggtgaaatctgcagcatacttcttccatcgttgatcatacttccccattctgccattggaggctttaccccaagcccgagaaaggaaagtcctgccagctccatcatcatggttccgatatcaagaactgacgtaacaaggatggggcctgcgatattgggaaggatatgtttgagcagaagctttcctgtactgcttccggaaagcttcgccgccataagatatgcagagtccttctgagtcagagtaagccctctggcaagtctcgcaaacttcggccagctgatcactgccagggcaatgatcgcattctggataccgcctcccagaacacctgctactgccagggcaaataccagtcccggaaaagccaggaacagatcggagatacgcatcagaacagtatcggctttgccgcccttccagccacagaaaataccaatagccgttcctgccacagtgatcaccgcaaccaggagcagcgttgcataaatactggtcgtacttcctatgatcacacgggaaagcatatctcttccataacggtctgtcccgagcagatgctccggtcccggcggtttctgggcaagtgccagatcctgggcataaggatcataagggcagagatattttgcaaatgccgctacaaacagaagcaatgctgtgagcacaagaaaaaagacaagctttgcttttgtatgatttttccgaatcttctgcttccggactgtgatattattttttccactcatgctctgtcacctccaagtcgtactctcggatccagatagtggtaaataatatctgtcaccagatttaccagaacataaataaccgccatccaggccacataagcctggatgatcggatagtcacgcatggtgatcgcatctaccgccagttttccgacaccatcccacataaagatattttccacaatggcagttcctcccagaagattgccgatggacagagccagcagtgtgatgatcgtcagcatggaagccttcattacactcttccagatgatcacacgactgcggatccctcttgcccgggctccggtcacataatccttattcagttcttccagaaccgtggcacgcacctgtctggtatattttgcagccatggagattgccagtgtcagtgttggcagaataatactctgtccgagatctgtatttgtgactaccggtaaaacgcccagcctgatggacagaaaatacatcaggaccatggcagcaaaaaaattcggcatggaattgccgataaagcttaaaaatcttatcagataatctacccatttgttgtgctttactgctgacaggattcccaacgggatcgcaagaacaattgtaagaaggatcgatgacagagtcagcatcatcgttgccggaagctttgaaataaaggtttcatagacatctctgtgagacacatagctctctcccatatctccggttaccattcccgcaaaccaggcagcatattgtacaaggaatggtttatcaaggccatattctgccttcgcattatcaatgacctcctgagatactgcagagcctgcattttcatacatataagttactgcatctccgccggcaagccgcatcatggcaaaagaaagaaatgtgatcccgatcaggaccgggatcagctgcagcaaccgttttattatatattttcccatattttcctctccgcactttgtttctcagtatttcgaataacaaaagtttaacaacacggctgttctgccacaaccccggcggggggattttacatattccattttgtcatgcatatgtattccatcatgttcttatattctcacacagtgacatgcggataattctttccagccctctccaagagactgcggctcttcatactcgatcagccttcgttttctctcttccagcggatccgggatatggatcgcagaaagcagggactgtgtataaggatgctgcggattttcaaaaagctcttttgtaggtgccatttctaccagctttccgtttttcatcacgcctgttgtatcacttaaaaaacgtaccatggacagatcatgggcaataaaaagaaaagaaaatcttttttcctgctgaagctttttaaaaagcatgacgatctgtgcctggatagaaatgtccaacgatgcgatcggttcatctgcaatgataagacgcggttccatgagaaggcttcttcctatggcaactctctgtctctgtccgccggaaagctctcccggctttttcgaaagaatgctttcatccagtcctgtctccttcaggatttcccgaagcctgttctccagaatttctctgtcacggatcctgcggctgatctttacaggctccagcatgatctgccgtatgctcattcggggattcagtgcagcgcccgaatcctgaaagatcatctggatctcagtctgcattttcttccgcattccgaaaggatcctttttatccggcactctttctccctgataaaagatctccccgcctgtaggccggtagattcctgcaagcgttctggctgtcgtggattttccgcagccggtctctcccaccagtgccatgatctcaccttcccggatacggaaggaaacatcatccactgcatggatcgtataatcggaacggatacggaaatgctgctttaaatttctggcttcgatcagtacaggcgcctgtttctgttctgttttctgtaaaaatagcgcttcctttttatccggtttctgtttatggccgctgttttcctgtaatctttccttcaaaatggagggcttttctattttcggagctctttcatccagaagccatgtggctgcataatgcgtatcactgaccttaaacatcggaggagtctgttcataatcgattgctagtgcctggggattccgaacggcaaacgcatctcccggcggaggatccaaaagagagggcggcattccggagatcggattcagctcccctttttcacctgcaaatacaggcagagaagacagaagtccccaggtataaggatgccggggatcataataaacatcttccgctgtcccgatctcaatgatctttcctgcatacataactgcaactctgtctgcgatccttgcaacagctcccagatcatgagatatgaacacaatactgatccctgttttttctctcagctcaagaagcagatccagaatccttgcttccacggttgcatccaatgctgtagtcgcctcatcggcaaataatatttccggatcacaggccagtgcaatagccagcacacaacgctgacgcattcctccggaaaaaaaatgaggctgcagtccatagcgctgttctgcatccggaatccctaccagcttcagcatttccacagctctttttttcgcctcatccccggatactttctgatttttgatgatagcctctgtgatctgtttgccaacagggatcgtcggattcagcgtcagcatagggtcctggaacaccatgcttaccttacttccgcacagcttttccattttttttctcttataagctgtgatattctctccgcagagactgatctctccgctttttacatgtgcattcggtggcagaagcttcatcacactacggcacataacggtttttccacatccggactcacctacgatacaaagtatctctcctttttttaccgtgaggtcaacattccggacggcctgtacctcgccgtccggtgtgtcaaagcttaccgaatagttttttaattccaaaacggtttcctgcatgatcttttccttattttgtaatggtccagtcttcaatattccacataacacctacggaatgatgtcccagaacacgtgtggtatccagtccgtcaagtccggaaacacctacataatctccctggagataagcaaccagaaggattccaggtgcctcggcatatgccttttcgaattcactatatgcttcttttctggcttcctcagtctcactgtgacggccttcctcaagatatttatccacatctgcattggaataatgcatgttgtttccacttgcgtcggttacaaagtttacatatgccatatccgggtcaaactgtgttgaatagccggcaagaaatccattgtagcctgcatcccagtcaaatttggtaacaagctttacttccatttccacaccagcctgcttcagcatatcagacatgacattggcaatatccacacgctcttcttcgtaatcacgtacctggatggtaaagtggaatttctgtccgtttctctcatagatcccatcatcaccttttttccatcccagctcttccatcttctttgcaaaggtatccagatcataggagtagatattggcttccttatctgttccgagagggtttctctggatcgggctgtatgctgcctctccctgtcctgcaagaacacctgcaataatggaatccttatccagcgcataattcagaacgccgatggaatctccgttttccttccagaaatctgtgctcatatccatggccgctccacggtaatctgctgtggtgaactcccagtaattatatccgtccttatccttgaactgagaagcatagttggaattcagccatgcaagatccgcctcaccggactggagcatggttgcctttgtagtctcatccgatactgtacgatatacaacggtttcaatatttggaacctttccgtaataatcttcatttcgtttcagtgtgatcattccgccggtagcatcccagtcttcaaatttataacggcctgttcccaccgggttctggttaaaggatgtggtatttatgtcctctccttccagaagatgctcaggaaggattcccatggtaaagtaatccagcatggcagcatcatactgatccagtgtaaagatcacagtctgatcatccggtgcctcaatacctgtaatgtcctgatagttgctggtgatgctggctcccagggtttcatcctctgtaagctccttataggtgtatacaacatcctctgcattgaaatcttctccatcatgccacttaacaccatctcgaagcttaaaagtataggtattggtatccttgtcaaaggtataactctctgcaagatcctctaccggctttccattggcatcatatttcatcagtcctgaaaaaataagatccggaagttcatcatggttattcagaaggggattgatcgtactttctgactcacctgcatataccagagttttgttttcttctgccgcagctacggttaccgcactgcctgcagttgctcctgtacatgctgcggtcactgctgccagcgttatcgccgcatattttctgccatagttgattcctgttctctttttcattctgttttcctcatctttccttattttcaaaccggttatccacacttcggaatgttttatcacggtttgcgtccaaatattttttctgactgcatcagagattgctgtaatgattatttacctcacttctcacaaagcttcccatgctggtaatgcacattaaagtaatgaccagaaaaactcccgggatcacgatcacccaccaggtattcatgatcagtgctttatttgccagcgagagcatacttccccaggaaactacatctgccggaagcccaaggccaagaaagcttaaagtagattccatggtaatacagctgcttatcgaagagatcaccacaaacatgatcgccgaaacaaaattcggtatcagatggtgatacatcacatatccaaaacttcctccgcagagtcttgcatacatcacataatcactgtttcttatctgccgcacttcacttcttacaatacgtgccagtgcaaaccacccggtaataccaatgatcacagatatgctaatcacatcattggcctgaaggaccgcagacaggatcaggatcagcagaagggtcggaatacttccgcacatttccgtaaaccgcatcagaactgaatccacctttggacctgctgttccgctgatgcatccgtaggtaacaccgatcacagtaatgatcgcagctcccagaagcccgatcaccagagaaacccgtccaccataccagatcagtgaataaatatctcttccaagcgaatccgttccaaagataaactcctttcccggcggtgtattcagattctggagataaaaacctgagggatcatgatttgcaacaacatttgcaaatacacagcccaaaacgatcagaaaaagcaggaacgcagaaaataccggtttccccttcagcttttcctgaaatgtttttttccgtttttcagattcatactgcttccaccctgcaccaactacctgaaaaagctcagcttctgaaagcttccggtcagctaccataccctcacctccgaatccttcattcttggatcgatctcttcattgacagtctgtgcaacaaagctgcttaaaaatacgataaatcccgtgatcagcacatcgatcatcagcagattataatcatgatattttgcagattccactgcaaggtttccaattcccgcataattgaaaacagcctccacagttacagtcccaccggttacatggggtaccgaaactgccatgatactcacgatcgtcggcattacatttcgaagacaatgcttccacaggatctttcttttggaaagtcccttggatctggcaagaagtacataatccttccgcacctcatccaggaatttgttacgtatcatatatgcgtaataccagagatggctgaagatcattactaccagcggaaggatcatatgcttcatacgattgccgatactatctgccattcccacatcataggcaccgctgcttgggaaccatccaagatttacactgaagatcaggatcagtaccacaccaagccagaaagccggcacataataggctgctgttccgatcttgcagatcagccggtcgatccactgatcctcatggagcgtacagaatatggcgatcagaactgccagtataaagatcacaatataagcaattcctcccagcaccagagtatttccgatcagcggtttgatcacattcataaccggctgcctgtatttcagcgacaatccgaaatcaccatggactacgttggtaaaccaccttacatactgtaccccgatcccctgatccagtcccagtctcgttctggccgcagccacttcctcactggtcatcatttccagggaatctccgtaaaaggactgcaggggatctcccggtgccagtctcgccagccaaaacaccaccacagacagcagaaacataaccacagcaagcagaaggatccgtttcaggatccggatgacgagtttattttctttgttcataattttcctttcccactgccctttacagttcagacagacattcgcattccgctctgctgcatgctcatgaacacaaatcgtggagcgattagtgttcatatttcaaaagcagttatggcatccaaaaccataactgcttttgaaagggtcgtgttattattcgacaaaacatttgtatgcacaaataggagtgcgcggaggttatgtgcatcacagtgtttttatatacagcacgcggagtgtgctgctgatattattttatcatttaacagatttcggacaaccccggtacggggatattgggcagtcgggttttgcatggatatgtattccatataaaaaacgggacttttctgtatcagaagcctgtgtcccgtgcagaaaaatcccgtctggtcttttgctttattcttttatcacttcccggaaatctgaagcctttccttcacgaatcccagaaaatcctttccctgttcactgagctcttctcctctccgacaaatgcacccgtaaacaagtttctggccttctcccggaaatgtatatttcacggaggaatatcccggatcacggccggaaagatccgcaccactgatattacacaactctccggaaccaagaagacgttccacgatataatcactgtttgttacgactacggtctctgcctccactgcggaatgaccgttttcctctacaaggttccggtaattatccggggaaaattcatcgggaaatctctggatcagcctgagctgggacatattaaaatctccctcatctgccgtatctgctttccctttcccggtataaatatttacctcggtttccgtcagcagctcaaattccaggtaattccgggaaagaaaatactggaacgctgccagctgattctgcatcacataggcgaatcccatatcgtcctgtctggcttttacacgttttatgatctcatgggtatctgctgcgtaaacctgataatgaagatcatcgcacttatgtgcttcataatacgttacgaaggtatccgcaaaccaggagctgggatgaaagcatacacacaggctgctttttgcaagtggctgtgcctgcatttccagttcatctatattttccaggatcctctgcacatggatatatgcacgctctccttccggtgtcagctctatgccctttgcatgacggacaaacagctgagtacgcatatcgtcttccatggaacggatcaccttgcttacatttgactgcgtggtaaaaagcaactctgcagcctggctgaaggagcctgttttggcacaggccgcaaaatactggatctgtttgatattcagcatgttcctacctcgttttcttcgcaaagatcaaaaacatcggggtcggattataaaactcatctttttctgtataaatacgtttgctgataccaagatcaaaggaaaattcttccacacctgtacggctcagcgtttccagatcccatgccggacgcagaaaagagctgataggcaactgccgcttgatatcctcacattcctgcatcagttcatcctggatctgatgatgggcatgattctccggaagatccgcagtgtccgcaaagtctgctgccccgtaatttgcatccagatttatcatcactccgcccggtttcagtacgcggaaccattcctgataagcatgctccgcgtccggaagtgtccaggtaagattccgggatacgatcacgtcaaattcctcatccggaaaatccggagcttctgcatccatcaccataaaccggcagtctgctttttcttcctcagccagctcctttgcatgagtgatcatatccggcgtcagatcgatcccggttacctgatggccttcctttgcaagaagaatggtaaaaaatccggttccgcagcctacatccaggatcctgagattctttttctccggcagatacttcttaagctcaaccatccagcggcctgcaagtgcactgtgaagctctgctcttctctgttccagaaagctgtcgctgcgcctggtccagtactgagcgatccttgttttccgctcatctttttctcttacgatatttccgtaggtgatcacagggccgccttccacaacctgaaggcttgatacctgataaaggatcacaccatccatgtctgcgcgacagatttcctggacatttccctcataatcacggatctctccgagatactcatcctgatgaacgatatcgcctggtttcttgaccgggtaccagagaccgttgacactggcacactggtaacgtacgtcatccatcttcagaggataataggtgctgtgggagcggattcctctgtaggccccaatgctgcagagaatattccgcacatcccggcgcatggaatccacttcctcccgctgccaggttcccatacatcccctttccagaagcacagccggaatatcgcaggtacttgccgcataattataggcgccgcctgtactcacatttgactgtaccatatatgggacatcaacctgctctgccatttttcgggaggcttccacgatctccggctttgccacgcccgcaaaatatacatacggagtcagctcctcataatcgtcaccaccgtgaagatcgatataataatccgccttccggatcagggattctgtgatagctgctgccagacgttccatttttgttccgtcctttttgcccgggaaaacacggttcagattttttccgtcttcccagctgatgctgcctgcacgcttctcaaagtcttcccggttcagcacctttaccagaaccagctggccctttaccttttccggcttcagccgcttcgacagctcgatcagagtctggattcccacatactctcctgcatgaagacctgctgtgacgagaacggtttttcccggatcttttccacggatgatggttgccggaaggacaaattctccatctccgagctcaagaaagccttctgttttttctcctgccgcaaccggaagattcaggaaatgatccggctttacaccagttaccataaacatcggtgtggactgataattcaatctctcttcctcactccagaccgttttccatatttctgtgtctgtgcggattccaagaagtcctgcttctctgagagtttttacgtcccaacggggacggctgatctttgacagcggtacctggagggcaatccgttccatgcgctcaatatctgtacagagatagtgatcatccaggctgttgttttccacatttttccggtcgttttcgtaggccttacgctgttcttcctcataaagatagccataccagttggcatcaaaattcaaaagccttcctcctgccttcagtacacggacccactctctgtaagcaacatcaggatgttccagattccaggtaagatttcgtgaaatgactacgtcaaaggtattatcctcaaaatccagcttctgtgcatccatcctccaaaaacggatgttccggcaaaggtctcccgcattttcctttgccttttccagcattccttccgtataatctactgcatctacatgatatccggcttctgccagtatcacaggaaaaaatccggggcctgttccgatatccaggatacggatctcttcctttggcttgtccgggaactgactggtcagcaccttaagccatgcgtttttctgcgttcccgcaagctctttatgattcacttcggagtacccttctgtacgggtgctccagtaagattcgatttcatcgagaagtttttccacgttgattcctccgcacttttctattcacgtgagggaaatcaggtccccccccacaggtcacgtttaatgtaccaaattgtcagggtattaacaagcccctgggggggattccccacattgctctgccgataaaatttccgaatgccgaacactgcttccgtactcctgtccaccttgtaattctccgaatgctgtggtatcatcctggctgtagtagttcagtaatataaccgaaattgaaaggatggttcatatacaaatgacaacacaggaactggcctatgaagttatcagccgtttaaaaaaggaatatcctgatgcagactgtacactggattatgatgatgcctggaagcttcttgtaagtgtccgtctggcagctcagtgtaccgatgcccgggtcaatgtagtagttcaggatctctatgcaaaatacccggatgtggcagccctggcagctgcagagccggaagcgatcgaagccattgtacgtccctgcggccttggaaaaagcaaagcccgggatatcagcgcctgtatgcgcattctccacgaacagtatcacgacaaggtaccggaagactttaacgcacttctgaagcttcccggtgtgggccgaaaaagcgcaaacctgatcatgggtgacgtattcggcaagcctgccattgtaacagatactcactgtatccgcctttccaaccgcatcggccttgtccatgacatgaaggatccgaaaaaggtggaaatggctctctggaagatcatccctccggaagaaggcaatgatctctgccaccgtcttgtcaatcatggaagagaagtctgtacagcgcggacaaaaccttactgtgaccgctgctgtctcaatgatatctgcgaaaaaaatgggatctgaatgtatgcagttcaataaaccttcagaccccggaaaggaaaaacataatgaatttcaaaaaactggaaaataatctcctggacatgatccaggaacaacaggtaaagatcggatacatgagcggagtcacccgtttttattatccgctgcagtctctgaaccgccttcttggcacagagcttacggaagaagaaatgcagcatgcaatggaagaattctcagattatgcctgtgaccgtcttggaaaggtaacagcttcttccaaaaacggacgtttctgcatcaccctgccgcctcagacctcggactacgttcacgaaaaccgaaagccaagtgaatttctggtacgctttataggcacagttgcccgtcatggctgtactctggatgaagtgatggacgtttttcatgcttattccgaccatgtacacgtagaaaaaacaaccggaaccggatttgattatcttgtatatttcgaagacgggatcccagatgactaccggtattgtctgtccctggagagtgagcatatgatctatcataagtttacaccggaggactatgaagatttcggattctgatcttagaacaccggacaagtttccacccactgcttattgcttttcgcaaccctgcaggagatttcctggatttgatcaaaaaaccgccggtctgcagacagatcgtaaagcggacattcgcaatccgcttcgctacttgctcatgaacgcagtcgcttcgcgatctgcgttcaaaaaatcctctgcagatcgacggttgtttttattttctatgcccggaacttcttctgcatctcccgcaccatatctttcctcttaaacagaaacagccataccagcatcaggaaactgacgcatatgcagatcagcgacggatacagcaccgtcaccacaccggcaaccaacaggatcacaggaatcactcctccgaaagctcctgcttccagaagatagatcatatactccgccacctccagcttctgtaccgcagtgatcacccacatggagcagatcacagcaagcgcagccagaggaagcagataatccacagaccagccacgccagccggtaaacacatcccaaagcactcctgcaacagctgcgatcaccagctgccacatctcattcttcagaagattcctccgcttcacataagccactgaaaccatcagccaggtgcagaacgcccctgcagtcacaaaccaggcccagcctatatgaccatccagcagataatcgatcagattgcataccacagccagcacaatacacagaaatgtaaagctttcaaaaagcttcatctgctgcttctgctcctctttctgtcccggaagatcattctcccgaattgtacaggacacctgctcatttttcagtctctccacaaaattccgctcaatatttccattggggatcttggacgtaaaactcaaaaccatctcatctccaaaagaacaggaacacagctgcagactatccgtgcttgcaaaaagtccgaatctctgaatatatttccgatattcctccggcatccggatgatccccacattggaatagatcgccgtgattgaccttcctcccagagtcgtcccggcaagaagaaacggggttttgatctccagtggtaccagacgcaggatcggattcttctccaggcttaccagatcattaagctttgcttcaatcacgtccttactcagttcctttgcaaactgctcctttacggatttcaaaacatcctcaaagactgtatcagactgaaaataacagctgatctcaatccatccgaaaaaatttgccatagaccgggatggaaaataatttctcaaatttaccgggatcatcagaccaatgggctttttcgcctgattctgaggcacttcttcatggatcgcccagataagtgctgccgtaagaaaaaccgtgatcgacacaccggccgcttttgcacgggcgtggatctcttttaccggaatacagacttccgtaatactcatatcttcctgcctgagcttctcaccttttagctggaaggcaggcttcttggactctctctttcttggcgcatcggaggaataatactgagaaaagctgtcctcctccatatccctgcccgtaatgttctcatccggaaaaagctctggaagctctgcggatgggtgtgtctcctgaagataatttttcaccagctccatcagaaaatgcatggctcccgttccatccgtcagcgcatgaaatacctcgaagttgatcctgttcttataatagctcacccgaaaaagaagcgtttttttgtccggaatataaagtccgctgcagggtgcacctgcttctttctttaccactgccggaatatcacgtctctccagataaaaccagaacagtccctttcttaaaactgcacggaaaagaggatatttttccagtgtcctctccagggcttcctgcagtgtttcttcttttatctcttctttcagttcacagtaaaaacgaaataccctggtgtcattctttcctgtcaccgccgggaacgccagcgccgcgttgtcaagttttctccactgtgcatattcgttcttcatgatgctttccttcttcctgttcctctgtttccagaaaacgatttacatatgcaaagctctcctgcacatgcagaaatttgattcccagtgcaaaatacccatgaaacgcacctgcgatcctgtgcacttccacacgatttcccgcttccttcagcttttcaccaaatgcctctccttcatctcgaagaggatcgaactcagcggtaagtatcagtgtatccggcatatttcgaagatccttctccaggatcggcgcaaaatatggattcctcctgtcttccggacaactctcatagagtttcagataatcttccatcttctctgctgtgagaagatagccggttccgtttgtttttacggattcaaaaggagagtcttccgtataacagttgttcagtgccggataaataaggatctgttttttcggaaaaaattctccgcggtctctggccatcatacatacagccgctgccagatttccgcctgcactatctcccataatggtgatacgatccggatccgtattcagaagaaaacgattggtgtagaaaatcttcgcagctgcataacaatccatcagtcccaccgggaaacggtattccggtgccagcctgtattcaacagacgccacgatctgaccggtagactgtgccattctggcacaaacccgctgataattctctacactttccgtaacccagccaccgccatggaaaaacaggatcaccggtggtttttttccggaggcggcaccgttttccatgtcctcttctgttggaaaaaacagacggatcggcactttatagtctccgttataaacttccgcatccagtgtcctgtaaaagatcctcataggatccatcttcttaagatctgccagctttctggaagcctccacttcgatcccgccataggaaagagcatggagcactgtccgcacggcacgtggcatagcagtttctctcccggtcggaatgcccggaactatgactgggcggcttcttctgttttcttttcttgtatagatatattttgtttctgtttcatatcttccaggaatgcagacttgtttcacgcaggtacgcctataggcaatcctcttcaggatctcatgatctgtacggatgatcacttccgttcccttatagccccggatataatatctgttttctttcttttttatacgtggttgtctcaatcgcagtaaatattttctgattactttttcctccgtggatttttcctttattttcacctatgatagcatccgcagtctatgagtacaagtcatagtaaaaaatatactgctgcatgatcccacgcattcctctgtatctgcggttgggaaatcctcttttgtaatgcacgtccataacctgacggatgtgggtatctatgggaaaagcatccatatgatgcagtgcaaacaggcagatacattcagctaccttttctcccacgccacagagcttcatcaactccttctttgcctgagggtaacgcatatcatagattttttccagggagatctgaccggatgcaatggtcctggccgttactgcgatatattttgcccggtatcccaggccgcatcctcttaactcctcttccgttgcctgactcagcgcctctacagtcggaaaagcgtagtattccacacctgcagatgaattttttcgctctccgtacttccggcagatggtttcgatacatttgcggatacgcttgatattgttctgctgagatatcagaaacgtaacgatcatttcccaaagatcctgtcttaatatccgtatcccgtctcctgcctttattgcggcacccagatatttatcccgtggattagcagcattcatgtaagcttcataatccgtatccagatcaaaataaagcacccagtaacagataaattcctcctgagagcagcagaaatccaccactccgtctttctgatacatttccagatactggtctcccgccaccatggaaaaatgtccgtctccaagctttctcatccggaagcactgtccggaatcgcatattttatcaaggctgaaatgttccagctctactgtgatcatgtctgttcctctcgtaaatatttttccttatataatattctgtattctcttggtgtcatccggtaccgttcccgggatacccggttaaaagtcctctgactttcaaatcccgcattcatacagatatccgtaatactttcatcactgcattccaaatggatcgtcacataattcagtcgctgctcattgagaaactgattgaaattccggtgaaaggttccggaaaaaactctggacaatgtgaacctgctgatgcccagatctctgaccagccgatccagagacatctccctcttccatatgataaagctcctgtcccataccaagctccagagttccctctgtgatatagataaactctatggagttatgaagatggggtgaagcatgggctaaggtccgcagatgaatatagagattcttctttttttcttcgtacactggaaacatggatttttctctccgcaatatttgactactttttctgtgtttttggcacgtaatatttccgagagtttattataatgcatttgtaagttaaagaaaagaggaggaaaacaaaatgaaaaaaatcatagaatttatcaaatatgcgatcaaatgctacgtggagatcaatgcaagaaatccatacttccactaagaagatccacaataatatctgaggtcacggatattttgtgtggatcatgcgcatgaaaaaactgaataaaagtcaataaatgacttgtgcgaaaataatatcacctggcatcatgaagtatctccaaagcccgtttatatcttccatgcagccgtgatatctgttcagcagacatattttcgcagtcagaaagacgtgttacatcagaattgtggagcagatcagcctgcttcactttttttgcgatcggattcttccgaagcttccggatataatcgaaataattcatattcttatctcttgtaagacaacgtaatgcctccacaacctcttccggaaattctccggtaagatcctcaaatgtgatctctgtatcttctatcacatcgtgcagaagtgccgtacatacactgagttcatcatccatttgctccgctacgtgaaatggatgaaagatataaggtgtcccgcttcgatctgtctgtccatgatgtgcctcgtacgccaccttcatagcttttttcgtcaaagctgtataaatcatagctgtgcctcccgtcaggtctttcgaacccccgttcatactctgtattacacagtatagcatctatatttcctacatacaaggataaaaagttttatatatctatcatttttacttatatacgacaattttctgattataatatcctcaaaactctgctgttcttgttacttttcactggtaatgttccgcgaggtgttttttgtgagcgaaggtcacagaaaacccgagacataccgcgcgaatttatgcgatcagcataaattctgtgcatcgcgaagcgtgttactgagaacggagtgaacagtgaccttatttggatctttcgttcggtcatgaactcgcttgccctcattctgaaattggtatatacttatcctggtcaggtaaaactattcatattcgtggtattacacgggtcacttcattttaaaaaagaaaggaatcttatctatgaaatttatatatcccgcagttttccgtcccacagaggacaaaaaatacaatgcttttttcccggatcttgcctgctgtgaagccaacggtgacacgctggatgatgccatcgaaaatgccaatgcagctgcatacgactggatctacacagagcttatggaatttgagggaaagcttcctccggtttccgatgagagcgatctggagcttcaggagggagacgttgtccgcaatatctctgtaaatatccgcttccaggatggctgggacgaataaactctcatatcacaaaaacaaaggcgacatttaatattattttcaataaatgtccgtgtcgaaaatgcctgttatgcaaaaagcatccggatcggtaattgtcctttattaccgatccggatgcttttattatacgtttctttattgttcatgatactgtctgaaaaatttacgcagtccgtccagtgcttttaccagcacgtctgtctcattctcattcagctctgcgatcaccgcttctgtcatctgcctgtgaaactccgcatgatgatgatatgccatacgtcccttatttgtaagctggataaataccacacgccggtccttctcacttcgttctctcttcacatagcctttttttacaagactgttcatagatgttgtgagggagcctacagtgatcttaagcttagctgcaatggaagacatgttccctcctccaagacctacagcctcgataatgtgcatatcattgttggaaatatctttatatttatctgtgatgatggcttcctcctccagtcggaggatctcattgaacagattcaccagcacgtcatttataacttcccgattgtccactctacccgctcctgtttctccggagtaaaaaggcttctccggttctctgtttatgaagccatcgtaacataaatatggcattttttccactggatttttgctttgcaggctacaaaatcactgcaattattgcttctacattttccggaaacgttcatagcgatgttccagaagcttctccgactcttcttcgccatatttctcaagaaaatccgcaattccgttttccagataacctgcaatatcatttatgttctcacggcttacaggctctgcttccgggatcacatgctcgatcatccccatctggtaaaggtctgcagctgtgagcttcatcactgctgctgcttccttcgcctttttgctgtctttccagagaatggaggcaaagccctccggggacaggatggaataaacggaatgctccagcatccatacctcatctgccacagccagggcaagggcacctccgcttccaccttcaccgatcacaacggaaagcaccggcactgtgagacctgccagtgtatagagatttttagcaatggcttcaccctgtccacgttcctctgcttctaacccgcagaatgcacctggtgtatctacaagacagatcaccggacggtgaaatttctctgcctgctgcatcagacgcagggatttccagtacccctccggagaaaccattccgaaattccggacaatgttttcctttgtaccctctcctttttcctgtgcaagaacagttaccggctgtccgtggaaaagtgccacaccaccgatcactgccggatcatcaccacagtgacggtctccgtgaaattccatgaaatcgtcaaaaagtgcttcgatgtaatcctttcctgtagggcgtgttttggctctggcaagctggacatgttcccagggagtgaaatctccggatgaggcgaagtccggccagatcgtattatcttcctcaacagtttccattgattccttattgtcaggattgagcctgtttttaatgtctgtattatcgaactgtacattattcaggactttattctgatgcaatctcagaatatctgccaatacgatcctctgctcctcacgctttacgatcttgtccacaaagccgtgttccagaagaaattcagctctctggaagcctttgggaagcttttgcccgatggtctgttcgatcactctgggaccagcaaaaccgatcagcgctttcggctctgccaggataatatctcccagcatggcaaagcttgcagtcacaccgcctgttgtcggatctgtgaggaccggcacataaagaagtccggcatcactgtgcttccggattgccatactggtttttgccatctgcatcagagataccaggccctcctgcattctggcaccgccggaacagatatagaggattaccggcagtttctcctctgtggcacgttcaaaagcccgggtgatcttttctcccacgacttctcccatactggacatcatgaaacggcagtcacagacaccaagtgccacagatgtcccttttatagtacactttccggtaactacagcctcatcaagccctgtcttttcacgaagcccctgaagcttttcttcatagcctctgtactgaaggggattctgttcttccatgtgagcatcccactccacaaagctctttctgtctgcgatcattttgattcgacggtaagcgggtacatggaaataatttccgcagtggggacagatgtattgattctgctttacctcgtctacaaaaaccgccgctttgcaggcgttgcatttacgcatcaggttattcggcacctccggagtgttttcctgttcctcaccccggatatccctgactgtttttttgaacatgtgcttaattctcattgatcttcactcccgcaatgatatggctggcaagaaagccagtgtcaaagtttccggactggtaatcctcatctttcaggatttcgtactgatagtcaatatttgtatcgattccgtcaatgatcacctcaccaagagcgctctgcatttttgcaatggcttctttccggttacctgcatgaacgatcagcttcgcaagcatggaatcataataaggcgggatcttacagccgttatacacacaggtatccacacggatcccgtttcctcccggaaaatgcgctccctggatagttcccggcgaaggacggaaatttttctggggattttcagcattgatcctgcactcaatggcgtgtccctggatccggacatcctcctgagcgatctcaagaggcattccggaagcgatcttcagctgctcctttacaagatcgatacctgttacccactctgtcaccggatgctccacctggatccttgtattcatttccataaaccagaattttccatccggttccagaagaaattcgatcgttcccgcatttacataaccggctgctttcgccgccgtcaccgccgcatgacccattttttctcttaattccggagaaactgcagcacttggagattcctcgatcatcttctgatgatttctctggatggagcagtcacgctctcccagatggatcacatttccgaagctgtctgcaaggatctgaaactcaatatgtctcggatttaccacgaaatgttcaatatacatggtaccgtcgccaaaagcgatctcagactcttttctggcggttgcataggcttccggaaattcctccggtgtgtttgccacacgcatgccttttccgccgccgccaagagctgccttgatgatcactggataaccgatcctctcagcttccttaagaccggtttcaatatcctccacatccccttcgctgcccggaactaccggaacaccagctgcgatcatggtgcttcttgcaatttttttattgcccagcatacgtatgacctttgatggaggacccacaaatgtgatcccgcatttttcacagagctccgcaaatctggcattttcagaaagaaagccaaatcccggatgaatcgcatccgcaccggaaaccatggttgcactgatgatctgttccatattcagatagctctgtgcagatggtcccggtccgatacagattgcttcgtccgccagctgtgtgtgaaggctttcctcatctgcctcagaataaaccgccactgtggcaattcccatttctctacaggcacggataatacgcaccgcgatctcgcctctgttggcgatcagtaactttcgaatcatacaatcaccttacccgatcataaatgtaagctcagcctctacggcaacctcgccatccacagatgccactgcagaaccaatgcctacaggaccctttctgcggatgatctttgtttcaagacggagcttgtctcccggagctacctttctgcggaatttacacttgttgatacctccgaaataagcggtttttcccttcatgtcctccagggaaagaatggctaccgcacccacctgtgccagcgcttctaccatcagaacacccggcattaccggctcctggggaaaatgtccccgaaaaaaatcctcgcggaaggtcacacatttatatccgacagcaaattcacccggctcataatcttcaatatagtccacaagcagaaacggatgtctgtgtggaatgatctcctcgatctgttttacatcaagatgcttcattctctatcctcctgaaacaataatttttcttattctctaattctgatctgaaggtacttatcggatacggaaaagcttctgaccgtattctaccggctgtccgttctccacatagatctctgcgatctcgccgtcaaaatcactttcgatctcattcatcagcttcatagcttccacgattgcaagaacctggcctttttttaccttgtctcccacctgaacgtaaggcggaagatcctgggacggtgcagcatagaaggttcctaccagcggagatgttaccaggctgcctgtctgatcttcctcgctctgtggtgcggtttccgactgctcagcacctttcaccccctgtgcttctgccacagtttttcctgtcactgccatttcatctgttgaaaccggcaccacaggatctttgcctgccgccggtgctgtattcactgccctgcggacttttccaccggtcattcctgctgccggaatgttttccacagtttcccccataacaccctggatgatctgcggctttccgtgttccatacttaaggtcagatctgctgtctcatatgtaaaggcagtaagctctgatgcagatacgtgatcgatcagttcaaggatctggttaaattccataggttcagtcctcctcatacttctttacaagcaatgttccgttgtgtcctccaaaaccaagggaattgctcattgcataacgaacttcctgttttgccggagcgccgatcatatagttcagatcaagctcctcctctgtttctgttgttcccaccgtctgatggataaatccgtccagaatggattttacgcatacgataaactcaacagctcctgctgcgccaagaagatggcccaccatggattttgtggaattgatctttacatccttggcagcgtccttaaacgcaagcttgatagctcttgtttcaaacagatcattgtgatgtgttccggttccgtgtgcattgatataatctacctgcgccggtgcaacacctgcttccttcatggcattttccatagcacgtgcggcgccgcttccgtcctcggccggagatgtgatatggaaagcatctgcagttgcaccgtatcccacaacctctgccaggatattggcatttctctttttggcatgctcaagctcttccagaacaaccacacctgcaccctcgcccataacaaaaccgcctctgtctttatcaaacggaatggatgcacgcagcggatcctcacttgtgctcagtgcagtaaggcttgcaaagcctgcgataccgatagggcagacagctccctctgtaccaccggcaagcattacatctgcatcaccatactgaatggcacggaaagcatctccgatacaatgtgttcctgtcgcacatgccgttaccacgttggtgcattttccttttgcgccggtagcgatagaaacatttccggctgccatatttgtaatcatcttcggaacaagaagcggatccactcttgaaggacctttttccataagcttcttctcattggtctcggtagcctgaagacttcccacaccggagccgatgataacgcctaccatgtacggatcttcctcttccatcttaagcccggaattttccactgcttccagtgcagctgctaccgcatactgggaaaaaggctccattcttcttgcagttctcggatccatgcgatcctttgccacaaaatctttaagctctgctgccagtgttgccttgtatccggtcgtatcaaaacgggtgatcggtccgatccccacctttccttcttttactccgttccagaagctttccacatcatttccgatcggtgttactgctccaagtcctgttactactactcgtcttttcatcaatctatcctcctgactccggggagccttctttacattgccattccgccgtctacgcgaagtacctgtcctgtgatgtaacgtgcaccgtctgatgccagaaatgcggctgcctttgccacgtcttctgttgttcccatgcttcccatggggatagatgccgcaatattttcttttactttgtcagaaagcacgtccgtcatatctgttttgataaatcccggtgcaatggcgttgaccgtgatccctctggatgccagctcctttgcagcggattttgtaagaccgatgatcccggctttggatgccgcataattggcctgtccagcatttccacgaaggcctaccaccgatgaaaggctgatgatccggccgcttctctgcttcagcatcattctggacacatgacggatgcagttgaaggttcctttcagattgatgtcaacaactctggaaaaatcttcctcactcattttcatgagaagtccgtccttcgtaactccggcattatttaccaggatatcaacacgtccgtatttttctgcaacagctttgaaaaaagcttcacatgcatcaaaatctgccacattgcactgcaggatatctgcctggccgccggctgcctcgatctctgcttttgtttcccgggctttttcttctgagccgttataattgatcactacaaagtttcctgcttttgcaagctccagggcgatggctttcccgatcccacgtgcaccgcctgttacaactgcgatttttttctctgacatatgaattcctttctgatgttatgcggtcatccgtgatccgcatttgttacctggcatttctgtctactgcactatgcctgctttatttttgattctttatctttttttccaatatttatactagttcctggcagaccttctctgcatcttctacggtctggatgttatatacttttacatttctgtcgatctttctcataaatccggcaagggttcttcccggtccgatctcaataaatgtatctactccctgacggatcatattttccacactctgctgccagcgcacggaagaagaaatctgtttttccagaagtgcttttgtttccgccgaatcttccacatactctgcggtcacgtttgtcacatacgggattttaagttcatgaagtgtgacaccctccagaacctttcccagttcttttcctgcagtggcaagcattgcggagtggaacggtccgctgacatttaacgggatcactcttcttcctccggctgccttcagcttttcagaggcttccgcaactgcctccgcaaggcctgtgatcacgatctggccgggacagttgtagtttgcaatgcttacatctgcaatgtctgcaagcacttcctcgatcttctctgtctccattcccataactgctgccatgcttcccttacctgccggaactgcctgctccataaggattcccctttttctcacggtagtaacagcatccttcagctccatgccgccggcagcttcaatagcgcagtactcgccaaggcttaatcctgcagttacatccggatgaagtcccatctcctctaccaccttctccatggcaagacaggtagtgaccagtgcagcctgtgtatattcagtcaggtcaagcctgtcattttcttcaaagcaaagtgctttcatatccagatccagccactcaccggcaaagtcgaaaacatcctttgctgtatcgtatttctcataaaaatcttttcccattccggccttctgtgcaccctggcccggaaagatgaatgctgtttttcccatttattattcctccacaagaaaactgtttttctttacagtctcttttgtctctctgatcagtcttgccatcagctccttacaggtcggtacatcctttaccatacctgcgatctgtccggacataacgcttccggtttttacatcgccgtcaacaacagccttcctgaggccaccaagtgtcagcatttccagttcttcaaaggatgcacctgcagcttctttctccagatattcctttgtcatagggtttcttaaggtacggaccggatgacctgtggtacggccggttactcttgtgtcgatatccctggctttcagaaggaattgtttgtaattctcatgtacgtgacattcctctgttgccacaaatcgggttcccatctgtacggcttctgcacccagcataaaggctgccgcgatcccacgaccgtctgcaattccacctgctgcaattaccgggatctttactgcatccacgacctgcggtaccagcgccatagtggttgtctcaccgatatgtccgccagactcggttccctctgctaccactgcatctgcgccacagcgctccattcttcttgcaagagctacagatgcaacaaccgggatcacctttactccggcagctttccatgcttccatgtatttttccgggcttccggcaccggttgttactaccttgattccttcttctactacgatcttcgcaacctcatcggcacttggactcatcagcatgatgtttacaccaaaagtcttatctgtcagttttttcgcctcacggatctgctcacgcacccactctgccggtgcgtttgccgctgcgatcagtcccaagccgcctgcctcggatactgctgccgcaatgtgatgatctgccacccaggccataccgccctggatgatgggatattcaataccaagtaattctgtaactcttgttttcatcttttacctccggaaaattaaatcaagcggataaaagcatccgcggtttatttggatcaagcggataaaaacatccgcattcactacgtagccttattttaacaattcattaacaaggggctttaatactcgatcaggcttgctccgtacgtcagtccaccgccgaagcctgcaaggaccattctgtcaccccgctgcagttttccgctttttttcatctcatccaggaggataagaagacttgcggaagaagtattgccgtatctgtccatattcatagggaacttggaaatgtcttcgcccagccgccttgctgcggaacggatgatccgctcatttgcctggtggagaagataataattgatatcttcacaggaaacctgctctcgggaaagaagctccttcacagcctccggtaccttgctcacggcaaagctgaacacttcctttccgttcatctgtatgtaggtttcctttgccttcggatcattttcataacggatctgatttctgctctgtaaggtaagtgcaccgcctttttttccaatggaatgggttacctgtgcatagcttccaccctcttctgctctcagcacgactgctcccgcaccatccccgaagagaatgcaggtgccacgatctgtccagtccgttaaaccggacagtttttccgctccgatcacaagggcattcctatatattccctgggccaggtatgcctgcgcagtgttcagtgccagaagagatcctgtgcaggcgccgttcagatcaaagcaagtagccttttccgctccgagccgctcctgcaccccacatgccacacagggcatgatctctgttggagaaatggttgccacaaggatcagatcgatttcttctgccttcatttctgcgtcttccagagcttttaatgctgcccccgctgccatcgtcacagtatcttcgtcctcttttgcaatatgtctctgtaccacaccggttctttcccggatccactgatcactggtttccaccatctttgccagatcattgttatcccacactctgtccggtgcccacgaaccggttccacatattttacctgtcatatttttctccatgatatctgtcttaaatcagtctgtataaatctgtactgctgttctctgaattatcttttatcttaaaatattttgattatcaaattatatcatcataaaagtatttgtcaagaaggaatttttgagcatccttttatgaaaaaaaataacagctgccccaggcgtggagtattggtctctcctctgtcctgtgacagctgtcttgttttttttcagacaggtattgtatttatggttattacatttatagttattgccttcataattttacttcattgcccactgtaccaggcacaccacaccaatctgcaccagcagtatcaccggtacaccaattgcaaatctggcttttcgggttttgtggtgaaaaaatctcatgccaaggatcgccccgacgctgccaccgatgacagcacttaagatcagagtcttctccgggatccgccatttattacgacgtgctttctgcttgtcaactccaaaaagcacaaaggccaggatattgactgcaagcagataataatatatgtaatcattcatgatagctccctccaggatctgtgtcctgtatttcggacagtaaccgatttatgtcttcattgcagtttgatgatcagcaccggtatgggcggatcattgggccggtttgcatattccgacaggatcaccagatatttatgaggatccagctgacggataaacgcaagcatctcatcccgttcctgatatcccgtatccccgccactgtaaatgcaaagtgtcataagtccgccttttttcagaagcttaagtccgctttctaccgctcttttgctgctgtctgctctggttgccaccgaatggtctccgccgggaagatatcccagattaaaggtgatgcaggacactgtttctgcttctgcataaacatccatattctcatgggattccagaagaagctgataattttccggacagttatctcttttcaggcgctcctccgtatgttccagtgcctgcttctgaatgtcaaaagccagaacccgtcccctttttcctgcaagctggcttaacagagccgtgtcattgccatttcccattgttgcatcgatacaaatgtctcccggcatgacctgctgccgtataaaatgctgcgtgtatgcagtgatctgaagatttttcatttaaaaatcctttcaaaattctcttacagttcatgataatacggacagatatcctcataatgtccatccttcatacggaaccccttcgggatcacgccaagctgggtaaatccaagtctctcataaagatgtcttgcaggaacattgcaggccacaaccgcattaaactgcaggacaccaaaaccatgctcttttccccgggtcaggcagtcggataccagcttttctcctatgtgaagtcctctggaatctctgcttaccgcatagctggcgttacagatatgaccgcatcttccgatattattcggatgaaggatgtaaagtccgtaaacttttccgctttccgcatctactgctgcagctgtataggtctgttctgcaaaaaaagcttttcctgtctcttcgttaaggcattcttcctgtggaaaagccacaccgtcttctacaacctcattccatatccggatcagatccggaagatctttttcttcgtattttcttacggtaacattcatgatgatcttctcctctatttaagcagctccacattccgtccgtttcttcggatcacaccctcatccgaaagatttttgatctcccgcatcatggcactacggtccacacttaaatactgggccagtgcagtataggacatgggcagcttgaatttcccggcatttttttccgcagccagagaatgcagataggctatcagcttcttcctggtggaggatcgtgaaagcatgtatatccgatctgtctgctgcctggaacgaagggccgtcatctgcagcagattactgaccatctggctgtgatgatgacaggcattttcacagcgcttgatcacatgctcataatcaataaacagcactttcgtcacggtagtggcacacacataataatgctgggaatctgacgaaagcagaaacggttcgccaaatacactgtccttattcaattcatcgatgacatactcatttccatcctcgtcacagcagtagagaactgctcttccctcctggatcagaccgatctttttcatggagctggaatattccattatggtttctccattctgaaaaactttctcccggactttgaaacagacacgcatcctttcctgttcttcgggcaaaatatccgtaaataaagtgatatgctccataaattttcctcccaccggcaaaatactcttccgcatatctgtacctttctctctgcatacaggactatgtaaaaggactctcaaagcagatatccgtattttattttgctgcatgtttctgattttataccagcacaaaaaaaatgtaaagtctggaatttttttctgttttgttgtatttgcaacagtttttgttgtcgatttctgttatatttttatcaaagttaagaaacaaacaaaacctgaagcatataaataaatccaccatagaaagaaaagaggaatcgctcatgaaaatcacagataccatcaaatatgtaggcgttaatgatcatcaggttgacctttttgaaggccagtacaaagtgccgaacggcatgtcctacaactcctatgtgatcctggacgaaaaaattgcggttatggatacggtagatgcaaattttactcacgaatggcttgataatatccagaaagttctgggtgaccggaaaccggattatctgatcgtacagcatatggaaccggatcatgcagccaacatcgcaaacttcctgaaggcttatccggacaccatcgttgtttccaacaaaaaagccttcgccatgatgcagaatttctttgacctggatctggaaagtcatcagatcatcgtagataacggcggaaccctttcccttggaaaacacaatctgacttttgtatttgcaccgatggttcactggccggaggttatggtcacttatgacagcacagaaaaggttcttttttccgcagacggcttcggaaaattcggtgccctggatgcagatgaaccatgggacgatgaggcaagaagatactatatcggcatcgttggaaaatatggtgtgcaggtgcagaatcttctgaaagtagccgcaactctggatatccagaccatctgcccgctccacggaccggttcttactgaagatcttggacattatatcagtctctatgatacctggtcttcctatacaccggaggatgacggaatcgtgatcgcctacacttccgtttacggccacacaagaacagcagtcgcacagcttgccgataaattccgtgccaaaggatgtccgcgtgttctgatctatgaccttgcaagagatgatatgtcccaggcactgagcgatgctttccgttactccaagctggttctcgcaaccaccacatataatgcaggtatctatccgtttatgaacgactttattacccgtctggcagagcacaacttccagaaccgcactgtaggactgattgaaaacggaagctgggcaccgctggcagcgaaggtcatgaaagaaatgctttccaaatgcaaaaagatcaactggctgaataccacagttaagatcatgtctgcagtaaacgaagaaaaccgcagacagatggaagctatggctgatgagctctgccaggaatacattgcaaaaagcgatgatcttgccaacaaaaatgatatgaccgctctgttccgcatcggttacggcctctatgtggtaacctccaacgatggcaaaaaggacaacggtctgatcgtcaataccgttacacagcttaccgacaacccatatcgcgtggctgtcaacatcaacaaggcaaactactctcaccacgtgattcagcagaccggtatcatgaacgtaaactgcctgtccacagatgctccgttctctgtttttgagcagttcggcttccagtccggcagaagcaccgataaatttgccggccagaaagtaaaccactccgacaacggcctggtattcctggacaaatatatcaatgctttcatgtccctgaaggtagaaaactatgtggatctcggcactcacggaatgttcatctgcagcgtcacagaggcccgcgtcatgagcgatcaggataccatgacttacacctactaccagaaacatgtaaagccaaagccacagaccgagggcaaaaaaggctgggtatgtaaagtctgcggatacatctatgaaggcgatgaacttcctgaagatatcatctgcccgctgtgcaagcatggcgctgtggattttgagccgatcgaaggataaggcaaaaatccggatcagctgatcttatccggttacaactcccttgtttttacaaattataaaccttataaactgcaaaagacaggtctttgaatggcctgtctttttgcggtatcgttctcttcaatatcttttatttcatcagtctgataacctgctctgcagtatctgccagattctgctttgcattctcatttttcatggcctcctccagagttaccactccgcggaggatcgggaaaaaggcatcgatccctgcatcgttgcaggctcttgcgtcacgctgtacggcacctgcaaaggcgatcacttttttgccatatttctttgcaagctttgcaacacctaccggcgcttttcccatggctgtctgtccatccatacgtccctcacctgtgatcacaagatccgcgtctttgatgtagtcctcaagtttcgtctcatccagcacgatgttgatcccggattccaggactgcatcggtaaaggtcaggaatgcaaatcccattccgccggcagcacctgttcccggatactttgcatctgctttcggaaaacgctcctttgcaagctctgcgtaagcacccagccactgatccatgtcctggatcatctccggcgtagcacccttctgcggtccgtagatggaactgcatccaagctctccgcaaagaggatttgtgacatcacaggcaacacggaatttacattctgcaagctccgggatcacatagacagctgtgatctctgtgatgtctttcaggccccttgctcccggaaggacctgctttccgtctttatccagaaatgcatagccaagtgcctgaagcattcccacaccaccgtcattggtggcgcttccgccgatacccacaataaatctgcggcagcctttttcgatggcgtccttgatcacctcaccgacaccgtaggttgtggtataaagaggatttcttttttcgtccggcacctgcgtgatccctgctgcaccagccatttcgatcactgcggtctttgtgctttcgatgatgccatactcacagatcaccggctcgccaagaggccccgtaacctttacgtgctctgtttttccgttcattcctgcgacaagggcttccacggttccctctccaccgtctgccagtggtcttacctgaacttctgcgtccgcatccacacgatggataccttcagcagctgcaaagcctgcctccatggatgtcatactgcccttaaaagaatcgatcgctgttactaccttcattttattttcctcctgtatgatttttatgtaaagctgatatccgtactctccgttctatcattccgtgcaccggaaacgtgaaatgttcctttacgtgtcaggcggatattctctgcgcagctctgcagccaaataactgttctgctgtttggttatcagctgtccccggatgaaaagaaccttctgcgaacttatttttccctggaaatgtctctggctgatgccgcagagaagctttttctccacaaaaatactcttcaatataaattaaaccacatttataaaaaatgtggtctcaatccccgaaaattccgggacgctgttctgttgtatctggcactggagctggaatgaaccggccatttcactatcctctcacatgaaagccaaactcctcctccagtggaatttccctcgcttcaatcccctcgatctccacaaagctctgctgagaaaggcgttctaccatctcccggatttcttctctggttccctgtacttccatttccacacgatcatcccagagattccgtacccagccggtcagtcccatggactgtgcaatataataggagcggtaacgaaagcctactccctgtactcttcctgaaaaataaaaatgtttccgaatcttttccatctggcacctcatattttctgtcttaactattctgtctctgtatcttcacccaaaattctcccgcatccaccgcaggaatatcataaccagattatataatatttctttataaattgtaaagttatatccttctatctattggaaactataatcatctgcgttataatggtttttatcagaataaaaagaaatttactttcttttgcagaaaatattttcaacaaaatttaacatcaggaggtaatgatcatgaatgaaagcatcaaaaacctgttagaacgcagaagcatccgcgcctacaaaaaagagcttgttccgaaagaaactctggatacgatcctggaggcgggagaatattcccccagcggcatgggacagcagagcactcttatggtagtgacacaggatccggagctggttgcaaggctttccaaaatgaacgcagctgttatgggcagcacctcagatccgttctacggcgccccaactgtgatcattgtcttttccgacagcaaaatgggcacctgtgtggaaaacggaagtcttgtgatgggaaatctcatgaatgccgcacatgctctcggcgtggactcctgctggattcaccgtgcaagagaagtttttgactccgaggagggaaaagagctgaagaagcagtggggtgttccagaagaatatatcggcgtaggccactgtgttcttggataccgtgactgtgagtatccaacagccaaaccacgtaaggatggttttgtgatccgcgtgtgatcgtcttgcaaataaaatttccactgccaaaaacttttaatgtaaataaaaatctgacagattcctgcatgatacg

SEQ ID NO: 301 - DNA, 8011 bp, Unknown
  gut microbiota DNA sequence
tgaaagaaagacttcaggaactggctgaaaatgccagaaaacggatcgaggaatccgagggcctggataagctgaatgatgtgcgtgttgcatatcttggaaaaaaaggtgagcttactgcaatcttaaaaggtatgaaggatgttgctccggaagagcgtccgaaggttggacagcttgtcaatgagacaagagctaagatcgaagaacttctagaagcctccaaaaaggatttcgaggagaaggtccgtgaggaaaaaatgaaggcagaagtgatcgatgtaacacttcctgcaaagaaagcgaagatcggtcatcgccatccgaatactatcgcgctggaagaggttgagcgtattttcatcggaatgggctatgaggttgtggaaggtccggaggttgagtatgcggactacaactttacaaagctgaatattccggaggatcatccggcaagagatgagcaggatacattctttatcaatgattccattctgctccgttcccagacatcaccggtgcaggcacgtgagatggaaaaaggcaagcttccgatccgtatgatcgcacctggccgtgtattccgttctgatgaagtagatgcgacacattcaccttccttccatcagatcgagggccttgttattgataagaatgttacgtttgcagatcttaagggaacccttcaggagtttgcaaaagagctgttcggaccggagacaaagaccaaattccgcccgcatcatttcccgttcacagagccgagcgctgaggttgatgtttcctgcttcaaatgcggcggaaaaggctgccgtttctgtaaaggttccggctggatcgaaatccttggctgtggtatggttcatccgaatgttctccgtatgtgcgggatcgatccggatgagtatacaggatttgcctttggtgtaggtctggagcgtatcgcacttctgaaatatgagatcgatgatatgcgtcttctctatgagaacgacagcagattcctgaaacagttctaaaacagtgaacacggatcatgagtatccgtctgacagtaaatatagaaaaaagaagggacaaccaaaatgaatacttcattatcttggattaaaacatatgtgccggatctggatgtaacggcacaggaatatacagatgccatgaccttaacaggcacaaaggtagagggctttacagagctggatgcagatctcgataagatcgtgatcggccagatcgataagatcgagaagcatccggatgcagataagctgatcatctgccaggtaaatatcggaactgagagtgtgcagatcgtaacaggcgctccaaatgtaaaagaaggagataaggttccggttgttcttgatggcggacgtgttgcaggcggccatgatggaaaaatgactcccggagggatcaagatcaaaaaaggcaaactccgtggcgttgagtcctttggtatgatgtgctctatcgaggaacttggaagcaccagagaaatgtatccggaagcaccggaatacggaatctatatttttcctgagaacgcagttgtgggtgagagcgctgttaaggcacttggccttgacgatgtggtatttgagtatgagatcacttccaaccgtgtagactgctacggtgttcttggaatcgcaagagaggcagcagcaaccttccagaagaaattctgtccgccgattgtagaggttaaggaaaatgatgagaaagcttccgattatgtaaaggttactgtagaggatccggagctttgcccgcgttactgtgcaagagttgtaaaaaatgtcaagatcggtccgtccccgaagtggatgcagagatgtctggcttccaatggaatccgcccgatcaacaacctggttgatatcaccaactatgtaatggaagagtttggacagccaatgcatgcatatgatctggataccatcgcaaatcaggagatcgttgtacgccgtgcaggaaaagatgagaaattcgtcacactggatggccaggagcgtatcatggatgagaacgttctgatgatctgtgacggtgagaaggctgtcggcatcgcaggtatcatgggtggagagaattccatgatcacagacgatgtaaaaacggttctttttgaggcggcgtgcttcgatggaaccagcatccgtctttcttccaagaggatcggacttcgtacagatgcatccggtaaatttgagaagggtcttgacccgaacaatgcacaggctgcaattgaccgtgcatgccagctgatggaagagcttggtgcaggtgaggttgtaggcggaatggttgatgtctgcagcgagacaagagagccatccagagtaaaatttgagcctgagaagatcaacaagcttcttggaaccagccttacaaaagaagagatgatcgattatcttggacgtgtagaactggcttatgatgaaaaaacagacgagatcgttgcaccgacattccgtcaggatatccactgtaatgcagatgttgcagaggaggttgcaagattctatggctatgataagatcccgatgacacttcctacaggagaggctactacaggtaagctgccatttaagcttcgtatccaggaggttgcaagagatatcgcagaatactgcggattctcagagggaatgtcctattctttcgaaagcccgaaggtatttgacaagctttgtattcctgaggacagtgatcttcgtaaagtcatcaccatcagcaatcctcttggagaggactacagtatcatgcgtacaagcacactgaacggtatgctggcatccctttccacaaactataacagacgtaataaagatgttcgtctttacgagcttggaaatatctatcttccgaagtcccttccggttacagagcttccggatgagcgtaccatgtttacacttggaatgtacggaaaaggcgatttctttgatatgaagggtgtatgcgaggagttcttcgagaagatcggaatgaagaaaaaggttacctacgatccaaacagcggaaaaccattccttcatccgggaagacaggctaacatgatctacgagggtaaggtagttggatacttaggtgaggttcatccggctgttgcagataattactctatcggagaaaaagcatatatcgcagtgattgacattctggatgttctggaatttgctggtttcaaccacaaatatacaggaattgccaaatatccggctgtaactcgtgacctgagccttgtagttccccatgcagttctcgcaggacagattgaggagatttttgatcagagaggcggaaatattcttgagagttatcagctgttcgatatctacgagggcgcacagattgagaaaggtttcaaatccatggcttattctctggtattccgtgcccatgacaagactcttggtgaaaacgagatctccgcagcaatgaaaaagatcatgaatggtcttaacggacttggaatcgagctgagaagctgatgctgatctacattgtaagacatggtctgactgagtggaataaattaaaaaagcttcagggtgcagcggatgtacctcttgcgaaggaagggatccttcttgcagaaaaaaccggagaagctctccgtaatgtgaagtttgatatctgttttacaagtccgctctcaagggcaaaacagacagcagaatatgttctggggaaacgtgatgttccgatcataccggataagcggatccaggagatcgattttggtgtgctggagggtgatcaggtaagagatgcagagggcaattatatcgatccgcagatcgagacttttttccgtgatccggtaaattttaaacgaccggaaaagggcgaggatatttttgatgtgatcgccaggacaaaggatttctgggatgaaaaaacatcagatccgactcttgcggataaaacaattcttgttgcctctcatggatgtgcagtccgtgctcttcttcaaaatgtagatcctgatccgaagaatttctggagaggctccgtgccgcctaactgctgtattaatcttgtggaagtaaagaatggaatgacaacacttctggaagaagatagagtttatgcatagaaaataatgagaaacgcagaataactgtaatggctgttctgcgtttctttttttgcttgtttttattggtggaatttcacaggttatgattgactaattgagataaaatgagataaaatatataaaaataatgaataattcagaaaaataaaagttaaactttactaattatataaagaagcagaattgtgttggaattatatgaaatcatttaaccaagtgcggattgcgaatatccgcctacggatagaggataattactgatagtgatgtgatatgtggaatggggtgagtgtatgcagtcattaaatgagacaaaagcaggagaaagctacacgatcaagtggatgaccggaatgccggagactatggaacagatcaggcaatatgatgtcagtgaaggaaagaccgtacagatcataagcaagatacttggcggagtgatcgtaggtgtttgcggacgcaggatcctgatcagcgatgatgcagcctgccgtataaaagtctaaataaaagtataaaatagaaaaaagacgaaaggacaattcttttggcgaaggaattgtcctttctggttgttttagggaagatgttatggtagtatggggacaaaagaataacttttttcaaaagtaaagacaggggaggcatattatgggaaaaaagtttatgaatacagtgctgtttctggcagtaacagtggccgcggcaaccctgactgcttatgttggaaaaggctccgggaatgtgttgctttataattttacatttctgggacttatgctgatcatatacgcagtggggctttttgcaggtttatatcggatggataacctgtcaagagcactgaagcatggcgctggtgagatcacagaagtgtttcagcttccgggaagagccagaaaagaagagattggacagctgcgagggattttcggtgaccgctatctcgataaaaagatggatgattttgttgacagcatcagcagaacggaagaaggaatcgctgaagtagaggattttgtgaatattgaggatgtagatgtacatattcacaagagactccttgagatggctccggacatttttacaagccttggtatccttggaacatttatcggtcttgtgtggggacttaagaattttcagcccacgaattatgaagtgatgacaagctcggtgtccgctcttgtggatggcatcaaagttgcgtttctgacctccatttatggagttgcactttctgttgtgtacacatttgggatgaaaagcggatattctgcgatgtcccaggcaatgcaggattttctggatcgttttcacgcactggtgctccctactgcggagaatgagtcctggaatctccttgtttccagccagaagacacagacagaagccatgaaacagatggcggaacagttttcagtgcagatggcagatagctttgagaaagtgatcacacctacttttcagaagatgaatgattctctggacgttcttaccgcatctgtgacaaaagggcagcaggatgcgatccgggaaatcctggatacgtttttaagcgagatgcatggttcctttcagatgcagtttgaagattttaatgatgctctggcagaacttaagaaggtgcagaaggagaatacagaatatacatcagaattgtacaagaccatgagcagtcagctgagtgaaacctttacgaagcaggaacgtgccatgaaggatgccattaaggaaatcgatgagatgcagagcagttatatgaagactgcagatcgtattatccgggataatcagatgatccagcagctacagaaacaggattacgaaaagtttgcccggcatatgcatgaaaatgaaaaagaatccgcagatctctggaaaacctgcaatgcatctatgcgccagtatgtggacagtgctgcagaagggatgaaagcagttgcggattccaataggatcagcgaggagcttcttcgtgaagataagaagatgatcgaagattttgaagccagagtgaaagaatttaccgagagccagaagatggtcaacagtgttctggatgaggtgcgcaggcttctttctgagatcaagacggcaaaaaataaccgtgatatccatctgatcgccggacagccctggggctatggaagcaatgccggtatccaggaacttaaggataagctgacgggtctggaggatcttctggaaggacagggtgcaagacaggaagcgctgctggatgagattgagcgcagtatccgtgaggcaacgaaggcagcacagaaaagccgttttggtttatttaaataagagaggaattgtcaatgcgcaaaaaaagaaagccggaggagcatgggtttaatgtctggcgttcttattcggatatgatggcaggagttttgctgctttttgttctgatcatgtgtgtgacactttttcaggcacagaagagctatcaggacagtctgaaggaacgggatgaaaaaatcgctcttcaggaaaaatatacagaagagcttctggaaaaacagaatgcgctggatgagcaggcggggacattaaaaagccaggatgagcagatcaagtccaaggacaagcagatcaaatctcaggatgaagaactgtcttctctggcggagaagcttgccaaacagcaggaaacactggaggcacagcagaagaagttgaaagaacagcagaaaaagctgtcctctcagaaaaagaagctttccagtcagcaggatacactgaaagagcagcagtctgcgctggatgaaaaaacagagcttctggaagagcagcaggagaagatcgacaagatcatcggcgtgaaagcggaggttgtggaagctttgcagaaggaatttgagaaaaagaacctcaatgtggatattgatccacagacaggtgcgctgacgttgaatgccaatgttatgtttgattatgatcaggcagagcttaccgattccggtaagatgacattgtctatggtactgccgacatattgtaaggtattgctggatgattcctataagaaatatcttggcgagatcattattgatggttatacggatacagacggagattacagttataacctggagctgtcacagaagaggtctctagcggtagcgcagtatcttttggatattaagagtgattttctgaaggattcacaggttcaggaactgaaggattgtctgacagtgaatgggcattccatgtcagatccggttttggatgcagaaggaaatgtagataaggatgcgtccagacgtgtagaggtaaaattccgtttgaaggatgaagagatgatccaggaactgaataagatcatgcagggagattctgcagagtccgacagtgctgctcagaaaaaagaaaaaaatcaggaagaaaatcaggataataagcagtaattaaatatggctgctttatatttggcaggggattatctgatgaattttctgacattggttacggttggaagggattgccttgacagactgagttatcggttccaggcggatttttctatgaattatgaagcttgtatttcgggatgtaagtctaatgcagtgtatgggaagtgattgaggtttaactgaatcaagtaagtccgttgcgggtctgcgaaaagcgatgagctgttattcggttatgagcaagtagcgaagtggattgtgaatatccgtttgacatatgttcttttttctctggtgtctggtagtgttgtatttgctgggcgccggggattttttgttttgttggagatatagagtgacgctagagaaaggtggaatcggtctgtgtggtggatggagagagggacgccagaggaaggtggcatcggtccggggttagatgcagtcgtggatgctgttgaggttttgt

SEQ ID NO: 302 - DNA, 181 bp, Unknown
  gut microbiota DNA sequence
gacccgggcagggactccgtcgggggatactactaggactccgtgagacggctaaaagcattgcggcagggtcagggctcagacagcagaccctgccgcaataacgccgcctcccgcagcccaagtagtaatcacccctcctccgcagcagcccggcccgatgccaccttcctctggctga

SEQ ID NO: 303 - DNA, 160634 bp, Unknown
  gut microbiota DNA sequence
cgacagacctcaacgaggtctcggtattctaactccaatggaataccatgacatgcttatggcagcataaaaatgctacccagcatgatctgggtagcaaaaaacctatatttttttaattgtctacttgacggggcgcacaccagtccaaacacatcggctcaatcttttgacctgatcggtcattattcatttttttcttactggctcatatagtccatttttcataatgagcaaaataaaaggcactgactgttttttatggttaatgcccttttgcgttaatcacttttaaattattcgtccaacatcaacttgcctttcttagccttatttttttatctctgcatttgttctttttctatctgctggatacttttttccggtgttggcaaatcttctagcatagttcctccaatcttttctatcgcagttcttacctcttttccaacattataatgcactgatattgcggtttccgcaccgacaattttatcttttcttagttttcttttgtcttcacgtagcgaccactcttgattcttgcgtcagctggcttttccgcatccgctgaaatcgcccagtatgaaccgattttcgttgctccgggaattcgtccggctttacaaagatcactgatccaccttgccgaaaggttccatttttccgctgtctgtctgattgataaatagcccatacaattctccgatctaatccgagcaaattctacatgtaatcacaataattgtactccaaacctcgcggaaaatcaagatattctatcctcgttaagctttagctttcgtgcccccactaattcgcaagcagggctttcgtgacatgaaagcgattttctgcttgttggggaaactctccaatccccatagaacactgcctgcggcatcgggctactgcgtctccgttccactccggtccgcgcaaagcagacgtccaccggacgtcttgtaccgtttcggatgctttaacggcattcctgccaaagaaaacgccggagtgaatcatcaccccggcttcaaaaagtatttacttgtgcttgcggcctccacgctttttgtagtcctcgtctatacgctttttccagtctgcactcagcggggcactgcagcggggcactgcaccggacagagctgattgcttcgctgaccacctcataattcaacgcggttccttcactatcgcactgatagttgactgcacgatctgcaccgattccgaactggcttgcagtctctactgcgtcaatattggcaccaaggaacaaaaactcccaaccgtatttcgctttctgccgctcgatcatctgcttcactttttcgctgttgtaccggcggctggcattttccattccgtccgtagtgattacgaacatggtgtgctctgggacatcttccggtcgtgcgtacttatgaacatttccaatgtgatgaatcgcaccgccgatggcatctaagagtgctgtgcatccgcgaactatgtagtcacggtcagtcatcggtcggatatcctttacatttacacggtcgtgcaggacttcgctcacattgtcaaacagcaccgttgagatcagtgcttcgccctctgcttttttctgctgctcaatcatggaattgaatccgccgatggtatcccgttccaatccgctcatggaaccgctgcggtctaagataaaaacgatctctgttaaattttttctcatatgcttgtcctcccaaaagattatggctactcggtttcgtaccttacagccataatatagcgattttcttttgtgaagtggtcgcatagaaaacgacatttctttgtccttatgccccgatcaggctctggtcaaaagcaaacaatgcctcgttaatttcatacacattgtagtttccccgttcgacaaaatattctacaatgatatcgaatttgctcgaatgggaaagggtaaatcctgccttgccgagcatctcctgcatctgggcaagcggcagctccaaagcgagagcaaatgccagcactgttggtttggatggcttatagaatttatcagaacgaattttggaaaagagcttccggtcaatgtttgccttcttgtagcactgaacatccgtcatgccgctttcgtcaatcttccgcagcagcatttccgaaaagctctcatcaatctgccccagtgcctcctccagagattgactgctgcaagatttacagattgcttcggacggcagcggggcagatgcagcttcaaagcaggattcctctgacaacgcttcaagccgccgtctctgttctactcgactgtcggtatgttcatccacataccagtcatctatgtacgccgcgatatcagcaaacagttttccgctaatctgatatgccttcttatcaaagataacgatgtagaccatcatctcattttccagtaagaatgcactgatggtatcgactgcaaccttcagagcctggtcttttggatagccgtagatgccggaggaaatcagcggaaaagccaccgcctgacagccattttcttttgccaggttcaaagatgtccgataacaggattccagaagctgttgttcctgatgcttgccatctcgccagcgcgggccgactgcatgaatcacatatttgcagggcaggcgatatccctttgtgatttttgcgctgccagtctcgcagccatgcagcgtactgcattctgcaagcagttccggtccggcggcacgatgaatgcagccgtccacaccaccgccgcccaaaagagaagtgttggcagcattgacgattgcgtcaacgcgcatttttgtaatatcgtttctgataatctgtaacggcatgaagcatacctcccattcgtccgatcagagtccttgtctgatcaaatatctattaaagtgtctcatacattgctttcaattttttcggcgctacaccgttcctgcaaatacactgccataaagggcaaatatatttgcttcccgtccgtattgttctatgctataatactattgttgtccaaccgaaacccgacaacgggaggaggtgaacctcatggaatttattatttctttctttgtctcctgcatggctggtgtagcctgccactacatcatcaaatggttagacggcgacaagtaaggacagcactgacctagtggtttcttgtccactataaaaaataagaagaagccctcagtattcgcggtactgggggcttcattctttttgtcctcatggacttattatttcttttgcctactggcattatatcatacacaatttttctttgcaatatactcaatatattttttaaggtgttttgtgcgctacgtgtgttctacacttcaaaatcgacccctttttagaaaattttagaaatttcagatataaaaaaccccggaaaatcaaggctttccgaggttttaataaatttccgtattcgattggaattatcgcttgctgaactgcggagcgcgacgagctgctttgagaccgtacttcttacgctctttcatacgtggatcacgtgtaaggaatccagcagctttaagagctggtctgtagtctttgtctgcctcaaggagtgctctggaaaggccatgacggattgctccagcctgtcctgtgtatccaccgccgtgaacgttaacgatcacgtcgaatttaccctctgtctctgttaaagccagtggctgacgaacgataactttcagagtctcaagtccgaagtactcatcgatgtctcttttattgatagtgattttacctgttccaggtaccaggtaaactcttgcgattgatttctttcttcttcctgttccgtagaattttgcgctagccaatgttttctacctcctattaaaatgttaaaacttcaggcttctgagcctcatgtttgtgctctggtcctgcatatacgaaaagtttcttgttcatagctcttccaagaggtcctttcggaagcattcccttaactgcgagctcgataaccttctcaggtttctttgctaacatttcttttaatgtggtttctttcattccaccaacatagtcggagtggttataataaatcttctgctcaagcttcttgcctgtaactttgatcttatcagcgtttacaacgattacataatctcctgtgtcaacgtgcggtgtaaactgaggtttgttctttcctcttaaaacacttgcaacaccggatgccagacgtcccagagtgcaaccctctgcgtcaactacataccattttctttcgattttatccggattagccatataagtctgcatggtcctacctcctgttatttatcaacgataatgtttctcaaaccgcggtacttccgcgaaaaaaagtaaatggaaacgcgggtgcaaaataaatcgcggaaatgtccgaaaccgctgataaaatgccgtcgccggggctattggctcaagcatcttcgcactacgtcacattgagttattatattataaggcaccttgcctgtcaactgttttttcttgtaattttcaacaaaattcctgttttcagaaaaactcgattcccatcagcgtcaacccctgagccggagctgtggggcctgctgccccgcggtcacaggctttcaggatcttatccatgcgttccggcggatactgaccgtttccgatctcgatcagggttccggaaatgatacgcaccatattgtaaaggaaacctgttcctgaaatgcggatggtcaccatgtcaccatctctccacacgtccatggaggtcacggtacggatggtggtcttcacctgtgcgccggatccgcagaagctggcaaaatcatggcgtccgatcagataagatgttgcttccttcatcttatccacatccagtttataatggtaaaaataagagtacaaacgctccgttggcaccggaaacttccggttcaggatacgatattcatatgttttttcactgtcacagtaacggggatgaaaatccggctccacctcctcagaaagctggacacggatatcctccggaagtctctggttcagtgcataggaaaatttttccccggggatcctggattcggtatcaaacaccgccacatttccaagagcgtgcactcctgcatctgtacggctggcaccgatggtctcgatcttttccccaagcagctcacttaaggtatcgtttaaaacgccctgaatggtgattccatttggctgtgtctgccagcctgagtacttagttccatcataagctacaacaagtcctactcgtttcataaaatatattccctcctgatacagacatccctgcagtactttctatcccaaaacagacataccgtcctgcaaaatgcctgcctgatccggttacagttccgctgtgcaaaatgcagcgcttcggaccgttccatgtctgagtaccggcaggatttggttacagtcccgccacacggaatgcaacacccaccgcaagatatgccacaaggattccataggccgcataatctcttttttcataatgcagcggcttcatctgggttctgtgctctccaccatggtaacaccttgcttccatggccattgccagatcattggcgcggcggaacgccgaaataaacagcggcacaagaaggggtaccatatttttcgccttctggatcaggtttccgttttcgaaatctgcgcctctggcaatctgtgctttcatgatcttatccgtctcctccagaaggattggaataaagcgaagggcaatggacatcatcatggcgatctcatgtaccggcacccggatcttgttcagcggacggagcagtctctccagaccatctgtcagctgattcggcgtggtagtcaatgtcatgatggaagatccgatcacaaggtaaacaagacggattgccattcttcctgcaagaacaaggccttcccttgtgaccttgatgatcccgaaacgccacagcacttcgccaggtgtcaggatgatattgaacacaaccgtgatcagaaggatcataacgatggctttcagacccttgaacatgaatttcaccggaaccttggatattgcgatcatggctaccagaaatgctgttgccaccgcatatccgagaaatgtatggaacaggaacacagagatcagaaatcccagagttcccagaaatttggtccgtggatccagtctgtgaagaacggatttggccggataatactggccaatggtaatatctctgatcatttttccgcccctcctttgttcagtaatggagagttcgcctgcgcaagtgcgacaaggatactgtctctggcttcctccaccgttgtggcatctgcatccacatgcagcccatgttccttcagcgcatgcatgatataagtgatctgcggtgcggcaagtcccatggtttccagttccttataatgggaaaaaaccttctttggctcatcatcaaatacagcttctccgtgattcataacaatgaggcgctccacgtatttcgcaatatcctccatgctgtgggaaaccagaacaatggttatccctcgcaccttatgaagctctgcgatctgatccaggatatcatccctgcccttcgggtcaagccctgctgtgggctcgtccagaatcaggatcttcgggttcatggcaagaacccctgcaatagctaccctttttttctggcctccggaaagctcaaagggtgatttcttgaaattggactcttttactccaacctgagtcagcgcctgcttcgcttctttctctgcttcttccctggaaagtccctgattcataggtccgaagcatacatccgagatcacatcattttcaaacagctgatgctccgggtactggaacaccagaccaacctcgctgcggagctgtttccggtcatatttctcagcccacacatcttctccgttatacagaacctggccggatgttggctgtaccagcgcattcagatgctggatcagcgtggattttccgcttcctgtgtgtccgatgatcccgataaactggccgtccgggatcacaaggctgacatccttcagcgcatgactctcataggctgtcccggggctgtaggtataggttacattttttaattcgattgacataatgcgctcaccagctcctctgtagtcagtattccatccggaacatccacgccggatttcttcagttcatatgcaagaagtgttacctgtggtacatccagtccatacgccttaagggtatccacctgggaaaagatctctttgggatttccctgcatcacaacatttccgctgtccatgacataaacacggtcagcatggatcacttcctccatgtaatgggtgatcagaatgactgttaccttttccttacggttcagctcccgcactgcctccaggacttcctttcttccgttaggatccagcatggcggtaggctcatccagaatgatgcaccgcgggcgcatggccatcacgcctgcaatagccactctctgcttctgccctccggaaagcttgtttggggactgataacgataggctgtcataccgactttttccaggctgtcattcacccgtttccagatatcatctgtaggaactcccatattttccggaccaaagcctacatcctcttccacaacggttcctatgatctggttatccggattctgaaataccattcctgccttctggcgtaccttccagagtttggtctctctggcggtatcgatcccgtccaccagcatcgttccctctgttgggatcagaagcgcattcatatgcttcgccagtgtggattttccggatccgttatgtcccagaactgccacaaattctcctgctttaatgtccaggttcacatcattgactgcacgctgcatgtctaccacattgccgtcatcatcgtatctctgatagtcaaatcccagcttaagcgccttgataattcccatcttttctgctctccttaatcctctgtagctgccggttcaccaaggccggtcaactcatcgatcagtgcccatatctcgtctcttccctgcttcgtctccgcagaaaacggaaggatctttccctctttcgaaaggcccagtccgatgcggatctccttcaagctttttgccacctgactgcgtttcagcttgtcaagcttggtcgcgatgatcaccggttcatatccgttgtgacagatccagtcatacatctgcttgtcattggcggaaggcttgtggcggatatccaccaggagaaaaaccgcacgaagctctttggaattatgaagatagccctcgatcatttttccccatttttccttctctgccgcagaaaccttggcgtagccgtagcccggcaggtctacgagatacattgcttcattaatgttataaaaattgatcgtttgtgtttttcccggctgtgcactggttcttgccagggtcttgcggttcatcagaccattgatcagggaggatttccctacatttgattttcccgcaaaagctacctccggccttcctgtgtccgggatcttgcttgtgatgccgcagacgatatccagcgatacgtttttgattaccattcgttattcctcccttttcttttaaaagccctgtcctgaaggtcagggcagggtttttctgttttttgtttatgcaagagcttcaccgagaacttctttcatgttatccacaaaccggatatccagtccctggatgatctctctgtccatctcctcgatatccggacgatttttctccggaacaaggacttctttgatcctggcatatttagctgcaagcagcttctctttcagtccgccgatcggaagcacacggcctcttaaggtgatctcaccggtcatggcaagatctgcacgtaccggtttttcgataattgcagacagcatggcagttgccattgtaatacctgcggacgggccatccttcggaacggcaccctccgggatatgtacatgcatatcatgcttctggaaaaattccggatcgatctcatattggtcagaaaccgaacggatatagctgatacctgcctgtgcagattccttcatcacatctccaagctgtccggtgagaagcagctcgccttttccgggcatgatattgacttcgatctgcagggtatcaccgcctacctgtgtccatgcaagaccgcgggcgatcccgatttcatccttctcattggccatcagatagttatatcgttctttgccaaggaatctggaaatatttctggatgtgacaactaccttatccttaccctcttccatgatagcacgtgcagtttttctgcagatacgtccgatgcttctctccagagaacggactcctgcttccttggtataattgttgatcagcttgccaagagctgccggctggatcaccagcttgccttccggaataccattgatctccatctgcttcgggatcagatgttcccttgcgatatgttccttctcattttccgtatatcccgggatttccatcagctccatacggtcaagaagaggtctcgggattccctgaacatcatttgcagtggcaataaacaatacctcggaaagatcctggggaatctccacatagtgatcattgaacttactgttctgctccggatccagaacctccagaagtgctgcggaggtatctcctttataatcgctgctggtcttgtcgatctcatcaagaagcatcagcgggttgctgactccggcttccttcagtgcgactgtgatccttcctggcatggcaccgacgtaagtctttctgtggccacggatctctgcctcatcacggacacctccaagacagatgcggacatatttcttgttcatggcctctgccacagaacgtgcaatggaagtttttccggttcccggaggtcccaccagacagaggatcggactctttcccttgtgggtcagcttacgtacagcaaggaattccatgatacgttctttgacctctttcagtccgtaatgaccctcttccaaaaccttccatgcgttctcaagatcctcggaatcctcggatttcttattccacggaagtgcaagaacggtttccagatagcctctctgcaccgttgcctctgcagcactggctgccattcctttaaaacggctgatctccttggaaatcttctcttttacttcatcagatgcatccagctccttcagctgttttttaaattcatcgatatcatcagcagtattctcctcacccagctcctcacggatggttttcagctgttcccggaggatatactctctctgattcttgtcgatatgggatttcaccttgcgctgaagatctttagtgatatggatcacctcgatctcgctgccaagaagcgctccaaggatctcataacggtcattcaaagacactgcttccagaagcttctgcttgttctgatacgccataggaagatttactgcgatctgatcgatagtttcctgcacatcttcgatgttcatgatctgggttaccagatccttgcttacttttccgctttctctgcagtatctctgaaaaagctcccggatgctgcgaagcatggcgtcctttaccggttccgggtaatcctcttcctgtgccgtaacgatctcgcattccgccttcagatatggttcctcctgctccaggcccagaacctctgccctgtccagtccctctaccagaacccggtaaagatcctgtggaagcttcaccacctgcttgatataagcgacggttcctacctgatacagatccgtaagttccggtatttccacctcaggatccttctgtgtcagcagaaagatcttctggtcatggagcatggctgcttccacggcacggatagatttctccctgctcacatcaaagtgtacgatcatatccggaaggactgtagtcccacggagagcgatcattggcaatatattgacctgatttgtcatttatgtcattcccttcatcaagctgtttccggcttgcctttctttctcgaacgggatgttttgcgtcctgctttttttgcaggagccttggcctccccgtggatgatctccggctctccggttccctccactgcctcttttgtgacgatacacttacggatggtgtcgtccgatggtgtcttgtacatcagatccatcagggtatgctccatgatggcacgaagtcctctggcacctgtttttctctcaagagatttccgggcaactgtctcaagtgcttcatcctggaactcaagctgcacgccatccagctcaaaaagcttgtcgtactgttttgtgagggaattcttaggctccttcagaatacggatcagtgcttcttcatccagagaatccaaggttaccacgaccggaactcgtccgataaactccgggatcagaccgaatttaataaagtcctccggcataacctccttcagaacttcgcccacattgcggtcttccttctcggaaacctctgctccgaaaccaatggatttggtatcctgtcttgcctcgatgatcttctccagtccgtcaaaagcaccaccgcaaatgaacaggatgtttgtagtatcgatctggataaattcctgatgaggatgctttcttcctccctgaggaggtacgcttgcaacggttccttccagaattttcagaagtgcctgctgtacgccctcaccggacacatctctggtgatggaggtattctcggattttcttgtgatcttatcgatctcatcgatatagatgattccgtactgggcacgctcaatatcgtaatcggctgcctgaatgatcttcagaagaatgttctcaacatcctcgccaacataacctgcctctgtgagagtagtggcatctgcgatggcaaaaggaacattcagcagtcttgccagtgtctgtgcaagaagtgtcttaccggaaccggtcggaccaagcatcaggatattactcttctgcagctccacgtccaggtttcttgaagcaagaatcctcttgtaatgattgtaaacagctacggaaagtgccttcttggcatcatcctgtccgatcacatactcatccaggatactgtggatctcttccggtttcagaaggttgatccctgtttcataatctgcctcatgatcatacatactgaattcttcttccatgatctcggagcagatcccgatacattcatcacaaatatatgctccatccggacctgcgatcagcttgcgtacctgatcttcagtcttatggcaaaaggagcatcttacctttccttcttttactttatctgccatatctttttgtttcctttctaaacgtaaatgtccgtctctcgcagacatttaaaattcctttttaaagcaagataagactcctgtgtctttacaggagtcttttcttacgcattatttgtggatcacaacaccgtcgatcaggccgtatgccttagcttcttccgctgtcatatagttgtcacggtcagtatctttttccacaatctcaagaggctgtccggtattcgcagaaagaatctcgttcagcttctttttggtttttgcgatctggtcagctacgatctggatctctgtagcctgcccctgtgcaccgcctgatggctgatggatcatgatcgtcgaattcggcagtgcatatcttttgcctttggcaccggaggacaggaggaaagctcccatgctggctgccattccaaggcagatcgtagatacatcgcacttgatatactgcattgtatcataaattgccattccggcagttacagaaccacccgggctgttgatataaagctggatatccttggaaggatcttctgcttccaggaagagaagctgcgcaacgatcaggttcgcactgacatcgtttacctcttctccaaggaaaatgattcggtccttaagaagtcttgaatagatatcataacttctttctcctctgctggtctgctcaatgacgtaaggtactaaactcattttgccctccatttccgaggtttattacgcctctacagctgcatcggcaactaatgtaacagctttctgaacagccatatctttcttcatctgctccatctcgttctcaccgatgagatcttttaatttgtctgcttccatcttgtacatctctgccatcttggagatctcttcgttaacctcttcctctgttggctggatgttctctacctcagcgatcttctcaagaacaagtcttgtctggattctcttaagagcctgtggcttcatgtcttccatcatcttgtcaacgctctggcctgtgaactggaagtactgctccatggaaagaccctgggactgcattcttcttgcgaaatcgtcaagcatctgacgtgtctgtgtctcgatcattgcctccggaatatccatctgtgcattctcgatcactttatctactgctgcgtcttcttttgcacgacgtgcatcttctgctttcttctctgtcaggttcttcttaacgtcttccttgtactcagcaagtgtatcaaactcagatacatccttagcgaagtcatcgtcaagctccggaagctcttttgcttcgatcttcttaacatcgcactggaatacagcttctttgccagccagctcttttgcctgatactcctccgggaatgtaaccttaacttctacgtgatcacctgtgttagcaccaacaagctgctcctcgaatcccgggatgaaggtgttggaaccaagtgtcagcggatagtctgttcctttaccgccctcgaatgcctcaccatctacgaagccctcgaaatcgatagttgctgtatcgccgttctgtgctgcacgatcctcaactgtgatggttctggagtttttctcctgctctttcttaagctcagcctcaacttcctcgtctgttacctctgtctcagacttcggaacctcaagtcctttatagtcaccaagagttacctctggtttagtagctacttctgctgtaaagataaatggtttgccaggctcaacctgtgttacatcgatcttaggctgggaaacgatctcaagatcacactcagcaagtgctttgctgtaatgctcagggatcagagcgtttgcagcgtcctcaaggaatactccctttccgtacatctgctcgatcatttttcttggagcttttcctttacggaatcccggaatagaaattctgccttttgctttctgatatgcattctgcattgctttgtcaagatcctcggcggaaacctcgattgtaagtttcgccatgtttttctccattttctccacctgtaaactcatgtttcttgttcctccttaatcatatcgagtaaataccttatataaaatagttaacactcgcattatatatttacagtcatttctgtagtatagcataaccactgtaaaaacgccagtatttttttcagttttccatatgcccccacagggcatttctcagctgcccatgtcctcaatgttaaagtaattttctgtctttcttatgttgttaagacaaaatgtaaaaatccttttataagttttaggcgtataatgaacaccatcgtctgtaccgtctcctgtattggatacagtaccatatccggtccgcatcagataactgtaaacatcaatatagtggtactgacttccaagctcaccggcaagaccgctgttaaaagtccggacatcctcacatttacgattcttggtacttcccttttcccctccattgatcggattcacagacatataatacagactgcagtttttcatggaaagctttgttcccagctttttcatataagacacgtactgtgagagtctatcattcagatcctgttttccgttaatatctctgagatcattgataccatgattaaacaccactgcgatctttgcgtatttttcatttttacgacatttttctatttctttcaaaagagcctgtgcgcccgttgacttcagccagcccagttccgtattagaacagcatacaaagctgacatggctgtccacatactcctttccaaactgttcgtacaataccttctgaagaccatatgtcctggaatctcccacgaagatgatcctttcgtaattctcaggataatgaaagctgttcctgaccagattcggttcctgataccgccagaatctcaccgcatagagatgcatggtcccactgactgtgatcacctgtccggcttcataccttggtgcggtcttctgacctgccctggtagaccatccaaggaatgtataattctcttcattggccatcaccggcagtttcagttttccgcttggagcctggatgatcttgtagatatctccgtcattcctgtgcaggatcagtttgggattgttcttcttttttatcactgcataaaacgttacatttctttttacaaaatatttttttcccggcttatatcttgcctccgctcctccttttttcagagaccatccttctgcctgatatcctgctgggacctgcggcactttgggaatcgtgatcatggaaccatatttctgtttcttttccaattttttatatatagcagaggaggctcctccgcctgacctgaaagatacggaatacacttttttgcaagcattcccgaatgtatcatccgaccagtcaaagccggcagctgacaccaaatttcctgtggctgtcatcagtataacaaaaagcgccactacccacaggacctgtttcatctcttttttcatgctcttacatacaccaccgattcagcgatctcttctgcctttgcgcttccctccagctgtccgatcagggaaaggctgaaatcgatggctgttccaaggcctctgctggtagttacatttccatctaccactacaggctccagagatgttctggcacttttaagctgttccataacagatgggtacgatgtagcatttctgcctttcaggaatccaagtctctcgaatacacctggtgccgcacagatagctgctaccttgccgccattctgatagaaatctatcagaagatcagtcagcggtttatattcctccagatattttgttcccggcattcctcccggaattacaagcatatccgcatcggaaaaatcacattctccaaaggtacggtctgtaagaagatcgatcccatgagaggttctgatctcttttgtctctttgatagatactgtctggatgtcgatcccggctcttctcatcagatctaccacggtcagtccttcaatatcttcaaaaccatctgcgaaaaaaatatatactttactcatgatcctgttcatcctttcttttataagatccataaatattttctgtattccccattcccttccataatgctttttccatctgaaaatgtcaagaaatttcaacagatatgccattgcaaatcctgtttttttcctgtagactgaacataatatcttttcatttcacaaatccggaggttttttatatggagatcgaacgtaaatttctgatccggaaggatgaccttccgcagaatctggcttcttatccctgccacaggatcgagcaggggtatctttgcacttcccctgtcgtccgcatccgccggcaggatgatgactattttcttacttacaaatccaagggtctcatgagccgtgaagaatataatcttccgctcaccgctgaagcctatgagcatctgaagcctaaagcagacggtatcctcattaccaaggaccgctatgtgattccggaaaaagacggactttttattgaactggatgtgttccacggagaatacgagggagttcttctggctgaggtggaatttcctacagaggaagccgccaatgcctacactgcgccggactggttcggagaagatgtaacttattccaccagatatcataacagtaccatgagccagggctggcagagcgatcactgactggtatcgtaaatcgcacttgtatttcttatttcaggtgctataattagtaatgcaggcagatatagttcatcggtagaacatcagcttcccaagctgaggaggcgggttcgattcccgttatctgctttcattgccaaagagggcacgcagtcaggcgtgtccttttttataaatttcaaggaggatttttgtttatgaagattggatttatcggatgtggaaatatggcctctgccatgatcggcggtattctccgtcaggggatcttttcaaaggacgagatcattgtttccaaccttacagacgaaggcagagcgcgcagtgaaaaaactcttggtgttgtcaccactctggataacaatgaaatcgtccgatctgcaaaaactgtcgttcttgcagtaaagccgcagttttacgaggaagttctcacagaggtccacgacagtctcacgacagagcacaccatcatcggaatcgctcccggcaagactcttgcatggctggaagaaaaagccggtcttcctctgaaagttgtccgttttatgcctaatactcctgcacaggttggggccggaatgactgctgtatgtaccaatgaccgggtttcggaagacgaactggcagaaatccttaagatcacagacagctttggctgtaccgaagtgataccggagcgtctgatggacgccgcaggcgctgtaggcggctgttcaccggcttatgtgtttatgtttatcgaagccatggcagatgccgctgtcagccagggaatgcctcgtaagcaggcttataaatttgcttcccagactgttctcggcagcgcaaaaatggttctggaaaccggcagacacccgggagacctgaaagacatggtctgctcaccggcaggaactaccattgaaggtgtccgcaccctggaaaagagcggcttccgcagtgccgtattcgaagcgcttaccgcagctgctgagaagggtaagaagttataattttcgaaaacaaaaactccgtgaggtctgcattcacccggacctcacggagtttttccatctcatctcttttatcgtctgccgacagccctacaacaactcgatcagtgcgtcaatatcttccatttttgttccccagcttgtggcaaaacggatcactgtatgatcttcatcatatttttcccagaaatcaaactgaacttctttgcccagttcttctttctttttattttccaaaactacaaactgctggttcgtgggagaatccaggaaaagctgatatcctttttcctgaagggctcttttcagcttcatagctgtttcaatagcatttttgctgatccttgtatacagatcatcggtaaacagtgtgtcaaactggattcccagaagacggccttttgccagaagggctccctgctgcttcaccatagtcataaagtgcttcggagcttttttcgtaaagaccactgcctcaccgcagagtgcaccgaccttggttccgccaatgtagaacacatctgtacatctggcgatatcctcaagtgtcacatctgcttccggacttaccagaccgtagccaagtcttgctccgtccagaaacagcggaagctcgtatttatggcatacctcggaaatttcctccagctctttcttcgtataaagtgttccgtactctgtcggatgggaaatataaaccattcccggaaataccatatggtcgtgactttcatccccataaaaagtttccacataatctgtgatactttctgctttgatctttccgttttctgccggaagtgtcagtaccttatgtcctgtatactcgattgctccggcctcatgacagcttacgtgtccggtctgcgccgcaagaacaccttcataacggttcaggacagaacctatgatcgtggcattggtctgagttcctcccaccaggaaaaacacatctgcatccgggcagccacaggctttacggatcttctcctttgcagaatcacagtatttgtctgtgccatagccggaaagcttctccatattggtttccagaagcttctggaggatcgccggatgagctccctcgcagtaatcgtttacaaaaaataacattttattttctcctcatctgtatatggtttttcacagcatttccccatatattttcatagattgctgtaaaagttcttctttgattgtaaacattggttttttctctgtcaatgcccaacctttttaatctgtaaacgcttctttcacatattccgtatttacaagctttttatactccactctctcattaagctctcccgcttcctgcagaatatcctgcagaagctcaaaactttctttttcaaaaaccaggttttctttccaggtatcctgatcataatagcgctttacgatggtcgtgatggtatccagatctgtttctttaaactgtggtgcgatcacctctgcaatttcctccggtgtatggctctgcacatagtccattcctttctgaagagcttccgtaaatttccggatgatctcaggattttctttcatataacttgttttggcactgtaagaggtatatggcacataaccggacgcctctccaagcgatgccaccacatatccggcaccttccttctccaggattgtcgcggacggttcaaactccaccgtatatgccgcagattcatctcccgtaaaagcagctgctgtagaaccgaagtctatactctgatctatggtcagatctttccggggatctatgccgttttttcggagaatgtattcaaataccatttccggcatgccacctgtacggccgccaagaactttcttgccttttaaatcttcccacttaaaatccggcatttcttcccgtgcaaccaggaaatttccggcacgctgggtgagctgggcaaagtttacaaccggatctgttgcgccttcctgataggcataaacagacgcttccgcccccataaagccgatatctgcctcaccggaaataacagcagtcattgttttatccgctccgaatcccgtcaccagtgtcagattcagcccttcctccgcaaaatatcccttctcgatcgcaacatactggggtgcatagaaaacagaatgtgctacctcatttaaagtaactttgctcaatttctcctcttccttatctttctttgatgcaaaaactgtcatcggcagcgccgtcaccgccagcacgactgccaccgccaatgcgatccgttttttatttttcatgaagatactccttttttgacttctgattttagcatatgccagaaggacctgaagggttcggaacatcaataaagcagataatatcatcagaaaaatgaaacttctggccgtaacatcatactgaaatggaaaggaattgccccgccccccaaaatatgataaggtgaagcaaatagaatttttcaggaggagcattcatatgaaatacgacttcacttccatcattgaccggcatggcagagattccatcgcagtagacggcctgaagggcgatggtttctctcctgccccgccgaaggagggcttcgatgtcatcccgatgtgggtagcagacatgaacttccctactgtacctaccatacagcaggcgatcatcgaacgggccagtcaccctaccttcggttactttgaagccccgccggaatattataaggccatcatccgctggcaggaaacacgccacggtgtcaccggtctgaagcccagacacattggctatgaaaatggcgttctgggcggagttatcagtgcactgaactgcgtctgctcccgcggtgataacgtcctgattcacaacccgacatacataggcttcaccaaaagtctgaaaaacaacggctacgaggccgtacactctcctctgataaaggatgaaaacggcatatggagaatggattatacagacatggaaaaacaactccgtgaaaagaagatccacgctgccattctctgcaatccgcacaatccctgcggacgcgtgtgggagcgttgggagctggaaaaagccatggagctgtaccgaaaatatgatgtctatgtcatctcagacgagatctggtctgacctcatcctgaatggccataagcatatccccagccagtccgtcagcgaagatgcccgccagcgtacagcggccttctacgctccatccaaaacctttaatctggcaggacttgttggcagctatcacattgtatacaacagctggtggcgggatcgtattttgaaggagtccagtctgagccattataatatgatgaatgttctgtccatgcacgctctgcttggcgcttatcagcctgaaggctatgaatggaccgatgaactatgcgaagtactaagcggaaatgtaagctttgcctgtgattacattgaccggcactttaagggtgtcaacgtttccaggccggaaggcacctacatgctctttgccgactgcaccgactggtgtactgcccatggcaaaacaatcgaagatgtggaaaaggcctgctgggatgtcggcgttgccgtccaggacggcaggatgtttttcggttcctgtcacctgagaatgaatctggcctcaccccgttcccgcatagaggaagccttccgccgaatggatcggtacgtcttcaacaggtaaaaatctactctgccgttcattacaatttatgctataataaagctcataacaccagcgttccatcctgtcactttccggaacgctgtaaacaggaggaaatcaatatggatattaaagaggaaatccacgcattatcagaagaaatgctcacaaatcttggcagactggttgccattgactcccagctcggtaccccttccgagggaaaaccatttggtgagggtcctgcaaaagccctggaagagggactgaagattgccgaagaacttggttttaaaaccgtaaacctggataactactgcggttatgccgaaatgggtgagggcgatgagatcgtcggcatcgccggtcatctggatatcgttcctgtaggcggagactggacctacgatccgttccgccttacccgtgaagacgatcatgtatacggccgcgggaccactgatgacaaaggccctatcctggaagcgctctatgccatgaagcttctccgcgaccacggcgtgaagctgaacaaaagagtccgcctgatcatgggctgcaacgaggaaacaggttccaaatgtatggatcactacaatcaggtagcagaagagctttcctgcggtttcacaccggatgccagcttcccgtgtatccacggtgaaaaaggtcagcttgccatgatcgcctgctccaaaaacacccggattatctccatgaacggcggttttgtatccaatgcaatgtgtgacacctgtacaaccattgttcccgatgaggacggtctgaaggaaaagctggaatccgcactttcccagacgaagctccaggaatataaggtaagcgaagaaaatggcagactcaccatctacgccaaaggtgttccggcccatgccagcactcctcatctcggtgtcaatgctgcaggagtaacctttgaatgcctggcagaagcaggctttgaagatgactttgtagaattctataactcccatatcggcactgcatgtgacggctccggcattggtctgaaatttgcagatgaatacggcgatctgacgttatgcaacggaatcgtaaaaacagaaaatggtgtcatttcctgtaccatcgatatccgtgttccggtaactcttaatgagaccgatatccgcagaatgtgccaggacagactggaagataaaaacggccgtattgagatcacaaatattgttgccccgttattcttcccaagagaatctccgctggtaaatgctctttacaaagcgtacacagatgtgactggcgataccgaacacaaaccaatggtcatcggaggcggcacttacgcaaaatccctcaaaaacatcatagccttcggacctgaaaaagagggaattgactaccgtatccacggagccgatgaatttatcctggtctctggcatggaagaagcagtactgatctatatggaagcgatcaaaaatatgcttgcgatctgaaatcaggaggataagaaatcatgagtacaaaagctgaacacgctacaaaattacacgagaatggctgtaactgtgcacaggcagttgcctgttctttctgccaggaatttggcatcgatgaaaacgagatgttccgtattgccgagggcttcggccttggaatgggtgttatggaaatgtgcggtgctctttccggtatggctatgatcatcggactttccaacagccgcggaaataccgaaaaaggttccggctccaaaggtgacacttacaaaaagctccgcacctatatccagaaattcaaagaaaaaaacggttcctgtatctgccgtgaattaaaaggtgtggagacaggcaaggttctctgcagctgcccgcagtgtatcacggatgcggttgctcttacagaagaatatcttgcggaaaacagataatctcataaaataaaacagcagaattgtatattccctgtaatcccgggacatacagctctgctgttttcttttcctgttcctattctcttttcactgtcagatccttcacccatctgtatttcttataatccaggtacaccgccgggatctttacaaattcatccaggctgatgagctttctggtaaaaatgccagggctcttttattttccatttatttttgcccacgcctcctcatcaaacttacgatccttaaagtaatatggcttgtccgcatctgtgatctctcagataaaacttttgttctgcctcttctaactcatccccgatcacaccgtcttcctgaatttcgccggtgacactccaaactgctcccggaacagatgataaaagtggctcacattggaaaatccgcaacactcacagatatccagaatctcccggtctgtctgtgccagaagataaactgcatatttcagacgctcctggttaatatactgggtaggcgttttcccacagatctgtttcagcagcctgcagagatggcttggagagcagggagccaactcgcacattttttcgtagccttcctggagattttcaatctttgacatatttaagagaagctctgacagccaggaaggcatctgattccagggatccttttcatcataagtgaagaaataatcctccagaagaagcgcaatgacacactgcgcatgatatcttgcgtgccggggatggccgctgtttaccagctttcccgcagtatccattgcatccagaaccttgctgaaactttccccttccagatgtacataggcaggcatctcactgtttatcagcttatccatcttctcctcctgctccagaaacagggaaacattccggagcacctgggtagaaaagcccagattccggacacagaaattctccgaatgataaaagttatagctgtgcatatcattggggcgtataaaaaacagatccccctttcttactgtctgcacggaatcattgatcatatgataggccgtaccctctgaaatgatgaaaagttcataatgattatgagtatgtattggcacatgcttgtaaatattcgaaattgtataggaaagtccggactctctgttcagcggatactgttcttttccaaataccggtatttccatcttcttttctcctccccactttctgatatcaatatactacaaaaatctgacagctgtaaacaagaaacatagtgtaaattgtgatattcttttaccgcattgaagaagatttttcgttgaagaagatttctcattgaaaaaattttctctgatgcagaaacttactctttattttttcagggaggacttattatcatgtcatcatccaaatctcgattttttaatccggctgttgtaggcctgatcatgctcagctttttcctgggtaccagtgaatatactgtgatcggtatcctgccggaaattgcggacggattcggaatttcactaactcaggccggaagcattgtatctctgtttgcctttgcctatggccttggcactccgtttctggctgcctatgtgggaaaatacaaccgttttcgtattaccatgttgggaatctcactgtttgcactctgcaacctgatctgtgccattgctgtcaattacatggtatttctggtgttccgtattcttacggctgtggtttccggcactgtggtctccatctccatgacttatgcggaagatgttgcttccatcccggagcatatcccaggtgtgatcgcaggtgtcttttcaggcttcagcgttgcttctgttgtgggtgtgcctatcgcttccactatcacccaaacttttggctggcgtgcggcttttatcacgatcttcgtggcatccctggctctgctggcgcttctgtttgtgaagctgccgcggcagaaccggctaaaggccggaagtattctggaacagtttaagctttttctggacaaaaggatctccattggttgtgccatcgttttcctggcaggtgcctccacttactgtttctacacttatctgacaccgattttccagcaggagcttcatattccggattccatgctgagccttgcgcttctgatcttcggtattgcagcgatcaccagcaatgtaagctccggtcaagtggcaaacaaaaccggcatccgcatgctgcccctgatctacgtcatccaaactgtatgtctgctgcttctgcctattgccacccataatctgataagcggaggactggtactgtttatcctcggtgttgtgatgtatcttctgaactcaccacttcagatgcattttttgaagatcgctaccagagagcatcctgcctgtgtaaacctggcatcttctttgatctcggttttctttaacttcggtattgcagccggttctgccatgggtggagtgatcgtaaaatatgccggacttcgttttgtagggatcggcggtgcagttcccggcatcggagcgttcatctgtgcgatgatcctgcttcagatcatgaagcctggtgcggatatccggtaaataaaaatacagccaggaaattatccggatcttatatccgatatttctggctgtatttttattctctcaattttcttctgttactgatgtggttttactttcatattctttcagtcccataatcaggactttcctgtttttctatttcatctcgattctaaataatctcgctgctttttcctgcggcatcttcactacaagatttccattttcgattttatattcgcacatctcttccttcggatagatcacggatactctgctaatctgatctgcattttccagaggaatcactgcttctgttgttcccggtgtccatacggaaagataagtattcttctctgctttcactccgtaagcaagaacttcggatttcagagttccaaaaccaagtgggaagaacggcacgccgtcacggacttcctcacggatctccttatacagggagattccctctttcatccggttcatggaattttctcccagcttccataccataccactgatatacgggcggagaagcataccatttactacattgtagatcacatgctcttcttcatcctcgtacggatatacccacatgccaccctgctccggagttaccgcactggccacgttggcagcgatatttgcattgtagaggtaatccgtctgatcactggtagactgcaggcttaagatcttcagcataccataatccatacgctgtcctccggaaccgcaattctccacaacaagctccggatgatcccggaagatttcctcataccactggtggaggcattcataatgctcacggatagcatccgcacagctgtcactgttcaggtcacttccgtatcccatggttacgttataatccactttaaaatactctacgccgtaatcattgatcagcctgtctactacatcacggcagtatttccgtacctccggattgcggaaatccagcatatagcgtttattgtcaatgtggcgttttccatgacgacagacaaaccagtcatcaggaagcttgtttgccagctcgcaggcaactcccataacctcgatttccagccagagtcccattttcagtcctttactgtgtgcataatcgcagacttctttcagaccattcgggaatcttccggatgcttctttccattccccgacacgatcccaccagaatccgtcgtcataccagcctgcatccaggcagtaatattcacatccgagctctgctgccttgtcaataatggaaagctcccgctcagttgtagggtctcccatcaggcagttcatgtaatcattaaataccacgttcagcttctcatcgtctgtattaggtctgcgtacttttctccgatatctggtcagtgccgctgccaccggattcagaccaccttttacaaccgctgcccctgccggaacggttgtgaagctttctcccggtttcagattcttataccagccgtgctcctgctctgtagccccgcttaaggcaagatacagatttccgccctgtgcagagccatattctgccagccactgtccggagctttcaatctggaaaatatacgtctcccctgtttctctgtcctcggcaattcccatgggaagatactcacaggtagaccaggtgccctttccactgtaacaataacggttcaggccatatccctgatgattgaagccatctacgaccattccgtttaaattcagcgtttctgcatcgtatttctgccactgtgcctcacagcaccagctgttaaacggcacatagatatctgtttttttataataaggcttctcgccgcctctggagattccctgatacataaaagaagaaacataggttagcccctgatcctcgcttccctcgttgatgatctctgtccaggtctgtactgccggcactccgtcaaacaggcgcatatgatatactgccttcagcttttccggggaaatcattacgatctccagctcttttccgccggcctgtgccttcagctcatggttctcataaacaaaatccacagaggactgattgatgttgtttttgtaggcatgcatgtttaagcttcctgtaccgcttctgtggatctcaacagccggataacaaatatcctccttcggctccatgactgctttttttacttcctgtgaagaaaaatctgccagctctaccacgccgttttcccgaatacgaaactggatatccaggccattctcatgtaattcgatcattttcatgttttcatttttatagctcatagaaaataccctccgtttttctgattctgatcacagtataatatctgtttttttataaggtgacaggtatcatcccctgaatgcaaaaatgcaatatattgtcgtatttatttttgcgtgatatactgtttactgacagtaaagagtacagtcagtcagacatgtagggcgatttaatcgaatatctgcatctgtccgactcgcaatttacagctgaaatatttacattccgcttcgcagtatactcaggaggttttttcatgccagatattttccaggactcttcccgatatttccatatttctgctttttatgctctctccctgccttattatcatatggagcatcacacacattccagctatgagatcatgtatatcacctccggttcctgccgggttttctgcctggatggcacacaggacacggaattcccactgaaatccgggcaatttatctttatccggccggatgtacctcacaggctggagattccggatggttttccctgctcgatcctgaatctggaattttcccttactcccgaaaaaagtccggttgctctggagcttctcctgaaaaaggatcccggattttcccggttctggaattttacggaagcctcccagggcttctgctccggcgcggattcccgcagcttcggatacagcctgaaggatctgctcacctttttacaacaaaattccgatcagatacaaaaggaagaatttctcttctttcttcttttcagccgcatgcttacagagcttgcattctgcgcccgctccagccggagcacccagggaatcgtctatctgaaaaaagcgctccgctatattgacgagcattatctggaagacattgatattcctgccatctccgcatacgcagggatcaacaaatcctacctgcaggcgctctttacagaaaaaaacggctgcaccatcaatgcctatatcaaccgcaagcgtatggaacaggccgcctttcttctgtgcaacagtactctgcacattacggatattgccttttcttccggatacaacagccggcagcattttgcacataccttcgaaaaattttatcatatgagcccctccaggtaccgaagccttcatacccggcctctccgttcggatacccaaaagaaacgctatcatatgacggacggactgatgttggaaagcgaaccctttcctcaggaataaaacttacttcatacacctacaccttcaggctgatacctgcgatccacgtctgagcagcctaaaaaagcggccaggtacgaagctcttatctcttcgataacctggccggctttttatatttattgtcaagcggatatttgcaatcctgcaggggacttacttgattcggttaaaaattttctatggaagcaaattctgcatactcttcaggctgatcgccagtgtggaggtattatgcagaagtgcggatgaagtcggctgcaggatacctgcaacgccacaagcgataagacctgcgttaaaggtaataataaaacggtaattgcgtctgatacgcttcatcagtgcattgctgatctctttcagaacaacaagctcctgaagatcatctgcacctacagtaatatctgcgatctcccgggcaatttcagcaccatcactgatggcgataccgacattggctgcggaaagtgccggagaatcattgattccgtcacctaccatgataacctttcttccggctgccttttctttttcgatgaagttggccttatcctccggaagtacctcggaataatattcgtccactcccacacgtctggcaatggctgctgctgtacgctcactgtcccctgtcatcataacgatcttggaaatccctgccccacgcagtgcttctacagcagctttcgcctcctcacgaagaggatcttcaatacagatcacggctgcaagacgtccgtcaatggcaagatacagatgggaatactcttccggaatattgtcgaatttctccttgccatcctccgggatcagacatttctcatcttcaaatacaaagtgatagcttccgatcacggccttatggtcttcgatcgtagtggaaattccatgcgctactacatattcaacctttgaatgcatctcctcatgggccagatgcttcttcctggcagcactgacaacagccttggccatggagtgtgggaaatgctcttccatacatgcggcgatacgcagcatctcctccggatcattgttgtcaaaaggaaccacatccacaacggttggcttcgcctttgtcagagttcctgtcttatcaaatacgatggtatctgcctcagccattgcttccagatatttaccgcccttaactgtagccttatgtgtaccggcctcacggatcgcagacaatacagagatcggcattgcaagcttaagcgcgcaggagaaatccaccatcaggatcgcaagggccttggtgacatttctggtgaggagatatgtaagtgctgttcctccaagagtatagggaaccagcttatctgccagatgctctgcctttccctccaaagaagatttcagcttctcagactcctcgatcatggtaacgatcttgtcatagcggctggaaccacctacggtctttacgcggatggtgatctcaccttcctccacaacagtgcctgcataggcaacgctaccctctttcttgcatacaggtacagactcaccggtaagagaagcctggttgaccatagcctctccatctgtaacacttccgtcaaaaggaattacggtacccatacgtacaacaacatcatctcccggctggacctctccggactctaccaggatctcctgatcctctctcttcagccataccctgccaacattcagggacatggttcttgcaagatcacctacggatttcttatgcgtccactcttctaggatctctccgattccaagcaggaacatgatggagcctgcagtaccaaagtcctgacgtaatacagacactccaattgcagtggcatccaggaccggcacctcgatcttacggtgaagaagtgtatcgattcccttccagatatatttcagggaagtagctgttgtataaatggcattcagcggatatggcaaaaaaagacttcttccgtaatggcagatcaccttggagatcagcttctcctgatattctgcattcagtgctctccctgagctctgcagcacctgtgaaggaacctctacatcctgataatgaaattcgctgataccacggataaccgcagctctgctgccccgataatttacaactgcgtcacaggttctctcgtataccttggcagaaaccactccatcaagattctcgagataatacagcagcgtatctgcctgcccgtaactcattctcttctgagcaagatggatacgaagccggcctcttgtctcatgtttgatataaaatttcacggaaaatcgcctctttactctgctgtctcttctgctgtctcttctgctgtctcttctgctgcttcttctgtctcttctgctgtttctttgaatgcatcctcatctgcagtttcctctgcttctgtctcaacatcctctacagcctcttcagctgctgctctttcctcattgatctccttagcttcagcataaatgtcttcagcattctcctgaagattcgtagctgttttcatgatgcagtccttagctcttaaaacggctgctgtgcatcctgtgtaaagcttcttcgcatccttgcttgtgaggatcttgattcctgctgtaccgaaaagaacgcctgctgcaaaaagtcctgatttcttgaatttaaagtctgccataataatttcctcctgatatatgatttttatttttttctgattcccggtgaggatttttcatgtccgccccgatattttcattattataaaatgtctgtaaaaaaaagtccagtgtttttttgtgtgaattcaacacaattcgttaaattttcagttatttttgcctaacagttaatttttactaatagtttaatctatctaattcttagtctgtacaaacctcttctttcctattatattgtgccatagcttttccatactcacccgacctcatgaacaggcaacagcgccagggtacggatattctgttcactgatctccccgcaggcccgaagtcctgcaaggatcacttcattaagcttctgtccggacagatggcatatcgtatcatcatccagttctactgtgcagacgccttttgtgctgcatgccacgcgatacatattctttcggctgatagcaccgatggattccagcgtattgaccatacggtatactgtagctacaccgatcttcggatctagtgcggaagccctgtaatagatttccttacaacaggagcactctccctccaggataatgtccagaagaatctttctctgtctggtaatgcggagccccttctccttcagtttctctataataagatccctctgcatctctgtatgtcggtagcatcctgtttttttctcttctgtttcggcttctgcaatatgcattctgatccctcctttattgagaaaacttttcttttatctaataagttagtatactccaacttaggttagttgtaaataactcatttgaactttttttacatattgaggattctgcctgaataccgtataatgtttcgtgaacctgtacataggaaaccgtcgttttgacaaaatgacgaaaaatcccctttcgttttttcgtcagaatgacaagaaactgccggaaactttgtaagattcagctctagcccttttctctcattttcgatatactgttaaccagcaaaggaaattacgtaaaacaatatattaattttggagggaaacaacaatggcaagtttatcattatctcacattaataaaacttatccgaacggcttccaggcagttaaagatttcaacctggagatcgaagacaaagaattcatcatcttcgtaggaccatccggatgtggaaaatctacaacacttcgtatgatcgcaggtcttgaggagatcagcggtggtacacttaagatcggtgacaaagtcatgaacgatgttgagcctaaggaccgtgatatcgcaatggtattccagaactacgctctgtatcctcatatgacagtttatgataacatggcattcggacttaagcttcgtaaagttccgaaggaccagatcgacaaggctgttcgtgaagcagcaagaatccttgaccttgacaagcttcttgatcgtaaaccgaaggctctttccggtggtcagagacagcgagttgctatgggacgtgctatcgttcgtaatcctaaggtattccttatggatgagcctctttccaacctggatgctaagcttcgtgtacagatgcgtatcgagatctccaagatccatcagagacttggcgctactatcatctatgtaacacatgaccagacagaggctatgacacttggtaccagaatcgttgttatgaaagacggtgttgttcagcaggttgatacaccacagaacctgtatcagaaaccaggcaacctcttcgttgcaggattcatgggatctccgcagatgaacttccttgatgctgttatctccgaaaaaggcggcaatgtagttgctacgatcggtggtgagcatgaggttatcgttccggcagctaaggctaaagtcctgaaagacaaaggctatgttggaaagaaagttgttcttggtatccgtcctgaggatatccatgattctcagatgttccttgagacatctccaagcaaaccaatgaactccgtagttaaagtttacgagcttcttggtgctgaagtattcctgtacttcgatgttgacggaactcaggttacagcacgagttgatcctcgtacaacagctaagaccggtgatccgatcagatttgcattcgatatggagaaagctcacttcttcgacaaagagacagagcttactatcacaaactaattctcgtcgaatcataaaaacagaatgtaaccccgggggatatgatttcccggggtttctttttatttcactagttttatttcacatcagaaaggacgctttttatgaaaatacagcaaacaattcaaaaatgtctggatgactggaaccggatcagcggtcttgatttctgtattctggatgaaaatgaccagatatacatttccacaggggaccaccgacttccttcttctgaaaagcttgctcagttccgggaggatcctgccttatgcatctccaaccgcagctgcagtctgtacaagctgaacaacatacctcagagcaatatgcttctgatcgtatggggctccggagagcaggcttctaccatcggagagcttgctgtctgccaggtagaaagtctcctcactgcctatacggaaaaaacagacaagaactcctttatgcagaatcttctcctggaccgctattcccaggtagaagcttttaacaaggctgcccgtcttcatatcacaccttctgcccgccgtgcggtatttcttgtggaaaccaagcagcacaaggacgaaaatgccctggctaccattcgcaacatcttttctgcccgtacacgagattttatcactgcactggatgattccggcatcatcgtagtacgtgagcttcagagcaccgaaagctacgaagaactggatggtatcgcctgcatgctggtggatatgctcaatacagaggccatgacctctgcctgggtttcctacagcaatgttgcagatgatatcatggagctttccgatgcctacaaggaagcccgcactgctctggaggtcggcaagatcttttatgctgacaaaaacgttttcggttacaaccgtctgggcatcggacgtctgatctatcagcttcccactcaggtctgcaacatgtttgtaggcgagatcttcggagaagaatccctggaatctattgacgacgaaaccctcaatatcatccggaccttctttgaaaataacctgaacctttctgaaacctccagacagctctatgtgcaccggaatactctggtgtaccgttttgaaaagctgcagaagcggtttggcctggatatccgtacctttgaggatgcactggccttcaagcttgccatgatggtgtccgattacatcacctattccggaaatcacggaaaatagctcctgtccgcaaaaatccatcaaaaatgcaggtgcacaaagaatcccggaaacagcaaataatgtctgtttccgggattttctttatttcagcagcatcagatgctccggtggaagatacagatattccggaagatctttatccggatcctccgtaaagctgtttttgggacgcatccaccataatccggcagcattctcttccgctttgtttcggatcatatactgatgttcaaatgtagtttctatgtattggtctacccgtactgccatacagttctcacctggctttgattccgggcggatccagtggccgcggatccctacgtaagtaatgtcctcatctacgttttcttcggtatggagcttcattttccagtctgccgcatagatctcgtgaggtcccagcctctccgctctggaaaaattcttacagccggtaagctttgctgcctccagaagtcccggtctctcaaacagctgctttgtctccccggtcacaaggatcctgccttcatgtacaatggaaagctccctgcagaatttataggcctcatctctgctgtgtgtcacaaggatcatatctcccggatagtccttgaggaaatcctgcatctcccgctggagcacatccttcaggtaaccgtccagtgcggaaaacggctcatccagaagaatagcttccggctctccgatcatcattctggccagtgccactctctgctgctgtccgccggaaagctgtgagggcaggcgcttctccagcccctccagatgatatctccggatcagatctgccactttttctctggcggaggatttttccccacgataaccgcagcggatgttctgttccactgtcatggtcgggaacagcgcataattctgaaacagatatccgatccgtcgcttctgcggtttcaaattgatccctttttcagaatcaaacactgtttttccattgatgacgatccttcccttatccggtgtttcgattcctgcaatacagcgtaaggtcatgctttttccgctaccggaagcaccaagaagcccaatggctgccgaactgccttcaaaatccaccttcagggaaaaatcccggaagtttttttcgatatttactttgactgccatcagatccaccttcttgttttcattcctcttccggatacgatattgatcagcgctacgatcacaaaggagatcagcacgatcacaacgacccagaatcctgcagttccgtaatttccggctgctgtctctgatgcaatggcaacagaaactgttctggtttttccaaggatatttccggcaagcatggaggttgcgccatattctccgatcgcgcgtgcaaatgccagcactgttccggatgcgatccccggtcctgccgccggcatgactacccgccagaagatccggctgtcgctcatccccagagtctggcctgcatggataagatttatatccacctgttcaaaagcagcccgtgcattgcggtacatcagcggaaatgcgattactgccgctgcgaccacacagcccttccaggtctgcacgatcttaatatcaaaattatccagaagaaagcttccgaagggctttttcaggctgaagatcagtagcagaaaaaatccagccactgtaggaggaagtaccagcggaagagtaaggatcccgtccagtactgctctggctcccggcttcagcttcatgatcttccgggcacagaatattcccagaaaaaaagcgatcactgtggctgccagacctgtttttaaggaaatccacagcggactccagtttatttctctcaaaaattctgtcatatttcattcctgtgccggcatttactgtgttttaatatttactgcctgccggttttctacatcatactcatttggatgtgctgtctgcggaagctgtgctgtcctcagcctccgtgttgtctgcagaagcttctgtggcatcctcggaatcctcagcctcatatgctgtaaatccatagtcctcaaataccttgatcgctgcgtcagactctacataatcaagaaaagcctctgctgccctggtatcgtcttccgatgcttccttgtcctcgataagtcccacaggataaagaaccggcgtcttaaggctgtctgccggcgcctctgcgatgatatctactttatcagtaacagacgcagcatctgtcgcatatacaacaccaacctcattgcttccttcacagactgctgcaagtacatccgttacattcttacactcgttgatctccattttgtttacatcgtccatgatcccaagattgttaaagatctcacgggagtactgtcccaccggaacatcctctcctgcaagcgccatattttcagcgtctgtgatattctcgaatcctgttacctttgtctctccgtcctttggtctgatcagaacgactttgttctcaagaagatccttaacggtgtcttcctttgtcagtttttcctctgtgagggcatccatctgtttatctgctgctgaaaagaaaagatcacagcgtgcaccttcctcgatctgtgtctgcagtgtacctgaactatctgcgctgtaatagatcgttacattcggataaagctcattgaaatccttctggatctcctccatggaattgctgaggctggcagcaataaatgcataaacctctcccttcaggttctcatcacctttcacttctgtgtctgccgcaaaaacagttccggtcataaggcctgttgttaaaattcccgcggtaagggctgctaagatttttttcttcatcttttgttcctctgcttttccgtttcattcagttttgtttagttttgaatggttttgtttaattttaccgaaaggaaagtttcttgtcaagctataaggcattgctgtttttctctacaagtgctatcataaatacatagttgacaagccaggcggatgttcacgatccgcttcgtttcttatcatgagtggcttacagcactcctgatacagacaaatcccacacaaggttcattgctctgcacaacggaagcagagaatttgcctgatccggttcattcaatattcaaaaaaaggagacttacttatgaaactcagtgcacgtaatcagttaaaaggaaaaatcatcaatatcaaccagggagctgtaaattccatcgtttccatcgatatcggtggtggaaatatcatcactgctaccatctcctgtgcggcggtggaagaacttggactgaaagtaggctctgatgcttacgcagttattaaggcaaccaatgttatggtaggtattgatgaataaagtctacacagcacaggaagttgcagataaactaaagatcaaaaaatccacagtatatgacctgatcaaacgcggagagctttcctcctccaaagtcggcaaacagctgcgggtcagcgaggaacagctgtctcagtatcttaagggttcggaatgttctgcgtcttctgctcagtcttatgatcaccagccggagagttctcttttgaaaagggattatcttctgcattccagtggactgatcatcagtggacaggcttctccggctctggatcttctcctgaatcagcttcccacacacccggacaatctgccggttctgcagtctcatatgaacacctacaacggactgtattctctctattttgaaaaagtccacattgcctgtgcatccgcctcaccggaagatattcatagccttatacccggtatcccactgactgtgatctctctgtgtcaatatcctgtcggcttctatgtaaaaaaagaaaatcccaagaatatccggggattttctgatcttacacgggcagatattatttttgcgaaccgcgaaaaaggaagcagccgtcgcatccttcttgaccgtacacttctgtcttccgaaatttcaccggattccatatccggatatcgaaatgagcttgttaccgatcactccacggctgctgcagtggctggcggacaggcagacatagctcttggcgaggcctgtgtagcgagaagctttccggagctggattttcttcctgtttgccaggaatcactcttcctggttatgcagaccaaaaatctgagcacccccggctttcaggccgtagcggaaaccattgcatccgaacctttccgccggtttttagctcttcaaaccggatacgatactactgacaccggaaatatccggcatatttagggctaagaaaaacgcttatgtaaaaaattcttccacaaccatttctttgataatacaaaatcagccagcacgtcaatgatcactccttatttttgcccaattaaggaagtttcttgatcttatgactgctggctgatctttatttattcagatattgatatactcttgaagaaatcgaacggattccgtgcagtaaatgatcttcggaagctccttcagagaatatacataatacataatttgttttctttccatagatgatcgccatatcatgctgaactgagcttgtctcaccagttttgttcgcgcatactatacctgtcggaagacctgatggaattttgtatcgtttcgtctgatgcagtaaaagatttagcatttctctggaatactgttgagaaacacactgacctcgatagattttttctaagagtatcccacaatcttttgcagatgccgtgttacgccagccatcactgctccaggcagaagaagacggatgcagggaactgtgacaaccggtatttttgtaaccgttctttcgaagatattggttcactacagctgttcctcctacaaagcttccgcctccctgacgccttaccagttcattataacattcattatcactgacggtgatcatatcccacagcaagctgtacacaccggagctgtattgcatttttccctgacggatctgatcatagaccgacgccatcacaaatgccttgatcgtacttgccggatacatttcccgatcatttatgtttacaacatttcctgttttcagatcttttatataaacagaccagtttccaccgtaggcagaaacaaaactctccaattccgatttaaatgcacttaaagcatactctgatcttgtactttttcttccctgccagtccacatactgaccatccggtgttttcatatttttcgcaatggttccgttcgatttcaggtaataaccatctttccaccggttcaccagcatttttccattttggtctacataatattgctggccctcacaggttacccaccctgccttctgtaccattcttccgttatcattgccaaaataataaattccgttaaacttttttccctgaactgttttgttcactttatgaaaagacggacgcatgcagattcttccggttccatagaaataataataaccgcctttaaaatcacgcccaccgaatcttctctgtcttatatagcgtactgttccacgatcagccagttttccgtacgcttccacataataaatgcctgcgataatttttttgccccgtaccttctgttcagctacgtttacaaagccacgctctccctttgaaattcttccattggagtctgtgatgtggtatttatcaaagcggacaccagaaactgtctttttatcgaaataataaacggattgctttctcaaaagttttccgtttttatcaaacatataaaatcctgtttttaaaaactctgtctttgggattgacaaataacgtaatccggtaagttttcgcttcttagaatctttcaaataccagttcccgccagatttctgaagataatttccactgttatcccaaaatcgtaccgttctttcagcagcctcgacctttatctctgtacttctggcaccaataatacatccaaaaaccactactaatatcaaccaatatatacaaactgttttttttgctttcatactttaacaagacctgccacagacgatggcaggtctttctcctttatctttatattatcctattttcatgcagatgttctggatcaggcggttgtatccgcttacctttttcagccattccagcgctatggacactgccagtgaagccagcagaagcgtcagtgtattggtcagaaaatatccactcacatacacaaaagaagattttcttataaatgtatgtatcagaaatatattcatggaatgttttccgaggaacaataaaatctgtcgcactcccggaatgacattaataaattcgcagcaaaatgccataaatacaattggatacacaccccagtggatctcactgtataccgtcagcggcaaagttctgtacgctttatacaaaataaacaccgcaagaagctccagaagaaatttgaaaacatgcttcattccagcattccatatcttaaaccatcggttaaacagatcatacttggctacacacattcccatgagaaataccggtaaaaatgcataaatacccgtaattcccataacctccagggaaattgtccgtggaaatgccacaacagccacaagaataaataccaaatattcttcctttatcataaacagcggcacgcagatgataaaaatgatcgccgcactcatataccaccaggttccgttcagagtcgaagttccgaaaagtttcgccagaccaaaaaaatccagcaccattgcgctaacacctttggcaatatttccgtttccgaaatatctggccacggcatagccgttataaagctgtgagctcacaacagaaagcccccatataatccagaaccctcccattgtttttatcagtcttttggctgtccacttgccaggtgtagaattattttttctgtaactgagatacagtccgtatccggaaataaatgcatagatcggtacacagatcttaaatgttctgcacagatacatgatccgatctgctgaaaacggagtgaaaacaacattcagcccctcaaatctgtcttgactcagatacatatgatggaacagcattataacaatggcaatgcccttcatcgcctgagaattatatttatcaaactttattgcctgctttccttccaaaatccaacctccatattaccgattctcgatgatcctctcataaactcgtttggaacagttacggtcattaaatgcaaaggtctcatccattcgtttccgatattcctctttcatctgacagccgtctgccatatattcgatgatccggtccacagttccgtccagtgtatgctccacctctccgaagccatctctctcatagtcaaagtatccctctgtgtaggaatgcgcgccactgaaaaagctgtctctgtcaaactgggagtatacgatgggttttctcaaatatgcaaaatcaaaggcaaccgaagaatagtccgtgatcatcagatctgtctgggcaaaaatgtccttgtaggaataagacgaatccataaattttacccgtggatcatgacggaacatatgcagaccgtcaatggtatttgggtgaggcatgaagcagatggtatatccgtacttctctgccgctcccagaagtctttcgttgttgagaagatcatcataaaaatgaaagtattcgctttcctgaaattcttttccaagctgccatactcctctggcatcggttcctgaggaaaggctcttgcgccaggtaggcatcaccgtcacatacttacgctcatcatggaccagacggtcataacgcggcattcccgtaagccagatatttttttccggataaaaatagtcataggtaaaggcagaatcatattccggctttgtgctgacgataaatccgaaaagattacggttgtatttgttcagccacttggactggttgtctttggtcacaccatgctgtaaaaataccagctttttgtcatagatgatatcgcggtacagatactccagctttccaaaaggattgatcaccggtttgttagcctgggaggacagtgaaaattcattcagcaggaacagaagcttatgcttccaggagaaaggctccacaacctttccaagcttcttcatttccacataatcctgtgtatccttgttgactacaaagtacggctccaccgtagggtccggattggcgcagagatagcggaacatcacttcgccgttatcatctccgcgtgttgtacgatcggagatcagccagatctgctttttctgcttcgccttctgcatctcgtagagcttacgcacgagaactgccttttttccggcctttccctgagaaaatattgctttggtgcgttttttcttcagctgtttctccctgctctgactgtatggctctaccgttacttcatactgatggcccagaacctttgcatcttcctgatcctctccacggatcatccgtactttttcgttaagatacagaagcttatcctctatatgcaggaaaagcggcagcttctttgtaaatggcacatattttccgtaggaaatattgtacattttgtttatatgtccatctgtgcctgtgccccagctgataaactcccggatctcggaaagcggaatgtccacgatatacagcttctcaacggcactttcttctctgcaccagccgattctttccagtgtatatttccatctggcttcataggtgttgccaccagtcatcatatatacacggtttgtcctgctcacaggctccacactggaaaattcacagtgcagctggtctttttccggctggaatatcttgacacggagattgtcatatatgggattcaggatcgtgtctgcctgatccggaaattttttgcatatatccggataatatttccggagaagatacactttgtttgccctgctgatatgctgattggacatcacgatctccggaaactccatctgcttcaggaagctttcaatgccttcctcatatctgcactttttctcttcatcaagcttctcgttatcaaatatgatatcagctatttttgcgctgtaatacagcagcacataatctgcatttttttcatgaacaggattttcttttattctgcagtctgcgatctttcggaaaaattcctgataaaatacctccagttgttccggatcctgcagcatattcttccagtcctccaccatgagatggtccgcaaggatctgcacatagatatcttcccctgaagtcactcccagactccggcagcttacaacggactgatataccatagtcatcacatccagataccagatctccggacggatctcggatacccatttcacctgatctgcggcaaatgtgtaagcggtatacagctgatgcagaagatatacattgttatccagcgttgttttttcggtgaaacggtcacagtagttattatgctcccgcacatggatatttccttttccacggatctttgttatgacaacatctctgttgtcttcctcaaagcagcgtctgacctctgcactggattttggggaaaaacagattccggcttttgcaaaaacgacatagtttccggctatcttatccttcagctctgccacaagatccccgcattccagtccgtcaatatataaaagatccctgtcatccagcatctcccggaaacgagaatcttccggattgaactctccgtagatcttatccagctcttcgtccttgagctctttctccttttctcctgcttcttccaactccctcatgtcccgttcatcagggatatccacatctcctgctgtgcgtactgcaaggatctgtaccgttcctttaggtgtgacctcacgtacatttttaaaggttctgtaaagctttgcggtatcttttgcaaaaacaactactgaaaattcatactccctgttcatattgctccttttgtatccttacattaaaattttttctctttcagccttcttttcagtttgtccggtatttgagcattggctatatattcatagattcgtttgctgttgtcattgtccctgtagggaagaagctcatctcttcttcctgaaaattccggtttttcacggaatccgttcctcgcatattctccgataagatctaccagctggttctgatcccatgccagatctccgaaaacatcttttttgtagtccatatagcttccctggactttctcataggtttccagatcaaagggataaaatatcaccggtttttcctgatagtagacatcccaggaaacagaagaataatcggtgatcagcatatgacagctcatcagaagctgattcagcggcatagtcccaaatgggatcagccggatatgcctgtcttccacctgaaagctccggatatgttccctgaatttcggatggatataaaagttcagcgtgatatcctccttttccagaagagtcttaagcctctcatcctgcagaaatgctttataacgctgatagtattcactttttttaaactgctcctcgctgatatcctccagccagcttctccatgtaggcatcagcaggatctctttatgagccggatccgacttgtcctccagcacatcccatctggccagtccggtgatgatgatctcttcattatcgtatccgaaataatcatggatgatcttctgttcataacccgaagacaccacaaacagtgccatctgattacctccgcctttatgaaaggtcctgtggcattgcttgaagcccatcactccatgctggagaaatacgatattcttccgtgcctgatacagaaccttgtagatgctgttgggcgaatcccagatataaaaatgccggattgcatcggtagatatcagataccgtgcagcgctgagatagatcatgtacttaaatgacatgaactggatcacattggcatcatactcttttacagcctgataatccggacattttttatctattacataaaaaatccgacttctgtccttctccggtgcatgctccatacagtaccggaaaaaatagaggccgttgtcctgtgccattgtacagtatttctcgcagatcagccataatttcttatgatcccagtaaggtttcaggataaaatagcagaataatgcaagaaattcttttgctataaatgcatagctgtcatatttcggatcatatttccggtattgaatggtaaactgccttgctccgttgacaaagggataaaccatatgcccatccccggttctggtccatcttggaaaaaggatcagcttaagtttaagttttgaacttaagcctcccaggatcgcatcctcataatttccttttccttctttatccacagatgccaccacatcccagaatgcggtttccatcggatactgatctacattgatctgtgcatgatacacgatcgtatttcctttttttgctgtctgcatttcaaaaggaaaacttgtatccagcactgcatttcgctgtttcagcttcagggaacggatctttcctctggatccttccagctcaaaactgatctttatggttccttttgtcagcgaaaatttcctggtttttaccttgatctccgccggagcttccattaactgctgcaatttttcaccacctgttacatttctttgatcgctttgtaatttctttcacagttctttgtatcccacagatcaaaatattttccgtgtctttccagatagatctcttcattggcaaatccctgcttatgcaggcggatcagccagtccgttacttcctgttccgttacacataccggaccgaagccatctttccggaaatcaaaatacccgatctgatgatgactttgccggaatttttcattgtcaaactggtagtagaccagtggctttttcatgtaggcaaagtccatggccacactggaaaaatcagtcaccagcactgcggactctttaaggagtgtctgcacatcgtactcaggccaggacgccactgtgatcttcggatgatccacatgaaaatatttcagaaaccgatgcatttccctgtgcggataaaagatgatctgaagatcgttctcctcaatatagcggatcagtctctcatccttgagaagtgcatcccagtaccggtaataatcggtttccatgaatttctgtgcttccagctcgtgatcagaggctgagatctcattgcggatatacatacgccaggtcggcatgatcaggatctggttcttttttaccttcatatcatgaagctggtcaaaacgacacagtcccagctcctgcacatagccttccggatatccgtaccggtcattgacatatttccactcatcataggtactggtaacaaaaaggctcatttttgtatggggataatacagaaaactaagatctgccgtaatgatcccatgctgcaggaacgcccgcttgttccgtaggattccgtaaacctccagcacatagcagatggctgcgtttggttttcccattttctgggagctgatattttttgatgcagccagatagtagatccagtggcggaagcttccatactggatcacaggtcccagatcttttacccgggcataatccggagattttctattgatggcgtacactgcatcctcactggtattttctctcagatatttgtacagccagaatccgttatcccggcattcattctctgtatcacagagaagccagagatccctgcgaaaaagtctgtagaccatcgcaatgggaaatgccaggataaacttgatgatgtgaagcagatccccaggttttactcgtttcagtttttcaagaaatgtctgttccatgtttccctctgtttacaggatcccggtttattcctctgaccagtctccgttatcatcccaaacaatctctccgtctccgctgtcatctgtatctgtactgttgtcaagagaatcgtcaccgcttccgctgttgctgctgtcatctacatagtcgccgctattatcactgctgtcatagtttccatcatcactgctgttgtcgtagcttccgtcatcgctgccgtcgtagcttccgtcattactgctgtcatagcttccgtcatcactgttatcatagcttccatcatcactgttgtcatagcttccatcgctgctgtcggaagaagtatccgtgataccggaagaactgtctgtcagatctgaagcatctgtgctgtctgcggaatcactgctgtccgcctcactgttatccgtttccacattgccaatagtgctcttctcactcttgtcactgaggcttgtataggtcaggtatgcttctccgttatcgatcatcagttttgccttttccatatcgctcagctgtacactgtagatctcataggcatttccgtctccgtctacgatcttcatatcatagatggcatctcttgcagaatccggggtgtaatacatctgcacctgctccgcatctttgatggtagcttctgcaggaacaagacttttgccccattcttcccctcctgccgcgcggagatagatctcacggatctctcccttcgtgctgttggtaagataaacaaattttgcagtactggtctttacaccgatcagcttcggtgcaggtgtagatgtgggaagcggtgtggatgtagccggtgcagccgtaggtgcggctgtaggaaccggtgttggtgtcacctctgctgtttcctttgatgattttccacagccggcaataccaagcgccgtcactgctgtcagtacgatcaaaagcttcttatatttcataatgattacctccagattgcagttttatgctaaaaatgtttttccaacgaagtatccgagcaccaggataccaagaatgatcctgtaccagccgaatactttaaaatcgtgtttcttgatatatcccatcaggaatttgatggcaagaatagataccacaaaagataccacaacacctacgatcaggatgatcagctctgtggagctgaaggcaaaaccgaatttcaccagtttcagaagacttgctccgaacataaccggaattgccaggaaaaaggtaaattccgctgcaactgtacgggatgttcctgcaaggattcctccgataatggtagatccggaacgggatgttcccgggatcacggaaagcacctggaagcagccgatgatcagcgctgtcttaaaggaaagctcatccagtctggtgcaggttggtctgcggcgtttgttgtagttctcgataacgataaaaagcacaccataaacgatcagcatgatggcaacgaccacatagttataaaatttcttttcaataatgtcattaaaaggaagagcgatgatgatcgtcggcagacatgctaccaggatcttaaaccagaggatccacttatccttatcacagtatttttctacaaaagtaaggacagttctgggtactgccggctgtttacgcagtgccatctgtgttttcttcgggatttttcttatgtaaaaaggccacaacttgttccagtacagtacaacaactgccaggatcgcgccaagctggatcaccaccaggaaaaattccataaatgcctcggatacattcagcttgataaactcatccacaaggatcatatgtccggtactgctgatcggaagccactcggtgattccctccacaataccgagaaggataaccttcagtaattctataaaaatcatgttaactcctttctaaaagcaagataaggacagggccggtatgtgaacgacgaccccgtccttatcagtatattacatatttgacaattcgtaaacttttaattttttatttcacaaaatttacaattttttatcgattgtcgatggtggcgatatctaccagagtcaggtggttcaggtctgtattctcaagacttgtgaccagagcctctgcagtatcaaggcttgtaagcacattgacacctgtctcgatggcattacgacggatcacgaaaccatccttctggtgctcaacaccctgtggcggtgtgtcgataacaacatcgatcttgtggccaaggatcaggtccatcaggttcggagacggctgctccagcttgttggtacgtgttaccttgattccgttttcagtcagtacgcttgcagtacctcttgttgcaaagatacggtatccctgagcctcgaaacgttttgcgatcggaatgatgtccttcttatcctcatcttttacagtgatgatcatctgtttgtgcttcggaagacggattccggctccgatgaaggctttgtaaagagcctcgttaaaggtttttgcaataccaaggcactcacctgtggatttcatctcaggtccgaggctgatatctgcgcccctgatcttctcaaaggagaataccggcatcttgattgcgaagtactctgcttctttctgaagtcccggtgtgtaaccaagctctttgatcttatgtccaaggataactcttgttgcaagcggaacgatcgggattcctgttaccttgctgatgtacggtactgtacggctggaacgcgggttaacctcgatgacatatacatcctcgcctacaacgatgaactgaatattgatcataccgataacatgaagtgcctgtgcaagacgacgtgtgtattcggcgatggtatcttttgctttctggctgatggtctgtgccggatatacagaaatactgtctccggagtggatacctgcacgctcgatgtgctccatgattccagggatcaggatgtcctcaccgtcgcatactgcatcgacctcgatctctttacccatcaggtacttatcaacaaggatcggatgctcctgtgcgatctggttgatgattccgatgtactcttccacgtcctcatcgctgacagcgatacgcattccctgtcctccaagtacataggacgggcggacaagtaccggataacccagctcattggctgcttttttcgcctcttctgctgtgaatacggtatgtcccttcggtctcgggatctcacatttctcaaggatggcatcaaagagctctctatcctctgcagcatctacgttctcagcagatgttccgaggatcttaacgcccatcttgatcagtgcctctgtaagcttgatggctgtctgtccaccgaactgaaccacagctccgtccggtttctcgatatttacaacattctcaacatcttccggtgtcagcggctcaaaatacagcttatctgcaatatcgaagtctgtacttactgtctccgggttgttgttgatgatgatcgtctcatatccttctttcgcaaatgcccatgtacagtgtacagagcagaagtcgaactcgataccctgaccgatacggatcgggccggaaccaagtaccaggatctttttcttatcttttgtttctacagcttcattctctgtctgctcatcgccgtatacagaatagtaatatggtgtcgctgccgcaaactctgctgcacaggtatcaaccatcttgtatgctgcacggatgccgtactctttacgcaggtctttgatctcagcttctgtctttcctgtcaggtctgcgatgatgtagtccgggaactccagacgttttgcttccagaagaaggtctttgtccagcttctgagttttcagagcctgctccatctcaacaaggatagccagcttatcgatgaaccagatgtcgatctttgtgatatcatgaagcttctcctgggaaacatttcgtctcagggcttctgcgatcttccagatacggcggtcatccacaatgttcagctcgtccatcagttcttcatcagaaagatgtgagaaatcataggacatcagactgtctacatgctgctccagggaacggatagccttcattaaagcaccctcaaagttatggcagatactcataacctcaccggtagctttcatctgtgtggtcagtgtacgttttgctgtgatgaatttatcaaacggcagacgcgggatcttaacgacacagtaatccagcatcggctcgaagcttgcatatgttttgcctgtgatggcgttcgggatctcatccagtgtgtagcccagtgcgatcttggctgcaaccttggcgatcggataaccggtagccttacttgcaagtgcggaggaacggcttacacgagggttaacctcgataacgcagtactcaaagctctccggatgaagagcgtactgtacgttacatccacctgtgatgccaagctctgtaataatgttaagagcagatgtacggagcatctgatactctttgtctcctaaggtctgggaaggagcaactacgatggagtcaccggtatggacaccaaccgggtcaatgttctccatgttgcagactgtgatgcagtttcctgcgctgtctcgcattacctcgtactcgatctctttccatccggcgatacatctctctacaagaacctcgcctacacgggaaagacggagaccattctcaaggatctcacgaagctccggctcattatgcgcgataccgccgccgcttccgccaagtgtatatgcaggacggagaacaaccggataaccgatagtctgagtaaacgcaacaccgtcttctacagttgttacgaccttggatgctgcaaccggctcgccgatcttttccattgtatccttaaattcctgacggtcctcagctttacggatcgttgctgctgtggtaccgatgagacgtacattgtgctctttcaggaagcccttttcctcaagctccatggcaaggttcagacctgcctggccgcccagtgtaggaagtacactgtccggtttctctttgaggatcagctgctctacgacctcaacagtcagaggctcgatataaactctgtctgcgatgtctttatctgtcatgatggtagcaggattggagtttaaaagtacaacctccatgccctcttccttcagggagcggcatgcctgggttcctgcatagtcaaactctgctgcctggccgattatgatcgggcctgagccgattacaagtactttttttatgtccttattccttggcattatttctctcctcccatcatcttcatgaatctgtcaaaaaggtaactggaatcctgtggtccagggcatgcttccggatggaactgtacagtaaagatgttctttccgttatatgccataccctcgtttgttccgtcgttgacgtttacaaatgcaggatgtgcgatatttttctcctcaagtccctctgcgtctacaacgtagccatggttctgggaggaaatatatactcttcctgtctcaaggtctttaaccggatgatttccgcctctgtgaccgtatttcatcttatgggtgtctccgcctgttgcaagagccataagctgatgtccaagacagatggcaaagatcggtacatcagagtcgtaaagttttttgatttctttaataatagaagtacattccttcggatctccaggtccgttgctgagcatgatgccgtccggattgtctccaaggatctcttctgcagatgtcagagccgggtaaatagtaacctggcatcctctctcattcagtgagcgtgcaatgtttttcttggcgcccagatcaagaagggcaaccttcggtccgttccccttaagcacttccttttcgcggcaggaaaccttctctaccacttttcctgttgtatatgcttttaatctggggatgattgtatccaggtcatagttctcgtcaactgtgatcattccgttcatggttcccttctcacgaaggatcttagtcagtgctctggtatcaattcctgcgattcccggaatgtcgtttttgctcagaaaatgctgaatggtgtctacgcttctgaagttgctgggaactcgtgataattcgcgtacaataaatccgtcaatccacggcttccttgattcctggtcatcataacagattccgtagtttccgatcagcggatatgtcatacacaccgcctgtcctgcgtaagaaggatctgtcattacttccagataaccggtcatggaagtgttaaagacaatttcactgatgacttcccttgcagaaccaatgctggttcctgtaaatacatggccatcttccaatatcagaaatgctttcatacaatctccctttctttgttctcttattttatcctaaatcttcaagattgtatcacaggaatcgtcatttttcaacaccatatgcaaaaaaaatgtataaaactaactcaaaatattttttttgaatttttttaatttttttgaatttttctattgacattatccaattcctgagttattataagtgagcagtcgacgagcggagcaaacaaagcaaagcaagccggttgaaaaaatgcaggaatggcggaattggcagacgcgcaggcttcaggtgcctgtggtcgcaagatcgtgtgggttcaagtcccatttcctgcattcttttttattttatccaaaatcaaaaaaacagaagcgcccaacaccggcacttctgtttttttatttatttttctttttcagaaaagatctcgctcccgccccagagaagcgcacctgtaaatatgaaaagatccgaaatattaaatacgaccttcttaagcttcggattttccacattcaggctcacataatccgtgacgtatccctttctgcgacgttccgtataattattcagaccgccgcccaggatcatggaaagcccaagcttggatatgcgtgtgcctttttctccggaagtacgtatatactcccagatcgcaccgcccagcaccatagatgcaagatctctcaggaattctttatctttgttttttaatattccaagcatcatcccgtgattatggcagtttcttacgatcagcctgcctcccaggcacttttccttcagatctttcttttccgatgtgttgattttcttctttatataatagtccgtaccaaagatccccgccgtcagtaaattccacaacattattccctctccttatttctgtggtctacataatactcaggcaggctcccactggggaaagcctgccttatatgcttatggttattctgttttttcttctgttgtttctgtattttccggatcagccgcaggctcctctgtttctgcagatcccacttccgttcttttctcttccaattccggatctgatcctgatgtttctgtttctgacgcttctgcggtttctgctgtttctactacttctgacgcttctactgtctcttccggatctgctaccacttctgtagcttctgcgttttcttccgcttctgtctccggtacttctgtcacctctgcctcagcagcctcttcaagctcctcatctgcctgctcgatcacatcagcagctttctcttccagctccgctgtaggacacgccgctccgcaatacggacagaagctggcctcccgcatcaccgccttatggcaggccgggcagaacttctcccctttactggcagcgatcgcatctctgtagtgatccgcctccagcatgtgctggctgatttcctcgcagatagctcccgtctcaccgtcaacggcttctccctgctcataacgtgtatagatcatctttccgatatccatcatcagcttttcggtcatacgctcctgtgcagagagcttgttacggatcttctggatctcatagagattctctgctctggaacttaagccctttgcctttcttgtcagtgtgtttcccagatcatcccaaaaactgctttttgccatatctgtcacgctcctttatatattaaagaatcttcttgtttcttatccttccagtgccgggatctcctgtccacgcataaggatcttcggacctccgttgccctgaatgtatccctctgtgatcacgacctcaccgatattgtcatccttcgggatctcatacatgatatccagcatatattcctccaggatagcccggagagctctggctcctgtatggcgttccaatgccttacgggcaatggcatgtaaggcaccgtcctcaaactccagttttacttcatccagtgccagaagcttcttgtactgtttcagaatagcattcttcggctccttgaggatcttcacaagcatatcttccgtcagcccgttcagggtaaagatgatcggaagacgaccgataaattccgggatcattccaaatgcacggagatcatctaccgttactttctccagcacatgcggatcatcatcatatttgtccttcagatctgcataaaatccgatagacgcctgtttattcagtctttctttaatgatattctcaagatccgggaacgcaccgccacagataaacagaatgttccttgtatttacagtcaccataggtaccatggcattcttgctggtagcacctaccggaacttccacttcacttccctccagaagtttcagaagtccctgctggacagcctctccgctgacatctctctggttggtattcttcttctttgcgatcttatcgatctcatcgatgaaaatgatcccgtgctctgccttctccacatcattatctgcagctgcaagcagcttggatactacgctctcgatatcatcaccgatataaccggcctctgtaagagatgtggcatctgcaatggcaagcggtacctgaagaagtctggcaagcatcttcaccagataagtcttaccgcagcctgtaggtccgatcatcagcatattggatttctcgatctcaatatcatccatggtatctgtggcaactcttttataatggttgtatacacctacagacattaccttcttggcatattcctgtccgatcacatattcatccagagttgctttgatcttatgtggtgcaggaatatctttaagatcgatcaccggcttcggagtctctgattttttcttgatcttcttcgcctggtttccgggattctggaaactgcccagatcgatcatgctcacattcggcatgttaaaaagatcggaataatttccattgttcatctgggtgttcatagtatcaaagcttttctgcatgcaatccgcacagatatgtatatgattaggaaggtcgatcatcttccctgcctgactctccggtctgcggcataaaaaacagaatttctcgtatttctgctcctggtcattgtctttattattatcaaactgatctgccataacatttcctttctggtttttattatgcatattatagcacataatcccgctgtatcaaattaagtttttataaaccggggagctgcatgttcttatgcagctccccggtttataaatggttatcctgtattttcttttatttgtcagaagagggtttgcttccgagggtcacttcaaccgtctgttccttgtactctccgctgttcgctctggagatcaccacttcgatggtttctcctgcctcataatactgcagcttatcaacaaggtcatccttgccgcttaccttctgtccatccagcttcacaatgatatcgccttttttgatccctgcattatctgctgcgccaccttccgttacctcagtaataaaagcacctgccggcatattatacatctggatggcttctgttgtaagatcggcagccttgactcccatatatcctaccttggaagaatcttccaccttatccctggtttcgcggttcatcagttcttccaggatcggctctgccttggagatcggaatggcatatcccatgccttccacctgactgtctgcatacttggccgcattgataccgatcacttcaccgttcatgttcagaagtgcaccgccactgtttccgggattgatcgctgcatcagtctggatcagtccgctggcttctccgtcctctgtactgatgcttctgttaagggcacttatccatccggaggtaactgactgtccatagcccagtgcattgccaatggcaaccacctgctcaccgactacaagatcgtccgagcttcccatctgtgcgatcttgatctcctccatggtctcatccggaatatcggatttctccactgccaccactgccagatcattctcttcatcggtgcctttgatcttggcagaaactgcgttatccacatccgcatctccatcggagctgcttgccatagcctgggtttcttcttccgctcctaccacatcactgcctgcaaagcacacagtaagtgtagtcgctccagataccacatggttgttagtcgcaatgagaagctcgctgtcattttctcctacaataataccggaaccacttcctgcactctgatactgcctcgttccatatccgaaaaagcttgggatttcctgcacactgacagatgtaatggcaacgatagaagacatggttgcctgggctacaccggccactgtaccactctctgccacaatatccttcacagtagaatccgcagagctactgtcagtactgtcctctgttccggtaactgtttctgtctttccgatcgttgtactgctgtcatttcctctgtatttatctgctgcaatattcacgccctgaaaaactactccggctaccagcccaaagatcacagccagtgccaccgcagtggctgctttctttccaaagctgttgttgcctgaaaactctctctttttccgcggctttttgggcggtatatttccaccggcataattaccagcctgaggctgatgcacctcataatgtccgtattttggtttttcctgcgaagcgccttcactctgtccggcacctgcataactgtcctgtccgctctcctgcatcctgcgtccctcagaataaggatgcgtcagcggtttctgttctgccgaagcattcttatcctcatccggcaagcctgtcccccatttattctcttcactcatgcctctggtgctcccttctatgttatctgatgcatgtatctgttactgctcactccgttctcagtaacatttatttctcttataaaagacagtttaacagggaattgtgtttaaactgtgatatctcttttaaaaaaccgtgacctgctcttatttgttctttttccagtattccggattcatggtgcaggagcggatcattttttcagggagctttttgtatcgttttccgagaaaatatccggcgtatttggagacactttgcaaaaacagtccggggatcagccatatgtggcctgttttcagaagatatgccatgcttttttttaccagtcggatgccctcaccttcagatggcacaccctcaaaaacctccggatgctccgcctgggaaactcccagatcaaaattcctgtggaactgctgcatacaggtgtaattgtgagaatgatatacacgcgcttctgatacataggcaactccatagcctttttttaccatccagcctgcatagatcatatcttcattaaaaatagcatgctccggaaatccaccaatctcatcatagatcctgtgatcataagcagcacagacgttggagcagaaatatgttttgatcccgtaggtctgtacatctttttccgttttcagacaggactgttccggataattaaaggaacgggtatatttttccagaaatctgcagtccttttttggaagctgacgcgcataagcggctcctgcctgtggattctctgcaagagctcctaccagtgctccgatcagttccctgtctgccggcattgcatcctgtgtcataaatacaaggatctccgcatccgaaagctctgccgcctgccttctggtaccgccatggtcaaattcttcttttgtaagatgccggacttccacaagcggatattcctgttcccaggtctctttccagaatttcttttctgtattcatgacaaggatcttattgataggatatttctgtgcgctgagtctttccagcagtttttcaaattcttctcccggacggtatgccgggatgatcacgtctgtttttaatgttttcatatttgtctcctgtccagaaaggaccacccgttactggatggtcccttctgctggttgcttattttgatgttttattcattctccgaataatcttctccgtcggtataatcgctataatccgtatcggaatcgcctccggaatagtccgtatctgtgctgtaatcgtctccggaataatccgtatctgtgctgtaatcgtctccggagtaatccgcatcataatctgtgtctgtgctgtaatcagcatcatcacttgtgtccgtactgctgtaatctgtggatgtatctccctgccacgtgtacgaatcatccgttgcgtcattcggtgtatctgtcaccgcaggtgcagtgtcctgcacgtcgcctccgcctgcgatatttgtgatctgggcacttctgttgagtacatcctgcgtcggagtgtaactggtgtctccatacagaaactgatgcatcttcagaacattggattccagtgtggtaggtacgataacgctgccctttacctgggcaaatttataatcgttggggaagcctgtagtttcatcaatactgtagccgatcatagccgggatcatcttcaggatctctgttttggaaacagaagttttgaccatcgggaatacctgatccataatatcaaagatagtggaaagtcctgcctttttcgccttatctacgatcatctggatcactcgtctctgtctctcggtacgtcccatatcaagacttgcagtataacggatacggcagtaggaggtagcctgtacaccattaagatgataggtatctacgattgcttcctcatcctccggcttcggatccggcagttcgatcggtgtgtagctctttccggtttcctctgatgtctccacacagtaattgttcatatgaacgatctccgcataggaaagagggatgtccaatcctccgaggcagtctaccacagttaccagcgcattaaaatcaatggcaacataatctgtgatattcagatccagattcgtattcagcatggaaaccgcgttggtcggtccgccaaatgcatatgccgaattggctttggaataggtatcatcctttacattgagaagggtatctctatagacagacacaagtttgactgccttcgtatcattgttgatactcgcaatgatgatggtatcactgttctctgtattcagcttctcattcttgcttctgtggtccagtccgaacagtgcataggtggtatatcccgtcatctgcggtgcctgatcattggttacaatatcctggtctgcaagatctgtttcctggatgtcgatcttatccagtttggctgagatctgaccataaacgaacagacctccgataaacaggagcagtacgacgatctccaggataaataaaatcttcttgctttttttccgaggttttgacatcttttccttttcccctttttagtatgcgttcttattaataaatcctttgaatatggtaagaaacatgatctttatatcaaatcccacagaccagttttcgatataatacagatcacactctatcctttttctgatagaagtatctccacgatagccatttacctgtgcccacccggtaagacccggccgcacctgatgcttgaccatataacgtggtatctcctccctaaacttttctacaaaaaacggccgctccggtcttggtcccacaagactcatctcacccttcagaatgttaaaaagctgtggaagctcatccagactggtatgacgcataaatttaccgattccggtaactcttggatcgttctttactgtccacgcctttttttcttctgattctttctggatctccatggaacggaatttatacatccggaaagtctgattatgaagcccgacacgttcctgcttatagatcagcggtcccggcgaagtcagcttgatcaacatacacaacaccagcatcactggtgaggacacaatgatcgcaacgatcgcgcctgcaatatccatagatctcttgatcagtgcattaaacgtgttgctcaggggcacataccggatattgatcaccggaagcccgagaatatcttctgtatatggtttggtcggaataatattattataatccggaataaattttgtgtgcacgccggatttttcacagagtgcaacgatctcttccagacgataatactcacttaagcccagggtaatggctatctcatccagacgactggatggaaggatgatcatcagattggcgattcgaccgatcaccttaacgcccttataagtagtgcctgccggcacattgtcatccagtatgcccctgatcacgtatccccattgcggattctgcaggatcctgtctacatattcctcggcagcacggctgtatcctaccagcagcacctgtttctggttcattccttttttgcgcatatcccggagaatgtaaaatataaccatacgcacaaaccattccaggacgatattgatcacacagaaagaaaccagagtaagacgggaatagtccagctctttaaaattgtaaagtgcaaacatgatgataaggagccctaacgcatttgccttcacaattccggcaagtacgagacgacgcccctgcattcgcatcggtgtataaagatcaaaggcctgataaagaagtaaatatcccggaataatgaatatcagcataaacatatattcctggacggtcttggactggaccgccgaatgctcaaaaattccctgaaaacggatcaaccaggccagggcataggaggccgcgatcacaaatacatcgatcagcatatggagacgactgaaatttttctggttgtctttaatcaatttccgccacctcatttaagttcattgcttttatcttataatagatgaaaaccaaaagcaataaaatcttccctccgaaatataaaaattctatgaaaatatggtgtcttaaccggcaaaacgcctaaaaatgttgatccagagttcaaactggagctgtatataacgcggaagattcctcatggaaaatctgacttttttgtttttgcggctgatctgaaagccgtttttgatgcctgcaaggtactcacgtccgaatcccttggacgcaaaaaacaggatcttcgcaccgaatcccaccagaaaaaacggaaggttcagcacgatctggagaaacggcatattcttatagataagataaatattgtttctggaagaataccggatcttaaactgattatatctggagccgctggtgccgcttcctacatgataaaccttcgcttttggagcataccagttctgataaccgcagatcctggcacgatagccgatatccagatcctccagataagcaaaatgctcctcatcaaaatctccgatcctgtcaataaatttcttacggtagatcgcagctcccgcacaggtggaaaaaatcttctgctctcggtcataatggcggatatccttgccttttcccctggcaaaagcccagccaagggcacagtaataatttccggcatcatccatcttgtccctgtcatgaagctggatcatctttgcctgacaggaaaatgccttcttgtgtctgcgcaaggcagcaaccatctcctccaggaaatccggttccgcttccgtatcattgttcagaagcagcacatatggggaacgtgccgcatggatcccttcattgacggctctgctgaagccgtaattctccggaagctgtatcatgtgtacccatggatattccgctgaaacaaatgcacagctgccatcagtggaaccattatccactagtataacctcaaaattacggatagtctgtctttcaagactggaaagaacaccatccagatatgccattccgttaaagtttggtatgactactgatacttcctgcattgctttatcccttcttctttcccattcccggaaggggcttcagggaataattccatttggttaaagaaagatttttgttatagtatggatctccttttttcaggatatccagccagtgacagcgcatgtattcgatctccgtctgaaaacggcggaccttttcctcgctgtcctcagtgcctcttgacttggattcgtaatgatagagcttcacatacggatcatagacgatcagatggccgtggctgcgcaccttcagacagagatccacatcattaaacgcaactgcaagctcttccgtaaagcctcctgcctccagaaaaacttccttcttcatcatcatacatgctgcagtcacacagctcatatcctgcagaagagaagccttatggagatatccggtacgctctgccggcatattcacaaacatgttcccggcaattccgcccattcccaccacgcagcctgcatgctgaatggtgttatccggatagatcagcttggcgccaactgcacctgtttccttacgctggcacacgctcagcatctctgacatccagtccggattgatgacctttacgtcattattcagaaaaagcaggtaatctcctttggcatggcgcaccccgaaattgttgatggcagaatagttgaagccttttttccagcggatcagatggaccttgggatcctccgaaagctttctgtaataccggaagatctcttcggagctgctgttattctccacaacgatgatctcgtaatttttgtaggcagttttttcaaaaatggattccacgcaagcctgaagcgtttctttctcctcacggttcggaatgataacagaaaccagaggttctccctgcaccggatacttcacacggtaaaatccaaaatccggagtatgctccacggttcccggagttccggtccgtttgagattcccctcaatggcacgtctgccggcttcaaaagcatacatcttgcttgccggattatctgctgtggaggatttgtgggtcctccagtgataaaggatctccggtacatggaccacttcccttgcctgctccacacagcgaaaaatgaaatcataatcctgggcgccgtcaaattcccgacggaatccgcccaccgtctgcactacggaacgtcttaccaccagaaaatggcagatataattattggatcttaaaagatccgggttaaagtccggtttcagatggggctgaaaatgttcagaaagatctgtcgtgaccttatcctcatctgtatagatcacatccgcctccggatgctcctccagtgccgccgcgacctcatacaatgcattaggtgccagcagatcatcatgatccagaagtgcgataaaatcaccctctgccatggcaaaagctgcgttggtattttctgcaatgccaagattctctttcagatcctgatagcggatcctcctgtccatctctgcataggatctcagcacagtctgcatgtccggatcctccgggcttccgtttgccagacacagctcccagttctcatatgtctgtgcaaggagagagtccagcatctgtcttaaaaaacgctccggtgtcagatatgcaggtaccacaatgctgatcagcggcccatccggaaatttgcgtttccgctgcttctccagtgtttcctcgtcaggtctgtatgcctcataccatggtccgtaaggaacctcttccggttcaaaacgctcatgaagccggatccagaactctttcaggccataatgcttcaggtatcttaagcccttctgtactgtatagggggaaagcttctttataagtctgtcccattggatctttcctgtagaatcatctttactcatatattatctccgtattactcagtttaatgttactgttcactctgttctcagtaacagtttgatgaacatattttaccattccatcattttttttgcaaggaagagaggaaatgtgttatactgagcttacgtatgtattgcttacataagaattattttttatacaggagtaccatttatcatgaaaaaatcaagaataaccacagcgcttctggctattgggatctccgcttccatggtgttccagactccagttttcgccacagaagaaaccgctgttgctgtatcctccggtgttaccaccaatgggatcagcggatggcctcaggggcctgagatcacttccgcatctgccgtaatcatggaagatacttccgatacgatcctctatgccaaggatatggacaccacgctttctccggccggcgcagttaagatcatgacctgtcttctggcactggagaacagccagcttgacgatcaggttaccatgacagaaaccggtgtatccggtgttacagacggaggcgctcatatttcctcacagctcggagaggtatttaccatggagcagtgcctttacgctctgatgctggcctctgccaatgacattgccctccaggttgcagaacagatcggtggatctgtagatgcctttgtccagaaaatgaacgaccgtgccaaggagctaggatgtaccaatacggtattcaccaatcctaccggtctcccggatgacaaccagcataccacagcacatgatctggctctgatcatgcaggcggctatccgtaatgacagcttccgcaccatctccggatccacctcctatacgatcccggctaccaatgtttccggcggtacccgtaacctgacaagctcttttaccatgacaaatcctgcatccgcttcctattatgaaggatgcatcggcggtcgcgaaagtaccaccactgcttccggaagcgttcttgtcacagctgcgcagcgaaatgggactactctgatcgctgtagtcatgaacggagctaccggtcagacagccaacgaagcgatctcacttctggattatggtttttccaatttccagcttctggatctcagcgaggatgattttcacattctgtccggaggcactgtaatggttccatccggtgcgaccgcagacgacctgactacggaagatacggaatctgacggtcagatcttacgcacctattcctttggcggaactcaggtgggaactgcagtagtcgaggattcctcccaggaaagctcttccgatgtactggaaaatgatgaaaacatggattctgcaaaagcttattccgaatccagatcccagatcccgtattttgccattggcggtgtgggcatcctgctccttatccttctgctgtggcgcatgatccggatcatccgttcctgatcttggttcccaggcaaatatatttcagaatcaaaaaatccctcctatgcaccggtcatatccggatacatagaagggatttttttctgccatctcaccatctgggtgtcagccataaaacggaactaccagaaagatatagcataaaaacggcgaagcagccagaagtgctgtcaggacccggtatatccacattctgatattttctttttttacaaaacgctcaagcagacgattccagccggctgtcacaaaatacatggctggatacagtgccggcatgatataacgtccctgtgcctggttgtcactataatatacataatacataaacagacccacagggatcaggatcagaaggatcagcagcagatgaaagatcccttttctatcccatttatcgtacacggttattgtttttatcttcagcttttcacttcctgctgcttttcgttcttttaccacagtacgtttcttcggataaaacattcccagcatggttaaaataccgatcccacccattccaaagaacaggaaatatgccttactcacactataaggcatataaatctgcatcaggccaaaggttcctataaaacttaccagcactgtcaacagccagttatgctgccagcccggatcctgatacagaaggatatccttccatgaccagttcagcttctccggtgtggggtatctggacggcctgtaatcaacagccgcatatttttccgcacactgtgcacaggcttttcttccgataagatctccgtcatagagaacggcatttcgtataaaccaccagccgcataaagcaagggttactgccgcgatcacgatccctctctggaacagaaatgcaactctctgttttaccggctcttccctgcacagaaggactgtcaggcaaaaaaacaggaagctgcataagatccatccgtaggtattatagtaggacagtgcacagactgccattccaacagccagaaggatcgaatttctgaagctccagtctctcgcttccagataacaggaccaggaatacaggatcatcgccatggataaaagcgccagggaatccgtgtttacataagttcccagaaacaatgcctgcggcataaagcctgccagtgcggcaaacaaccatcttccttctttcggaaaaagctttccagatgctttcaccacaaaatataccgctccggtcacaaaaagcacatctgccattctcgccgcatggagcaatccggctgcagatgcatggaacagacctgcgattcccataaatacagcagataccatataggaaaggatcggataataggcataggaaatcccccatgtcgcatcacggatggttggctcatctccaagaggcagctttcccggatgctcatgaagatactgtgccaccatgtagcgcattttttcatcggggcctgcccccaggggctgcatgaacgcccatgcagtcaggagcagaaatgctgccaggacaagaacccctgcctgagctctctcatccttccagatttttttcttttccaaaatataacctcctatatccgcttcagagaaaaatcctggctctccagtgtaaggttcggattatagtaaggatctccgtcacggaggatctccggccagtgcttctcaaaggaagcgatctcgcggttaaatcttgccaccttctccggtgtatcctcaagacctctggatttggattcatagtgataaagctccgcataaggattgtatacaaccagatatccggcttttcccagacgaaggcagaaatctatgtcattaaaggcaacctggaattcctcacttaatccgtgaaccttatcaaaggcctcacgcttcaccatcatgcaggctgcggttacagcgctgtaatcctgggcacagatgatcctgtggcagtatccggtagcgtctctcttctgctgcacaaagcagtgtcccgcaatgccgccgaagccaacgactactcctgcatgctgcacggtatcatcctcataatagagccgcgctcctacagctcccacatccggtctcatacagtatcccagaagctgctccagacagtccgggctgatgatctccgtatcattgttgagaagaagcagatagtcacccttagcatgagcagctccgaaattattgatggcagaatagttgaaaataccatcccagtacaccacatgggctttcggattggatgcttccagctctttatagtaagcaaaggtctcatcctccgtactgttgttctccacgatcacatactcataattgcggtaagttgccttttcttcgatggaatcaatacatctcttcagatcatcgacgtgatccttgtttgggatgatgatggagatcagcggtttttcctcccagaggaattttgtacggtaaagtccaagatattcacctttttcgatttccaccggaactccgagcctgtcataatgagccttgatggcacgtgctcctgcatcaaaggcatacattttgctttccggattctctgctgtggaatcctcatggcatctccagtgataaaggatcctggggatatgatggatctgctctcttcccgcagcttccacacagcggaacacaaaatcataatcctgtgcaccgtcaaattcctttttcagcattccgatctgatccacgatctctttttttacgacaaaaagatgacagatgtagtttactgtacacaaaagatcaatattgaagtccggtttgaaatgcggctgaaagaatttgtgcccgtccatggacatcttatcttcatcggaatacagaaccttaagctccggatcctcattcagcgctttcacacaccggaacaaggcgtccggcgtcagctcatcatcatgatctgcaaacacgataaaatctcctgttgccgctttcatagccgcattggtattctctgcgatctgaagtgcctggtcgttgcggatcacacggatcctgtcatcacttttttccagcctgttcagataatcggtaagaggagaatctgctccgcttccgtcggaaagacagagttcccagttcccgtaggtctgggcttctatggaatctaccagctgctggagatatttttccggtgttttgtaaagcgggatcacaatactgaattttggattcctggaaaatttcgtttttctttcttctgcaagctctgccttgtccggcagatgcttcacgatccatttggaataatccaccggacggtttttacggtccagcacctttccaaatacctttccggtaagggctgctgccccgtgaagcttcatgtaacggcttcccttacggaaatataccgcagctttctccgcaaggcgcttctgtggctgcagatgtaccagacgaagcgtccgcacattgcctgcctcaaatacaatgtagaattccttcacactgtcataatggaattcaaagaaaaagccgctcttctcatcgatttctgtttcctggtactgactctgtacatccacacgtttcagtctggtgatctcgcaggggatttccttccggctgcgatcctccagacgtatggtcagggggctgttaaaggctgcccagccacggacacggcagatcttttccccggcttccacctcgatgctctcaataaagtactgcggttttccctgtttcctgtaaagctgtgctgccgaaacagaaaaccaccggatacgtttttcaccctttaccgcataaacaacaagcttctttttgccctccaaatccggcaggcagatttccatctgcacacgttctccgtttaccagatccagatccttaaagcgctccagggcgctgacacgctcctgggcactgatggctgccggaagcttttccccgtcaagaacggcttccggcttatgatccttcggccaggttccctgaaggtgatacagagaactgtccttcaggtcaaacctgtccttttctacttcgtatagctctcgctgcataacaattcctccattgcatcctttccggtatttactgtaaggtaatgctccataaccttctgatgtgcggcctcacccatggcttttctggccttctcatcagtaaccagagcttccagggcattgacccactcttcttttgtggtgcacatccagccatcttttccgttttcgaccacgtattccatctcacagttacggctcatgacactcggaacctttacaagggcagcctctgtccacttattctcggatttacaccagtggaacaggctgttctccagcggcatcagattgatatcaagccctgcgatcacggcaggcagctgtctccagtccataaacggaagcttctcgatgcggttctgcaccggctccattccggattcatccagcacacccaccagcttcaggtaaacctccgggtggcgctccatcacctccagaagtgctgcctccacctgggcaaaatcctgatcatgcgttttggaaccacttaaatatccgatatagatccggtctttagccttgtctgtctgctccacagcctcgtgagacaggatctccatctccatactcatacagttgcggttgatcaccaccggtttttccggaaattcttcccggatctctcctgccagtgtctccgtagatgtaaaatatccgtcgcagaatcccatacatccgcggatacggtctgtagttgtgcggaagtcactgtactcgcttcccttcaggaaatgcagcccggaaattttttcgtaattaaataccaggtcatccacatcatagtaaacagggattccggctgctttcgcccggttggcaagcatttctgcttccatcagcttgctgcagcggtacatcacgatcgctgtatattcctcgatcttttcctgctctgcctgatctatctggataaacttcgatgcatagcctttaaggatcagctgctcccggaaatgctccacacgatatctggaggcaaaggaaatctcctctcctacgaaaagaagcctgcgtttttccacaggaagttcattttcgccgagggttttccacagagaaatcatctcttccacaatattctccggcttctcatctttcaggacaaggcccttggcatagcgtttcacacgttctacaggtgcacctaccggaagtaccgctaccggaaatcccatggaaatgatctccgaggttgtgtaagagaaggtctccggccatacggacgggatcaggaacatatcaatatcctgctccagggtaagtcttgggatctcctctcttgtatatcttcctgtctgggaaaataccggactttcgatctcttcgtcggaagtaccgatcagtctcagacggatattcagtccattctcttcgatatatcctgcaagcgccttcacaacctccaggccttttttgtagcagagtacgccgataagaccaatgttaaaggtctctgtggtttttttattttttttcactgccggaaggtaatggggtgcatgcgggatcacatggagattgtatacatccggataagcacgcttgaacagccttgccgtatcatcggaaaatgcacggatctcatcacagtttgacagaaattcccggaattttgtacgccagagcgttccggttccgtattctgtgcaggcattgctgcggttatccggaatacatttatcgcagacctcacaggatggaacaccacagtattttccttctgcatcgatcagattcactgccggacaaagggcaaagaaatcatgaagaagcataaggagcttcgcaccctgctctctcttaagacgcaggatacgttccagggttccgtaaagatcctgataggtcacaagctcgttgatccagatctcatccacacgcatcagctcaccaagggcagtttccagatcatttgcaaaaaattccatctcatactgcttatactgatacgtaaagtaaaaacgattgcttacgatattatagcggatggtcacaaaacggtatccttcccgcagagccagacgtcttttctccacaagataagccgttgcaccgccgccgagatcatggtcaaaggccacaatggtaggcacatccagtttcctgttgagaagcttcatttccacgtaaagtcttaccggacgaagcgggtctcttctgcagtaatccgcagtatctttgttgtaatccggatgcttgcggagcagtgcctcactgtgctctttcaggagtctctgcttttcctcagacgggaagcttccaccatgcttgtgatatacaaacaggttatccacatgcacgttctcatagcctgcagctatggcacgctggcaccagtcattctcctcaccgtagccttttccgaaattctcctcatccagaaggccaacctcctggatcgctttcaggttcatacccatgcagaagcccacaccggtaggcatagccggatactgcggacggatcatgcggaattcatcatcgatctcccacagcggcattccctcaaacagtttgttatcccggcagaaatccgggaagctgcagatggttccgcaggtggtaaacggtgtagtagttgcaatattttcctttgcaaagatcggaagcatcaggcgctccagccactcttccggaacctccacatctgtatttacaagagccacatgattttccgccatctttaatccacggtttacagacggaagaaagcccatattggtctcattattcagaagtaccacattgtcatgctctgcggcatatttttccagatagtttcctacctcaggatccggactcttgtcatttacgatgatcagacgataaggaaccttcgttttttcaattccggaaaacagggcatcaaaatactccagtccgttgtaaaccggcacgatcacatccaccttctgctgatagactgcctgtggatatgcctttcttgtgctgcgtacatgacgctgtttgaaatggcggagatttccgatactcttcggatcttcgatcgcgtataccagaagctctttctgatccctggttcccgggatctttccgataaggaatcttccggtatccgctgcggttccgtattccaggaaaacagaagtctctgccggcgcaagaaccgttgccaggaaagaaaatccggcactttccgcatccggatttccaatggcattagccacatccgtacggtagatcgtagtacaggaagcctcctgaagcttctgtgttccctgataaaatgcgatccttggctgtcccatagacgcaaacgtcggatcaaaggcccagccaatggcatttaaggtgccattctcataatggaagaaatcaacactgcccatacaggtaggagttgtctccactcccatcactgctgccggctctgtatgatagcgaagaacctttttgaccagtttctttacctgcgcttttttgcctggatgacgaagggcctcttcctgcgcacgggctgcttcctctgcagcctgctttgcggcacgttcagcctcttttctgacacgctcctgttctcttcgtacttcacgctctttttcaaagaccagaagcttttccacatccggaagctcaaggcagtcaagttttccctctattacgatcctgtccacattttccgggtgcgtaacatcgataagataaaaaccatcggtggtaaaaaacgcagtggtactgttatccaccttcatatggacaccctgaggcacaagctccgcactgcatccgcaatccagacgctctatcctcactttcaggaaatgaccgtttgcaggattccagcggagatttcgtattcctttgataccggaaagcgcaaactctacccggaaacggtttccggaaagttttccctctgcataaagtgtatgctcttcacagaatccctcaccaagatcatagtacagcttgctgtgcatctggtgcttttctctttctctgttcaccagctctgttacggaaaccggcacttttttctgttcaaacgggatcagagaaccacagcccacatactcatagacgaaatgcatggtccaatccataaatatctcatagtctgtatagctgatatcaaactccgccatcatctcatcctcatgacataaccgcggcagctcagaaacatgtgtatacagttcatggatcaggcgccacatgataaaattcacaggcacagggaaatcaaacatccactcataatctatgatctgattttccttttctcccataaagatgttgctgcagatcaggtccacattggccgggcagacacattcgtaatcctctcttcccggatgatcaccaaatacctcgcggaactctccggtcctgtaatccacaatctgacgagccccgaaaaattcctgatagaattttttaagaagggccttgatctcttcaagatcttctttctgggcaagctctgcgatttcctggtgaagagtttttccagtaaggagcggataagagatctttccgttttctgccctgcagggaagattcttgtatttatcggatccggtaccctctgttccggttttttccagtttttccacaaattcctcagcctgggacaccatagcctctttttccgcacggacctctccgttctcccggacgatcctggtcagaagacggaacttttcttttcgctcctggttcagcttcacataaaggatttcctccgggtcccggttttcggtacgtcctgcctccacaagaaaagaattcacaaagctgtccaggatcttctctttttcgaaggcctttacgccttcactttctgcaaaaagatctgctgtcttatctgtgtatacaggatagcttcttccgtaggaattggtataaaggctctcatctgtaaaaatctctgtcggaaatttataatccggatacgggtagtaaaagcgcagaaaaggaaagccgctgttttccagcagctctcccagttcattcttggaaaaggtgcgcacagactgatttcccggatatccattgatcccgaaaaaatgaagatctgtgtgatcctccggtgctccggcaaagtacttcaatcccagtctgttctcaatggcgatcagaagtcttccctccggcttcagataagcgcccatacgctgaagaaatgtctcgtaaggagtttttccctcggtaaagctcatggcatactccagcacaccgtttactaccacatagtcgaatttttccggaaaagtcatgtcattcaggtttccaaccatgatcgtcagattttccttatccctgtttctcgcataattgatatctgcccgacgtttggaaagctccacggaagtcacatgaccggccttgcggcaaagcattccggtaatggctccgcatccggctccgatctccagaacggaatccgcctttttcagaggataccagcttaagatattctcccgcagccctgaaaaatggtagaccattggaaaactcacctcttcctccggcaggtcttcaaaagatttgccttcctgtgccattttcagaagtgtttcctcgatatccccatcggaataatgatccttcgccgtataataatctaaattcaactccgccatagtcgttcctccacttatttcacagatactttggaaaacagatcaaaatatcccactgctttcttatctgtgatcacggtcaggttacacacatcgtaaagacgatgaaatacggtaaaatcgccgtctttatatccggtgcaacccagacacagcatatattcccctgcctccagaggcatcacctgtttgaaggtgatctcacggacatcgcctgccttctgcggtttcagaggcgtatgttcatacatggtattggttcctgtgatctcggtgcctttcagatctttcagggtaaatgcaaagatcggatcgctgacatctgcctggaacttcactttcatctgaacggaaaattccttgcctttttcgatcacattggtgatcatacctgtatcatcccggatggcaaaatccacgatctcgccaagcttactgccgtattccaggaccttgggattcaggttcaggctgtccttcatagctttaccgcttccggtatgtgctttcagtgaaacgtctgctccggctgcctggttctccgtcgtctgtccctcttctgcatcgtctgtgttttcttccagatctgcatcgtcgtactgattgaccagcacacgacggtaaagattgaccatctccttggcaccaccctctgcaagcttctcacctttgttgagaagtacaacacggtcacagtattttccgatgctgctcaggtcatggcttacaaacagaatggtcttccccatttccttaaactcttcgaatttccggtaacattttgcctgaaaaaatacatctcccacggaaagagcctcatcaacgatcaggatctccggatcgatattgatagctaccgcaaaagccagacgcacgaacataccactggaatatgtttttaccggctgatagataaaatcaccgatatctgcaaaatccagaatagactgcagcttggcatcgatctcttccctggaaaaaccgatcatgcttccgttgagatatacattttcaagtccggaatattctccgttaaatccggctcccagctccagaagcgctgagatccttccgtttacggctatttccccggccgtaggcgaaagtacgccggtgatgatcttcaggatcgtggatttaccggaaccatttgttccgataattcccactgtttctcccttatgcacctgaaaggatacatggttgagcgcataatgctctttatatttcttttttctggataatcccagggactccttaagacgatccataggattatcgtaaagcttgtacatcttactgacatcatttactgaaatcgcaatatcttctgccattttcaacctcacttttgtgtaaatcgttcactctcacaatctgccgccgttctgctttttatccttacagagcaaatcccccatgggaactgtccggtccggatcaggcggatatccgccatccgcattcaattaaagcacatctgcaaaatgcggcttcagacgtttgaatatcacagatcccagtccgaaaagcaggatcgtaactacccagaaatagatcgtccatgaagcatggttccagattccgatatgaccaagcatggaatcacggtagcccgtgactacatagtacatcggattcagcttaaacagcttgatcagccatggatgtgaagaaagcatattgatatcccacatgatcggtgtaagccatacacccacctgaagaaaaatactgatgatctgggtcagatcacggaaaaaaatgacgatcgcacttgtagcatacacaagtcccagtacaaaaaggaaggtgcagacagagtaataaatgatctgcagtgtataaaggcttggtgtatatccgtagcatgcacataagatcagtgcaaaggccacaaagaaaacatgcacgaaaagtgcggagatgatctttacgatgggaaggatgctgatcttgaatacaaccttcttcacaagataattgtattcaatcagggcattggttccaccgtttaatgcatcctggaagaaaaaccacggcacgataccggataccagatagagtacaaaaggataatccgataccgttccggccttcagtcctacggaaaatacaaaccagtagaccaggatcgttacgataggctggataaatgcccagacaataccaagataggatcctgcatattttgttttgaaatcattttttgcaaggcttaaaaccagctttcgattctggtacagctccgccggcaaagctaatattttcttcattctgcaattccttatcgattcttatattcctcgaagcttccccacttctggtccttgtcggagaaaataagctccatgccttccgggatcggccactcaacgttaatgtccttgtcattccagatcagtccgccctcatcgtttggatgatagaaatcagagcacttgtaggtgaactctgcattctcggaaagtaccaggaagccatgagcaaatcccttaggaataaagaactgtttcttgttttctgcggaaaggactacaccataccattttccaaaggtcttggagccttcacgaaggtcaaccgcaacatcaaacacttctccgtttaccacacgtaccagtttatcctggggatagctgatctggaaatgaagtccgcggagaacaccgtaacgggagctggactgattatcctgaacgaattccacatcaatgcctgcttccttgaaatcgttataattgtatgtttccatgaaatatcctctggaatcaccaaatacagttggctcgatcactttcagtccttcaatatctccgcactgtgttacttttatttttcccattttttctttctccttttctgttttgatttatttgtgatgtttcttttcttttattctgagagccgcaagaagggcgatcaggatcaggatcatcgctgccataatcataagaaggatcttacgcagggcaggaatgctctttttttcgctggtactctctccggctgtactcttctctgttgttttgctgttatcttcctctgctgcttctgtggaatcttccgcttcggaactgtccgcttcctggctgtcctctgctgcagcggtcggttccggtaccggtgtatcagttgcctgtgcaacacttgcggtaccgatcagataatctccgaaatagtaaccggtttctgttttcccattggtattctctgacttctcggtaagggaattcagctccaccccttttggaaggaatacatagccgccatttacttctgtttttgtgaaattctcaaatgcgtaattgaacatagctgtactgtccatacaggaattggaaagctctgttccacgcatagtcactgcaatatatgtggtattatctctggtcactcctgtgacaagtgtatgccctgccgcaacggtagttccggtttttccgccaatgcagccttcatagtaaaatccgctttccggtgcaaacataggatgatgggtatgcaggatcctctgctggctgttcatatttgtaggctggatgatatagtccggtgtgcccacaaccgtacggaatgtttcatttttcaggccttctcggaagatcagcgccatatcccgcgcagaagaataatgattatcatccggaagtccgctggaatttgcaaaatgtgtattggtacatccgatctcactggcgcgctggttcatcatatcgataaatgcctgctctgtcccgccgatatgctctgcgatctgtgccgcaacgtcattggcagactggatgatcaaagcatgaagacaatcctccatagtcaggacttcgcccacctttgtgccgatattactggaatctgccgtaacattacgcaccccggtctctgtaaaggtcaccttctcatccatggtggagttctccactgccaccagcaaggtcatgatcttggtaatgctggccggatatctctgttcatctccgcccttgttataaagaacaactcctgtgtctgcatccatcaggataccggtatctgaggtaatatccggtcctgccggccatccctggatctggttggtgctgatatcatatttcgcattcagatccactgcagccatggtctgtaacggcagcatcagcgccacaccgactgctgcgaaaactgccagtaatttttttatttttttcatagctctccccttcttctgttaaaacccgtcaaaggaagcaatcgcatccacaactctcttcgcatcctccatatccagattatagaacataggcagtcgcataagacgctcgctttcttttgtagtataaacatcttctccggaaaatcttccgaatttttttcctgccggtgcggaatgaaggggtacataatggaacacactgcagatatccttttcgcggagatatttcagaagccttgtgcgtacctggatatcatgtaccttaatgtagtacatatgtgcattatgtgtgcattcttccggtacataaggctgctggatctttccttcctccgccagaaatctaaggttctcattgtaaaaatcatagatctgcatccgcttatcgctgatcttcttatgctgctccagctgggcataaagatatgccgcattcaattcgctcggaagataggatgatccataatccatccagcggtatttatctacctgaccacggaaaaacttactgcggtccgttcctttttctctcaggatctctgccttctccaggtactgatccccgttgaacaggatcgcaccgccctctcccatggtatagttcttagtctcatggaagctgtagcagccaaaatctccaatggtaccaagggcttttcccttatagtaggcatccacaccctgggccgcatcttccactaccttcagatcatgtcttccggcaatctccatgatcgtatccatctcgcaggctactcctgcataatggaccggaacgatcgcgcgggtcttatctgtgatcgcctgttcgatcagcttctcgtcaatattcatggtatccggccggatatccacaaatacgatccttgcaccgcgaagcacaaatgcatctgccgttgatacaaaagtataagacggcatgatcacctcatcgccaggctggatatctgccagaaaagcagccatctccagtgcatgggtacaggaggttgtcagcatcacatgacccacatgaaagcgctcttccatccatgcagaacatttcttcgtgtagatcccgtcgccgcagagcattccccgttctactgcgtcacggatgtactcaaattccttacctgtaaacgcaggtctgttaaaatcaatcatgtatttcctctttatttcttattcttcatggtttttctacattaactgcacattccattttctcacactcatgttgtaaattcaatgcctatttttctgccggtgcataatccgggatctgattatggtatgccacctcctggccgttgggatccagaatatgcattttctcataaaactcttctgtgagaagatccatttccttacgattctctgtttttacataatataatgccagatacggattagggccatgctcaatgaccttctctccttcctgataaaagatccagggcttttccacctgttctttctctcccagccggactgccgcagactgatcttcgatggtaagaagctttccctgaaaataaatgacagctccacagcactgtggtttatgaacatcgtgttctgcaagcatttttttcagcttatccggatcatagagagatgcaagaagaagctcttccatattaaatccatagaccatatcggtcaattcatgctcatatccgaaaaatcgtgcggcgatctcgcagacctggataccttctcccggcttccagaaaaactgcatggaaagggctccgtctttctgaccggttctgtccgcatatgcctgaagaagttctgtggcaggcttttcaacttttgacaataatctggaaggatacacatttcttgtgctgatggggatctcacctttggcaacaaatgtcttttcacggtctgcaatactgatcacatggacttttccatgccgcacccaggtcatcatattgaattcatagccatcgttatattcttccaccaaaatctccggcatatcagaaaatcctgctgttttttctgccccgtttatcagctcctccagatcttcggatatatagatcccgcgggagccgtatttatccagtggcttgctgaccaccggataacgaagtccctcaagcagctcttgcagctgagttcttttggacctgtctttaaaatatgcgatcgggatttttcgaaagcctggagtgggaagtcccagttcagtaagcagtgctctggtcgctgatttatcacgataccagggaagctgctccggtttcagataacaggggattcctgcccggtccgcgatctttaccatacattccagaagaaggtcggaaaaggatgtaatgatcccatcgatctctttttcccggcagagacaagcgatccgttccgtatctgttaccgggatctgaaatgcctcatctgcaaattttcttgccggaccatccggatatccgtcgcagacaatggtgtagtatcctttttcgcgggccttctgcaccagctgctcaaattctcccaacgttcccagtatcagcaatctgtgtttcatgattccgtttcctcccattctcttatggaatccgcgatatactgcatttcttctgtcccgtatctctggtcacagggaagcggcagcacattggcagcccagtcatattccatggtatccctgtcaaattcttccaggatattacgccagtttgtcggcacaaaaatcttccggcctgccagccagcgtcgaagctctaatccgttcttatgataatacggataggcaaacggtccctccggcacctcccctgtaaaagcattccttgaaggaagaagctgcgacagcagacggtagttctgttctcttcttgttttgataccggaataatccatagtcctgaggaggtttccggtcagacgggacattcggcggatctccatctcatgataatttgctgcattatccagcattttctgatagaaggttccggcatcatattcataacgtcccagaatatgctccattcttcccatggaatggtccagaggcttcttttccggttccagttccgcatcggtagacagatatgctccgtcactgactccgagaaattttctgcaggagtacagagtgtccacacccggcagcggcttctgaaaaaacgcatgcgtatgatccacaatgatatttccatagatttttttatatttccgaatcttatcatcggtaagctggccataataatttaccagatacagatattctccttccggaagcgttctctcctcaagaaccggatgcagaccttcatccatatgataaaattcgatttctgccccggacctctcacaggcaccggttacggaatcgcagagaaaaaatggcaggtagatctttttgcacctgcgtgcttccatcagccacaaaagcgctgttcttccgagattcacgccgcagagatccggatagtattcctgtcccgccggttcttccagttccagatagccgccgatctcttttttcatcagtctgtctcctcctgacggatcacatagtgcggcatctttttggcctcattgagaatattcatgagataaataccgatgatcccgattgaaagcaatgtcagtccgaaaaatgccagcatcacgagcatcagagatgtccagccttccactgagatcccgcacagaaaatatctcaccagataatagatccccagtaaaaagcttaccagaaaactggcaatgccgatgtttcgcaccataagcaacggaaatgccgtatgggcagtaatatcatagatgagatccttcacaaggcggtgaaaagaatatccgctctttccatatgcacgtgctgcatgctgcaccggaacattgatgatacggttggagcttaaaaccagaagatttccaatctgcggaagatatgtattggtcttcagcatggcttccaccagaaaccggcggatcagtcgataactggtgatctgaaggttcggatccttgccgagcattttggaagttgcccatacagacagctttgtgcccagcttccgaatcagattatgcttacgtccttcatagcttgcaatgatcacatccacatcgtcacgttccttcattacattgatcattttggggagctcctcaggctgatgctgaaggtcatcatccatagttacgatgaactctccctttgcgtgggcaaatccgcacagaagcgcaggatgctgtccgaaattccttgccatctggatgatcttgacacggggatctttttcccggagttcttgcataaccgcaaaagaccggtccctggacccgtcatctacaaggatcagttcaaattcttcttttatcgtttcccggaatactttttccagacgggtgtacagttcctgcagcgtatgttctgaattgtatacaggaacaaccactgaatataaacacatatcgtttttcctctcttttgtatcaattgacacttatcgtttaatcttatcattttcatttcctgttgtaaaccattacattgttcaaacattttcttgcataaacctgccggatgatatatattgattatcagtctatgataatcgcatttatgatatggaggaaacatgacaaaaatcaaagattatattcagcttcatctgaatatcctgctgttttctcttaccagcgttttttccaagcttgcatcggtttattataataaagaagggcttcacagtcctcttctctatgtatttctttttcttatgatcgcaaactgtggaatctacgccattgcatggcagcaggtgatcaaaaaattttccctttccacggcctacgccaacaaaagcgtctatcttctgtggtcccaggtatgggctgtgatcatttttcacgaaaatctttcgcttcagaacatcatcggcatcctgatcgttctgatcggagtctggatggtgcagagatatgaatagaacatttatgctgatcatgctggccggaacctttttttcggcaatttcccaggtacttctgaagcagagtgccaatatggaatacaaaaatcccctctgggaatatctgaactggcgagtgatcctggcctatggtatcttttttggagtgttgctcctgaatacctggtgctacaccaaagtggatatgaaattcggaccggtgatcgatactgccgcctatgtttttgtcctgctgttttcctggcggatcctgaaagaaaagatttcccgcggaaagatcatcggaaatctgatcatcatcctgggaatccttgtttataccttatgatcataaaaatgccggcagctttatgttcgctgccggcattttttattttttcttatttgctgcggatacagttgtgtatacaccatcttcatcgaatgtatagctctttccgtttttctcaatagtacagtttttgtacatgattcctgtttccggatcaaaataatatctctttccgtccagtttgagccagcctctctgcatctttccattggagccaaaataataggtatggctttcattgtttccgctccatgtatagaatacctttttgaccataacgccgtcaccgccaaaataatatacatcatccctgctgttcatgtaccgcacatgtctcatcatgtatccgtatttggcctgaaaataataatagttctttccaacctttttcatgccctttaatgcatgtccgtttttgtcaaaataatattttttctccttataggtgatccaggtatttttcacaaggactccatttttgtctacatatctggaaatattcttggaatccctgatcagctttgaacggcacattcctgcggtcttatggatataatatttcttatttttcacctgaacccagccgtattttttgacaccattgacataataaaatttctttccgttctctgttgcccagccggtttttcctttatagttactggtatccggtctggtggacgctttgtatccggtctgtgcatgccatctgggtgtgatgatcttggtataatcaacataaccgaagtcaatatctacagtagaataagacgggattcccgcaaccagacccttggtggtattcagatatccgccaccgtcaccatcggtggactgccagatggtatatttgtactttgtcttgtcaggagccgggatcgtatcaccataacgtgcaagccatacatcataacctgtcatcttgctccagtcaagcttgttgtcataccagtctgtattgcagtagatcattggatgatatccggctttttttacctcattgcagaaggtctttgccagatctgcgatctgtgatgcggaaagattgcgcatctgatcatattcaatgtcataaaccaccggataggatactttatatccatccattttacggatggcaagctgtgcttccttcagtgcctgctgtgtgttcagcgcaaggctgtacacataggttcctgtcggaactcctgccttctctgcctgtttcatgttgtaatcatatgtcttatccagatgattcagaccataggagatcctgacaaaggcaaaatctacattagattttttgacctggctccagttgatggtatcctgccactcagaaacatcgattccacgtgtgacagcaccttccagcttctggccgcttccgttatagcagacaccgttgatcttcttccagacctttgaacttaccctggaattctgtgttgccttcccgctggggaccttttcttcctcagcaactgcctcgcttcggtctacgcctccgccgcccatggccatcgctgtagttcccattgttcctattcccagcagtgctgccatacagcctgccaccagccatttcttccagtttttcattttagtttccttccataaattatgttgtttatttgtgcatgacttttattatacatatgaaaaaatggaaagtaaagccatatatggaaaaagaccgatgtcagcttcatacagctgaacatcggtcttcagttattctatatatttctttctggtactgttcggtaaagatcacggaacttccgggtctgtaggatcaaagtttccggctccacggaaggttgccagcggtctgcggcctaacggtcccttgaaggattcattgttaacgtaatttccgctgctgtaaatgtggatcgtagaaccgttacagttctcaaatacccacttcgcatcagccacacaggtacggatacatccgtgagatgcaggctgaccaagcttcaggtactcgcctgccggaagattataaacactcctggtcgatccggctacggaatggataaagattcctccctgtccgcatccgtcaacatgtgttccatactgtccccaggacggtcccatcagtggctgccatctcagactgcgggtcagtctgtatgtaccatcccatgtaggtgttccggagagacctacagaaacacggattgtcttaacaggaatcgtcttgctactatttgtgtatacagtcataacaccgttggtcttatcaacctccaggtaatatggtcctccgtaaatatttgaaacatcattgcggcggtaaccgttcttatcaaagtaatacagttttccatcgatccatctgcttgtattggtcagatacttggaaccgctgtccggatcgatatatttgacctgatcatagtaatcgctgacgatcacccagccggtggaaaaacgtccctggctgtccagataaccatttacggaaccacgcttcatggatttatttgtcacaacggtatagttctgcagatagtaccagtatttacctaccttctgccagcctgactttttcagaacaccgttgccgcctgcataataccacttattctggtaacggatcaatgtactcttgtacatccagcctctgtgcgcattggcatctgatgttgcaaagaaatagtattttttgccgatctttgtttttcctgttgcaagctgtcctgtgctattaaagtaatagctcttttttgaggacttgtttgttatcatctggctcttatagtggtttccgtttttgtcaaagtaaaaccatccgaagaactggccttttgcgtcggtcaccttctgccagccatatttttcaacaacttttcctgctgtgcttccgaaataataaatcttgttggatgcacccgggcagccatgccagcagttcttccaggaaactctctggccattgcctccgaaataatatctgctgcctttatacttcacaagtttttttgtaatgatgcggcccttgctgtctgaaacataatatgcgttattctgcgccttcgccattgtattcgtcataacatagccgctggcattcagcatatatcgatatttcttggacattacaggtgatacataaactccatgtttcatgatctgtccacgtgtggcagccttcggactacaatagataaaacgtttctgatttttgctgtttaaaacatatgtccatccgccataaaaaagctttcctggaatctctcctgcctttgatgccggctggaagtaatactgatatgttgtggaaccggttgtcagcttcaggattcctgttcgcggttttccgttacgcatcagtgtataataagcatttccgatcttcttgatcttgcctacaaggttctgagcctctatggatttgtaatcaccctgggaattataatagcggaaaacagttcctgtccataaccagtaatttctcttctgctggccaagattggatgtccacggtgtgattgcttttccggtggaatccgaatacagggaagctttggagttttcgaggaaataccattctgtcttctgtgttccggtataacctgctgcacctggctcacgggtcatacggccggttaccagatatccgtcttcattaaaaagataatatcccacatgtccgttggtattgatcttaagaagaccatcctgcgcagtaaaataattatcttcgatggaacctgtttctgatacctgagaagcgttcccttcatcctgggcaagagtctctgcgttatctacgctctctgatgtttcgactgccgtctctgtttctgcgggtgctgtctcttcggatgtctcctctgcagacactacatctgcggatgctgtctctgcagaagcttctgctgcggatacttcctctgtagaaacttcttctgctgcagtctcctgctctccttctgctgactcattctggagtacctgagcctgctcactctctgctgcaccttccggaagctcttcagtctgctgtacctcctgtgctgctgcagctgtttcatcaactgttgttttctgctcttcttcgctgctttctgcaggatcctcagaagcttttccctccggagctgcagatgcagcaaccttctttttgcggagtctgtaaaaaccgtttgcagaaacccagtcacttgtcttggcaacgactacaccgtttaccagtgatgctccggtagcagaagtttcctctgccttgttgttctctactttgttctgtactgcggtatctgctgacggtgcatccagttcctgtgcatcacctgcactgaaatcatcgcccggatctgtactgtcttctgttgtcgcatccggtgcttctgtagtttccggtgtctctgtaatctccggtgtttctataacatccggtgtctctgcggggttctccggtgtaacaggtgtttcttctgaactgtctgtactgtcagtactacctgtctgatccgcttccgtctccggttgctgtacagtcgttccctcttcatcactgaatacatcctcagccggatcgccggctgtctctgctgccatctgcacgtctgtacttcccaaagccgcagcgccggcttccagagttccgcccatgcataatgtcagactgagaaaaattgccacaactcttctcttcacaataatccctcctgatcatgctgctgtaaataattattgtatctgttacgtatcattcgcccagtccgccttcgataagagccacaagcgcatctatcgcagcctgttcatcctcaccctcgcagaccagtgtgatctcatccccgcttttaacacaggcacccagaacactcagaacacttttggcattcgctgtacctccggcatactgaaatgttatggacgatttgtattttattgcctcgccgcacaaaagccctgcgggacgaagatgaagccctgacgggttcctgaccgttaccttataacttaacattgctgctttctccctttatattacttatccttcaagccttgtccaaagctgtgattacttactgactgctgctgtctacattggaaaccttggagattttgatctcggcggttacatcctccagcagcttgtagccttccggaaggctgattttgatcggtacttcgtagctgccctcctcccagtcatccatggaaagtgctgctcctaccgacttcagatcaaattgggaaagatctccgtcttccgcctgcacctttagttcaatatccgcaacttcaaacgccagctgcagatcatcaggcagaccctttactttgatatcctctgtcgggaagctgtatatcttactgccctccggcaggatattgactgtgatccagaggtccgtactggatccagatgtcagcttaaggccatccggaagaagttctgacaggtttactttcttttccacgtcattgctctttcctgaaatatccacattctcattatcaagataaatagtatttccctgaagtttcagattgttcagtgcttcttcacttccagctacgctgaaagtctccggtactgtcgtgacactgtccacaacataaccttctgccggttctcccgtatatcccgcactgatccgtatatcagaacgcaccttccagagctttgccgtgacattaacctttccgttgttgtcaaatttcagatagctcatggaatttgatgaaagtgtatcctgattcttatctgtgatggtcagttctgcgcctgtgatcgtcgtatcctggtcgattccctcaagctttgaacttacatccacactcacactgtctatcttaccaactagggattccggtcctgtaatacggactttttccggatttgcggtaagcgaagcaacctccagcccctgtgcaggcttgctgtcatcactggtaacgttgatcgcaaattccttggtcacctttttttccagatggacacttagattctgcggtgacacctggatattctctggaagtatcccggaacaggttgctgtaatggggatcattacagggtctgtatcggtagactgagcctgctgcaggtctgcaactgccttaatatcacttgaggtgagacggttgactatcttccgctcacctgtaatataaacacgtactgaattttcacgatcatcctgcatgaccatctcgcccagctgatccacataagcttcattgatgatctgcacatctgagatcacaaagcctttcgtaatgatagggtcatcaacatttactacgatcagccacaccaggattcccacaatgatcgacatgattttcaaagggatgttcttagtcagatttttcttcatgtttcactctccctttcagcagatttctcagcttaccgttgtcaacaacctttttattctgagcagaaacaagtacttcacgaagctgcttactgttaagccctctggataactcaccgcctctggccacagaaacctgtcctgtctcttccgaaacaatgatcgtaagagaatccgtagcttcgctgatacccacacctgctctgtgtcttgttcccagctgtttactcagttccatattatctgaaagaggcagatagcaggttgctgctactacgcggttcccccgcacgatcaccgctccgtcatgaagaggtgtattatgctcaaaaatattgatcagcagctgactggtaaggataccgtcaatattgataccggttctcacatattcatcaagccggatctcttcctcgatcacaatcagtgctccggtcttaacttcacccatatcaaaacaggcctttaccagttcgttgatagtcttgtcattgaaacgctcctgcacttccctgccagaatcaaagggaataatgttggaaacaaacttcttctgtcccagctgctccagcgccttcctcagctccggctgaaagattacgatcacaccgatcaccagcacattagccaggttccggaagatccagaggatcgtattcattttgaagatatatgcgaccaggataaatccaaggacgatcaaaatgcccttcagaagggtatatgcacgtgtaaatttgatccatgccataaactgatatacaaaaaaggaaatcagtccgatctcaatgatatctatcacgccaagtcccggaagggaaattttcccaagatatccgaccacaactgtcagcacattctgcataagtctcctcctttcttcctgagctatcccaatcgttcctgtttaaagatccttcagcgattcctccagctgtttttcgaaatcgatcttgtccaatccctgcggtttctcacttactgtattttcggaaaccatatccggcatctttactgtatgcatttcggtcttctcaggaaatacatcatcactgaaagacacaacattgtcttcttttttttcttcttttaccggctccgcattgatttttttgatacttctctcagaagtggcgactgatgccttcggaacggcttttacgtagtaatagtactcatcatcctcatattccagacgttctgttctgctgtaatctccgccaaaaacaaagaactccagaacaaatcctgccagtacggagatcactgtggacaggatcatcggcaccatggctaccgtaatactaaggcagaaatctccggcaaggataaccaggatatagatcacgccaccggcaatgacagcgatcctccatgcataatcaaacgcccgtgttctcagaaggttcacaaacaggatcactaccacaaacgcgatcaccgtgatccacattgcccagttgtggacaagtccgtcagagatcagcttcagtttttctgcaatctctgcggcaggatcactgagtgccgccgactgtgcatgtacaaaccgtataaaataatagatcacaacaccgcatccggccggaagcgctgacaatgcgctacccagcaggcctgccccgatcggcataagtgcaggaacaccaaatccgaaagaaagtggtgtaaggatcattgcaagattctgtgacctgctgaatcttaggaacaggatcagcattaacagaataagaagtagcataaatcctgccgtttcgatcccgactgcataacagtgcccgatcatcaacgcaaatcccataaacatcatcacggaaaccggaaggaccgaacatacaagcgccaggatcaggacaacaaaaatattatccagctgtttcatgtaacccatattgctgttgatccagagaaaataggcaaatgccagaacaaacttcaggaccggcagtatatatacttcatattgtccgtaaaatcttttgatattctgtttgatctcaagtaaagctgtcattttctatgtcctcctgcatttctccggaccggatttcttttttcctcccgcccgtagattttttccagtcttgtaagatcctgataatattccctgacacttttttttgcccggaaatatttcacagaatactggatgtaggtcagtatcgaatatacaacaagcacgatcagataaccgacgatgatatagattccaacctcgaccagattaatcttattcacattatccataagatattcgctgaaatatgcggcaacgcctgcaagtcccaatacatatccgatcgttaccagaaaaaagtttctgatcagtgcaagtccaatataatcacttcgataatatctgctcaccggaagatacttcctgccttcgccatgttcatacatagccagacgattcataatcttcactttttcttcatttaccataaaaataactcctcataagctttctttatcaggaaaatccccaatatatgatccgcattacgctttccatacagttatactgtttaactgcaatcaaatttattgtagcatagttccatacctatgaaaagtgttttttcggctgtttcatgcccttcctgcgcatattgtcagaaaataaactttctctgcaccagcctcaagaagacacattgccatggcatctgccgtacttcctgttgtgtatacatcatccaccacaagtacagaaaaacccgggatcttttcggttacctgatatgcatttttcaggttctgacgcctctgtatggcattaagttttttctgagatcttgtgcttcgtatcttctttaccagatgctcattccatgggatccctgtaagaacactgagcctttctgccagatatgctgcctggttaaaacctctcatccttttttttctgggatgcagaggaacgggaacgatcagatcaggcttccaccgttccagatatttctttccgaagacgctcattgcctttgcataaaaatccccatattcccgacatccgtaatacttaaatcgtaccagagactgtctccagacctctccgtaccagaaaatacttctgccctccgtaaaatgatgggcacccttgcggcagtcttcacagtattcctcttccatttttaccggtcttccgcatttcatacacctgggaccggatataggcctgacctttccggaacactccggacagatcagccggtctttttccttcagtatctgatggcacagcgggcatttttttgggtaaagcatgtccagtaaaaaatctgctgtttttttcaagaaagtcctttctccccgatggcgctctctttctgttcagattcatccagctcccggatccgtctgtccagagagctgtatctctgctgctgtttttcattacggatcatctccgcaaaagtggtctcgctgcctactacggtaacacattttctggctctggtcactgctgtatacagaagattccgattcatcagcatccttggtccggaaaggatcggaaggatcactgccggatattctgagccctgggacttatgtatggtcactgcataggcaagttccagttcctcaagctgtttgaaggaatattctgcctgtctgccatcctcaaattccacggtagccgtttccgcaaattcattgatctccgtcataataccggtatctccgttaaacacgcccacacctttatccacaggaatcttgtatcgtccaaggatttcccactccagctggtaattgttcttcacctgcatcaccttatccccttcacggaaaagacgctgtccgatctctttctcctttttcttttcatccggcgggttcagatatctctgaaggatctggttcagccgctccacacctaaaagtcccttacgcataggagtgagcacctggatctcatagggctttgcatctacataacgcggaagcttctcctggatcagtgcgatcaccacacggataatgatgtccgcatcatatcttttcagaaaaaagaaatcccggctcttgttattgatggtcacctgctcgccccggttgatcttatgtgcattcaccacaatatcactttcagatgcctggcggaaaatctttttcaactctactaccggaaaacagccgctgcggataatatccctcagaacatttcccgggcctacactgggaagctgattttcatcacctaccaggatcaatctggtccctgctgtcactgcaagaagcaatgaatgcatcagtgcgatatctaccatggacatctcatcaatgatgatcacatccgcttccagcggattctccgaattcctgtcaaaatgaactgcacggccttcctgctcttcctccggcattccattcagctccagaagtctgtggatcgtctgagcctcgtatccggtagtctctgtcattcgcttggctgcacggccggtgggagctgcaagccgcagctcagcgccttcctcttcaaaataacggataatcgcattgatcgttgtagtctttccggttcccggcccgccggtcagaatgaacagaccatgactggcagctgccgccactgcctgtttctgcatttcatctaaccgggttcctgtctccttttcgatcctgttgatccgtttctccatcatctcctcatcttccgggcagaggatgttcagctcacagagcattctggctgaattcagctcaagataataatatcgtgtgggatagacaactgcaccgtcttctgtttctttcaggatcagtttccggtctactaccatatccatgagatgtttttccatgtaggaggaatctactcccaaaagtccggatgccctggaaaaaagttcctccttcgggagatagatatggccttctcctgaagcctgtaggagagtatataacattccgcttcttatcctgtaatctgaatctgtatggatcccgatccgggaagcgatctcatctgcgatacggaatcccacaccactgatatcctctgcaaggcgatacggattctcctgtaggactccatatacagtctgcccatatttctgatagatctttgcgccgagattcagtgatatcccgtatttctggagaaagatcatagcgcggcgcatatctgctttctccgtcatctgttctgcgatctccatggcctttttttcgctgattcccttgatctcagccagccgctccggctcttcctctacaatacgcatagtatcatcaccgaaacgacgtacgatcctggctgccagtgccgctccgatccccttaatcgcaccggaacccagataacgctccatggccagtgcatcctccggcattttttctacgtaggaggctatctgaaactgcttgccatacaccggatgtgttgtataatttccggaagcttcaatggcagccccctgggtgatcgcaggaaatgtccccacacaggtcagttcccgttcctcttccatccctttcagtaccatgaccgtatatccattatcctcatttcggaagatcacatgatctatatatcctgtaactgtctcactcatttttttctccatctgtaaacctctgataacagcaaaaggcactgcagctgcagcgccttatctgtatgagtttcctgcggcagtctcttctctgaccctgtgccgtccggacgcctcataacggtttacatccttgacatgatttccgcatattttcctgttccggcagccactacaagcattgcatcctgcacagtcaatgtgctgactcctgttttctgctcgatcaatgcatccattccatgcagcatggcacctccgcctgtaagaacgattcctcggtccatgatatctgccgccagctccggcggtgttttctcaagaacgccatggactgtctctacgatctgtccggtcgtttcccgcaaagcggtccggatctcctcagaagtcagtgttgccaccttcggaagtcctgtgatgatatttctgcccttgacctccatcgtgcgaagatccgcttcttcactggctgttccgatcttgatcttgatattctccgctgcatcctccccgataaagaggctgtgcttctcacgtacataattcatgatcgcatgatcaaaattatctcctgcaaccttcacagatgcggaaacaaccacacctcctacggatacgaccgcaacatccgtggtccctgcaccgatatccacgatcagattaccaaatggcttggtaatgtctacacctgccccgatagcagcagcaatgggctcatccacaagaaaaacttccctggcccctgactgataagcagcttcctcaactgccttgcgctcgatctccgtgatcccgctcggaacactgatgctgactctcggtttccggaacgctctccgtcccatagcctgtgaaataaaatatttcagcatcttttccattacattataatctacgatcacacctcttcggattggccagatcacttccatattggaagtcagatggcttgccatctgtctggcttcctcaccaattgctctgatcttctctgtatctttatcataaacaaccacagagggctctcttaaaacgatccccttgcctgtggaaaacaccagactgtttctggttcccagatcgattccaatatcctttgccggcataaatcctcccgcctgcgtcatatacattcatatgctgacgcatttctgacttattctgttccggtctgtgccgaaacgttcccgcacttcattatatacaaaaccacagaaattgaaaagaacttttaccggttatttctgttccagatattttttcacatatttaccggtgtaggaaaccggattctctgctacttcctccggagttcctctggcaattaccgttccgcctctgtcaccgccttccggtccgatatcaataatatgatccgccgtcttgatcacatccagattgtgctcaatgaccacaacggtgtttcctccttcagacagacggcgcaggatttcgatcagcttgtggacatccgcaaagtgcagtcctgtggtaggctcatccaggatatagatcgtctttccggtactgcgcttgctgagttctgtggcaagcttgatacgctgtgcttctcctccagaaagagtggtggagggctgacccaggcggatataggaaagccctacatcatacagggtctcgatctttctccggatcgacggtacattctcaaaaaatgtcagtgcttcttccacagtcatattcaatacatcataaatgctcttgcccttatacttcacttccaaagtctcacgattgtagcgtttgcccttgcagacttcgcaaggcacatatacatccggaagaaaatgcatctcgatcttgatgattccgtcaccgctgcaggcctcgcaccgtccgcccttgacattaaaactgaaacggcctttcttgtagccctttgccttggcatctgcggtggctgcaaaaagatcacggatctggtcaaaaactccggtatatgtggcaggattggaacggggagttcttccaatcggggactggtcgatattgatcaccttatccagctgatcgatacccaggatgtcatcatgtttcccggggatcactctggcacggttcaggtctctggcaagtctcttgtacaagatttcattgatcagagagctcttaccggagccggaaacacctgtgatacaggtcatcactcccagaggaatatctacgtcgatatgcttcaggttgttctctgccgcaccctttatatgaagaaatccggttggttccttcctcacttccggtaccgggatcttcagccttccgcttaaataagctcctgtcacagactgctcatttttcatcagatcctcagctgtccccattgcgaccagttgtccgccatgttctccggctccggggccgatatcgatgacacagtctgcagcacgcatggtatcttcatcatgctccaccacgatcagactgttgccaagatcacggagacgcatcagtgcccccagaagcttgtcattatctctctggtgaagcccgatactcggctcatccaggatatatgcaacccccacaagcccggatccgatctgtgtggcaagacggatcctctgagcctctccgccggaaagggttccggtagctcttccaagtgaaagatactccaggccaacctctgccagaaatccaaccctggcacggatttccttcaagatctgccttccaataagctcctgctgctttgaaagcttcagatcgcggagaaaaccctgcagcttctgtaccggcatattggtcacttcataaatattcttatccgccacggtcactgccagggactctttcttcagcctctgtcccttacatgtggtacaaggagtaatccgcataaaactctcgtattcctgcttcatagcctcggaaccggtttcacggtatctctgctccacattgcggatcagtcccgggaacgccacatcgtaaacaccttctccccgctgtcctttataataaaccttcacagaatgaccgccggtaccatggatgaggatatcctggaccttcttcggatactcacagaaaggtgtatccagagaaaattcatattcccttgccagggcatccaggatcgctctggaaaagcttccctgcgtggtacaggactgccatccgagaacagcgatagccccttcattgatactccgtttcttatccgggatcatcagatcgatatcaaattccatcttatatccaagacccagacactgcgggcaggcaccaaatggattattaaaggaaaagctcctgggttcgatctcatcaatgctgatgccgcaatccggacaggaaaaactctgactgaaattcagaagcttcccgtccatagtgtctactaccagcagaccatccgccagatccagcacggtttcaatggaatcggaaagacgcttctctattcccggtttcacaataagtcgatccacaacgatctcaatgttatgtttgatattcttatccagcttgatctcctcagaaagctcatagagatttccgtcgatctgcactctcacatatccgcttcttctggcctgatccagaagtttaacatgggttcccttgcggccccgcactaccggtgcaagaagctggatcttctggcgttccggaagcgtcatgatctgatccaccatctgatctaccgtctgtttgcggatttctcttccacatttgggacagtgcgggattcccacacgggcatacagaagtcggaaataatcgtagatctccgttaccgtacccactgtagaacggggattccggttcgttgacttctgatcaatggagattgccggcggaaggccctcgatactctccacatccggtttctccatctgtcccaggaactgcctcgcataggaagaaagtgactccatataacgtctctgtccctctgcataaatggtatcaaatgcaagagatgacttaccggagccgctgagtccggtaagtaccacaaactggtctctgggaatatcgacgctaagattcttaagattattctcattggctccgcgtatcctgataaaacgcttcttatcgtttgcttctgctgacatgaaagcctcctactctgtccggtcataaaaaatactccggtattcttctcaacagcagaatctacctctcttattccgctgtaaaacttctgattttttatcagtataccgtcagaacatccgttcgtcaaggtgaaaaaatcgacaaatttttctacagcagaaaatccgccatcactccattgctcacatggattccctttctcgaaagatatatcctgtctcctttttgttccagcattccgatctccagatgttttttcaggacctctccgtaaacgttttccatattttttccgaaatattccgcaaacgcttccattgaaacgccctctgtcatccgaagccccagaaacataaactcagccatctcatctgcctctgtaaggctttccatattctggcggatcttatccggaaacgcactgtttccaatatattccttcatatccgcagtattggaaaaacgcatatgatccagaagtgaagacgccccaagtcccagtcccagataatcgattctctgccagtatcccttattatgacggcattctcgtccgccttttgcataattggagatctcgtactgatgaaacccatattcctccaggatccctgccgtattctcatacatacggtactccgtatcctcatccggtaatttcagctttctctctccgaaaggagtgccttcctcaatgatcagactgtaggcggaaatatgttccggcgaaatccctgccaccgtgcggagatttttttcccagtctgcataagtctgttccggaatggcactcatcagatcgatattgatattggaaaagcctgcatcccttgccataaaaaagctctcctgaaactcttcccacgtatggattcttccaaggatctttaattcccggttctgcggggactgaagccccagactcagccggttgatcccatgttccagatatatctgaagtttttctttatataaagtccccggatttgcttcgatggtgatctcagcatccggggccataaaaaacttatttctgatctgatccagtatctctcccacaagagacggatccggcacggaaggtgttcctccgccgataaaaactgtggtgatcttcctgtccgaaaaatccggaacagcggcaatctccctttccagagcctggaaatattcacgttgcctctcttttccggcaggtccggaaaggaaatcacagtaatcacatttttttacacaaaacggaacatggatatagagctccagcggttttttcgcctcattctccatccatggctccttcctctccaccactacctgatgtatcattatcctcatcggagcttgtatcttcaccggcactatccgcattatccgtacttccgtctgaagcagccggtgtcggtgtcacgccatcgatccccagtgcctcgctgccgttttctgccaggtactcattgaccattgtcagatttccattgctcgtcactgcatccggatctacggttttcggatcaggagtggcagtcggttccggcgctgtactgattttgatcacactttcctcttctgcatttttcttctttgaaccacatccggtaagcagagctcctgttatagccagaagtcctgctgccagaaacagtttttttatattttttttcaaaaagtcatctcctatttatcatccagcttcaggacactcataaatgccttctgcggaatctccacgttacctacctgacgcatacgtttcttaccttccttctgtttttccagaagcttcttcttacgggagatatctccaccgtaacacttggcaagtacgtctttacgcatggctcttaccgtctctctggcaatgaccttgcttccgatagctgcctggatcggaatctcaaagagctgtctcgggatctcgtctttcagcttctcacacatctttcttccacgctcgtaagcagtatctgcatgcacgataaaggaaagagcatccacttcttctttattcacaaggatatccagctttacaagctcacttctctcatatccgtccagttcgtaatccagggatgcataacctctggaacgtgatttcagtgcatcaaagaaatcataaatgatctcgttcagcggcagtctgtatttcaggagtgcacgggtttcttccatatattccatgccttcatactgaccacgtctctcctggcagagatccatgatcgcaccaatgaactctgtggttaccatgatctccgccttcaccataggctcttccatgtattcgatctctgaaggatccggaaggttggtgggattggtcagctcgatgatctcaccattggttttatagaccttatagataacactcggtgctgtagttacaagatccaggttatactctctctccagacgctcctggatgatctccagatgaagaagtcccaggaagccgcagcggaaaccaaatccaagggcgaccgatgtctccggttcataataaagggaagcatcgttgagctgaagcttctccagcgcgtcacggagatcgccgtacttggcaccatctgccggataaaggccacaataaaccatagggtttaccttcttatatcccggaagtgcctctgcacaggggttgtccgcatccgttaccgtatcacccacgcgggtatcacggacattcttgatgctggctgtgatatatccgaccatacctgctgtcagctcgtcacacgggataaactgacccgctccaaaatatccaacctccacaacctccgtggtgaatccggtcgccatcatatggatcctcgtgccctttttcacacgtccgtccttcactctgcaaaatacgataacacccttataagggtcataaacagagtcgaagatcagagccttcagaggtgcatccacatcccccgccggcgccgggaccttattgacgatctgctccaggacctggtctacattcagtcctgtttttgcggagatctgcggtgcatcctgcgcttcaattccgatcacatcctcgatctcattgataacacgctccggatccgcacttggaagatcgatcttgttgatcaccggaaccacatccagatcatggtccagtgccatatatacattggcaagtgtctgagcttcgattccctgtgctgcatccacaacaaggatcgctccgtcacaggcagcaaggcttcgggaaacttcatagttaaagtccacatgtcccggggtatcgatcaggttaaaaatatactcatttccgtccttggctttgtatacaatacgaaccgcctgggatttgatggtgatccctcgttctctctcaaggtccatgttatccagaacctgggcctgcatttccctctcggtaagaagtcccgtcatctcgatgatacggtccgcaagtgttgacttgccatggtcgatatgtgcaatgatacaaaaattccgaattttactctggtctatcattcaggaagtcctccttaaatttctctcgtataaagcgttcagaacgcatatttttccatactgttctttatcatatcatatttcagccttctttgtcactgcctttcagaactctgtttaagatatctgcaaatggttccatggcatttcggacttcctccacggtatttgtctgtgctccggcctccagaagcagggcccgtggcttaagatgcagattatagcgaagacctgccagatagatcccccggtaaagatcggggtaatactgtgccgcctgatattccagctgaaaggaaaatgccagattctcttctatgtaaggattgggcagataactcactgccccctgactgactgtatagcttaatccattataaaaaagcagctgagcagtaggttttccattcacctgcgttaccagatgacgctcatccggcacaccatctctgtgaaggtcgatcacaacttcaatggtgggattttcttccagcactttttctatggatgccctggcataatcataagccttactcctgtccagtgttcctcccatcatatcaaaggcatctgttatatgaatgacctggtatccatatgttttttccagaagttcagtaagatgatctcccactcccacgatggtgtcctcagtctgtccttcccttgaatctgcaaaagcctcctgggaatgggtatgatagatcaggatctggggtaccgatgaatcctttttaacggacagatcctccttcagaaaacggggcgcactgatctgctgtgcattcgtctccgtattggaatctaatataaaaaactggttcatcacatagtcaaaatctgccagtttcgcctgagacaagtcaatctgcggatgtggcagtgccacagtctcctgttccttcgcagtattttcaccggatcggttctcctctgacggaggagtctccggttctgtgtcccccggctccatagcttcctgttctgaacctcccggctctgtaatttctggctcagcaacttcctgttctgcatttcccttaacagtctccttttcattttttttgccgtcaggagattttttctctgcctcttccgcttctttcttttggatttcttttttcttttgaagctcttctttcttctgaagggcttctttcttctccacttcttccgcctcggccatcagcagcgtctcctgctcttttcggttctctgcttccacttcttcacccagatgctctgcgttttttccctgcaaaagcatctctgtttcccggtctctgccattttccttctgcagagctttcttttccagaaagcaatacagcggcagctgtctgtagatctcaccatgcctgaaaaaatctcccggaaggacagccaccacacccaggaagatcaggctcaaaaccacgcagaaagccctctggatattcgtcacccacgatcacctcttatggtattttatgacctgtcctcttcgattagactatcggaaaaagccagattcagtccctcggaaatggtaaagcttaaatatcgtaccgtttcatccacatcctttggtgttacaaacatggtgtaaagcttcggcgaaatcatttcttccagaaactccttctgctcatcctcctccagtgcctccagaagctctgccatggaatcatggacaatagtagccgcatccaccacagtcggaacaccgatcccgatcacacggaccgaaagattttcttcattcaggccttccctgtgattccccacgccggagcccggactaatcccggtatccgtgatctggatcgtccggttaagtcttgtcgtacttctggccgccagcgcatctacggcgatcaccaaatccggctttgtctcagaaacaacaccccgaacaatttccagagtttccattccggtctgtgccatcacacccggaacgatcccgctgatctgatgcattttcatatgttcattgctcttcagcccatattcccggatcacatgccttgtcatatgaagattggaaactgcacgagggccaagggaatccgcagtaatctcctgatttccaaggcctaccaccaggatcgactgctgccgtccgagatcgatcagctccctcaaatgatgtgccacctcttccgagatctccctgtgataatcctcatccggaacggaaagatccggtgcctcaatggtaatataggtcccctgtggttttcccatggtcctggctccgttttccgttgtgatccgcactacggtagtccgaacatccttttcctcatcgtatctttccctgatctctactccacgtacttctacgttttccgcctgaaagcgttccgttgcttccagcgccaggtctgttctgattctgctccttccagccatactctcatcctctttttctgtaagattgcaaagacttttccgctgctatctgcagctttaccggtgttttccctttcattatttccctttttcccataaatatgtatcatttcccctttcccacacagcatctggtattttttgcatatttttttggaatttttgcaaaaaacatcttgacattcctgtgcacgtataataatatatataagcatgtttcataggagcgcccgtgtctgttcctgtgaatgtaatttaatattatatttttaaggaatcggaggtgtacgaattggctaacattaaatccgcaaagaagagaatcttagttaacagcactaaggctgcaagaaacaaagcaatccgttctgcagttaagacttccatcaagaaagttgagacagcagttgagaataaggataaggcagctgcagaggttgctcttaaggacgcaatctccacaatcagcaaagctacatccaagggcgtttatcacaaaaataactgcgccagaaaaatttcccgtctttccaaagctgtcaacagcattgcgtaatagaccacggaatattttagttataagcttataagtaaaaggaaagacagtcgaaccgtcagcgactgtcttttttgtatatagatttctgcattgaccaaaaggagttttttatgatatcccatccctttccctaccgcattatccgcagcagtcggaaaaccctggcgatccaggtcagcgtttccggtcaggtaactgtccgcgctccacacacaatgccagattccaccatccatcgttttctctcacagaaagaaagctggatcctggagcatctctcacacgctgccactgatccggcacagccccaggctgaaaacccgcctctttcagaattccgccgcagttattatatggaatccgccagaaaaatattcaaaagaaaaaccgcagcctacgccagaaaaatgggcgtaacctacggccgtatcacgatccgggaacaaaaaacccgctggggaagctgcaccagcgaaggaaacctgaatttcaactggcgtctgatcttcgccccggaaaaagtcctggattatgttgtggtacacgaactttcccacagaaaagaaatgaatcattcccctgccttttatgcagtggtggcatctgtgatgccggagtataaagcctgcgaaaaatggctcagggacaacggagcgaccctgtggcagaacccgtctccgtaaaactcaggctctcactgctctcgccgagctgtacttcacgatcagaagctccacgctgagcacatctccaagtgtacctgtctttaccgcctcttccgcatccacaaaatcccgcacagcattctccagctcttccacagtgtaggatctggcacaggatgccagattccgcacaacaaaagagggtactcccagtttggaagcgatctcggtttgagaaagaccctcctgtgacattttcttggtcaggcagatctgacgaaactgtttcgccaaaagaaacaatatccgcatcggcggttcccgaagagtcagaaggtcatagtacagatccagggcccgcttctggttcttctccgtcaccgcacgcaccatatcaaagatcttattggttgtctgcgtggtacagacagcctggatatctgcagccgtcacaacatctcttccgaccgtataggagatcagcttttccagctccatccttatatttcccatatctgttcccgtcatggtcagcagaagctccacatctctctgggtgatcctgcggccattttttccaaggatccctgctgcccaccgcataagagtcttttcatcctgctgtttaaattccccgatgctgccgcaggcttttaccgccttgtacatacggcttcttttatctacttcagactcgcagaacaccagatacagataatcaggcagagctttcatataatctgccagttcctcacatttgttcttaaagaatcccgtatcctcaagaaggactactcttcgctctgcaaaaaagggcatagtatcacaaagactcaaaagctcccggacatcgatccccttcccctcatatctggtaaaattcatggtatcatcgtccgggttcagagccttcaccagatttcttttatattgttgtttcagataggcttcctcaccgtaaaggagatatgcctgcttaaattttcctgttttaatatcttcctgaatattcttcaatctctgtacccctgtctgattttctctgtaatccagtttatacgacaactgccggaaatgcaacacccaagcaaaaatttgactttccaccggattcatgctactgtaaacaggtacatattccggcagatccgttctgtcagcgaaatatgtggaagggagtgttccattatggaaaaaagaagaaacaacagaacaagcaacctgaagagcgcaaccaccaaggccaaagctaccgtgaaatcaactgtagaaaagattgaaaaaacacctgcagctgaaaaaaccgttaaagcagtcaaaaaggcaacagagactgtagcagccaaggcaccagaagtagtagaagaagttaagaacactgtaaaaaatcataagatcagcggcatcacacttgaaatttttgagacatccatcacagttgccgaccttgaggcagctgttaagaaagatgcagaagcaaagggcctgaaaggcaaagagctccacatctatgtaaatgcagaagaaagagcagcttactacactgctgacggagagggttccgacgattacaggatcgatctggccactctgtaagctccggcggatctgttccgcgatcgcttactatgccggtctgtctgtgacattccggaaacgcaaaaagccatgcacaggacattttcatccggtcccgctgcatgacttttcttttttatcttttactggatttttttgatccagtctctggagcaacctactgcagctctccagccttttaccatggcatttcgcttctcgtcatcgatctccgtgcggaaaatacgttccacatcacggctttccagtactgcctccttgctttcccagaatcccacagcaagacctgccagatatgcggcaccaagagcagttgtctcaatacattccggacgttctacagccacattactgatattggcctggatctgcaggagaaggttgtttgcacttgctccgccgtctacacgaagaactgcaaggtcacttcctgcatcttccttcataacctccagcacatcattgacctgatatgcaagtgattccaaagtcgcacgcacaatatgatacttatttacaccacgggtcaatcccacgatcgtgccgcgggcatactgatcccagtaaggagctccaagtcccgtaaatgcaggcacgacgtagcaaccgtttgcatccggtacctttcccgcaaaatactcggtatccgatgcggaatccaccagatgaagctcatcacgaagccactggatcgcagcaccagccacaaatacggatccctccagaacataagtgatttctccgttaagtccccatccgatggttgtaaccagcccgttattggaaaataccggtttatctcctgcattcatcagaagaaaaccaccggttccgtatgtattcttggtttcacctttctcaaagcaggcctgtccgaacagcgccgcctgctggtcaccggcagcaccggctaccgggatccttccaccgaaaaaggacggatctgtctcaccataaatctcactggactcttttacctgcggaagcatgcatttcggaatgtcaagctcttccaggatctcatcatcccactccagtgtgttgatattgaacatcattgttctggatgcattggaataatctgtcacatgaacagctcccttggtcagcttccagatcagccaggtctccacggtaccaaacagaagctctcccttctctgctctttcgcgggcaccctccacattatccaggatccattttactttggtggcagaaaaatacgcatcaataacaagtcctgttttctgacggaatttttcttccagtcccttcgctttcaggctgtcacagtattctgaagttcttctgcactgccatacgatggcatgataaaccggctgtcccgtattcttatcccagacaatggtggtttctctctgattggtgataccgatcgctgcaatatcctctgccgttgcctcaatctggttcatagcctctctggcaacagaaagctgtgtggaccagatctcacctgcatcatgctctacccatcccggtttcggaaaatgctggataaactccttctgtgccacactgcggatccttccattttcatcaaaaagaatacagcgattactggtcgttccggaatccagcgccataatatattttgccatataaaaatcctccaatacatttctttgctgcagatcaatgcctctgcagccttacaattcccataccttctgatttgtagtggaaaccgctgctgcccccgcacccaacgctcccattacatcctccttatcggagatcaaaccgcctgcgatcacaggcactttgcttgttttacatatctgtttaagaatcttcggcatcacccccggcagaacctccaccacatccggcagctgctcatgctgatttcccagattctcaatattcttgatcgccatggaatcaataaggaaaaaacgcagaactgtatacattccaagcttcttcgccctgttgatcatggatgcttttgtcgaaatgatcccgtctgcatggatatttttgcaaatataatccacagaaacctctttcgaacataaacctgtgatcaggtctatatgtgccatcgcgatcttccccgcctggtggatccgctccacaattcccccaatagaacggatatctccatacaggataaagatcacggtaagctcttctctgcccagacagttctgaagcccctgttcatcctttacagccgctatgatcgggttcgcctcgatcgcgtccagaaattctttgttcatattctctcttcctccgcaatattcacacaatatcattctatctccgcgcattgtttgaagatatcattcttattgtatcagtttatcgcttcaaagaccagaaatatttaccatatatatgttttaaaagaagggaagcccctatggacttcccttctgcagatacattatttctcaaatgggaatttgaactgtgtaagtccgaattcatcacgaagtccgataaactctttctgaactgcctctgtcaccggaactcccttatccttacgatacatccatacatcatattccttctcgcctgctgtgtagatacgttcctgtccaggagccttctcggagcctctcaggtctctcaggatatcaccgcatgttttcttgaatgcctctgcacccataaatgcctctgtgtcgatagcaataaagaaatgtccaagatgatatggacggatctttccatcctcatccttgccctccagagctttcaggaagagcccggactgaagagctgcggaaaggatctcaacaacagtagagtatccgtatcccttatatcctccggttgtctcaccaaatccaccgagaggagcaagtgctgcctgctggcttctgatcttcttaaggatctctgcactatctgtaagctcctctccttctctggaaataacaagacccttaggagtatcgtggttgatacgtgcgtagtattcgatcttgccattctggataacagatgttgcacagtccagtgtaaacgggaacggctcatctgtaggcatactaaatgtcagtgggttggttccaagcatattctcaacaccaaatgtcggtgcaacggatggtcttgcgttggtaccgctgataccgatcatattctcctttgctgcgaggcctgtccaatatcctgcgattccataatgggaagagttacggactgcaaccatacccataccgtatttatgtgctttttcgatacacatgtccatagccttcttgctggctaccattcccataccatcgttagcatcaagaactgcagttgtcggtgtctctttaagaacatcgatctttgttacaggatttaaaattccggatttgatacggtcgatatagatcggtttaaagcggttgcagccatggctctcaattccacgtctgtcactttccagaagtacgtcggaacaaagtctcgcatcctctgttggaactcccattttctcaaatactgcagtcataaaatcgtctgcaagctgccaggaaataaaaggtcttgtttccttctccattgtaaaaatcctccatatacattattatagttttttattttacttttatagatctgcagcaggaccccctcctgccggagatttcaaattagcctgcctcctgtatatacctcacagaaagcgtctttacatcgcagtgtcaatcctcgtctgccactactcttcctctgtccggataattggtgatgatggagtttactccccatttcttcatccttctcatatcctcttcctcgtttacagtccagacattcaccccgatcccgttctgggaacagctgcgtacatgctcttccttcaggtattccagattcggatgataatactgcacatcacaggttcttgcataaacccctgcattatccacgtatttctctaccagaaaacctcctgcaatagtctcatcactctgtctgcacaatacaatggatgcgttattgaaagaggaaaggatgatccgatcctccagaccatattcgcagatcatatcaatgaccttctcttccataccaccataataataaacactgttcttcagctcgatgtttgtgatcagatcttcctcctctgccatccactccagatactctctcagagtcggaatctgaagcctgccgaattttccggcaaacttatccggataactgcaatccagtttacacagctcggcatatgtaagatcatagatatatccgtttccatctgtggtacggtcaaccttctcatcgtgcatgatcaccggaaccagatccttggtcagctgcacatccagctcgattccctcgcagccagcctccacagccttctgaaacgccagcattgtattctccggatattctccgctgaaaccacgatgtccaaatactttcattctaatcatcctccattcaatgcattacatcattgtgagcatttttgctaatttatattcctgattatatcatagcgtttatttattttcaacattttttatctatttttatgtatattttttgttgttttttaatcaattatcctttttaagtgctgatattttttgtgcattttgtatatttcatttcatggcaaacaaagcgataaaaaagccttttcaggtttattttattcgctttgtctgccggagggctgacatattataagcatacagtttgccatatatatatcctttgcagatcactgtatgatctgcttcacatttcctgtagccacgatatccacgcctgtgcctgctacattctccaggatcacgtccccgatctgaaccggcgcttccacacatacatcccgcagtgcttccacacagtcaaaaatctttcctttcggaatatcctgtgctgtcttcacggacaccaccggcatacttccattcttcacacgaacggtcgttgtcacgatcctggtcggatctgtcacttccttcactgcatattccgcaccttttttacaggtatttcctgtgacggaaatgatttcttttccattcatttccaccagaagggcgcatcccataggacatccgatacaagtaagattccttttttccattttcatcactcctccacctggatcacaagttcatgtttatcctgtttctgttttccttccagaatggaaagaagctgctcttttttcaatttgatctgttccatctctccgggtgctgccacctgtttttttctggaaaagatccgttctccatccagatatgcacggatgtaacaatttttatatacatttcccacacggaagcggaccagctgctcctccgccatatgaccggtacggatctcagacggcactgtatagcggactccgttttggggcgaaagcgtgatctttatctcttccggtattttgtcctctccattattgtttatatagagagctgcatttcttcctgcattgccggcttcctccgaaacaaaatccaccagatcatgaacatgaagaacatttccgcaggcaaaaataccttctacatttgtctccagactttcgtttaccaccggtccagaagtcacattactcaacttcacacctgcctgtccggaaagctcattctccgggatcagaccaacagaaagaagaagcgtatcgcattcaaaaaattcctctgtaccgggaatcgggcgtctgttttcatctacctctgcaagagtgattccttccacacgctcttttccttttatatcaaccactgtatggctaagcttcaacgggatcccaaagtcgtccaggcactgcacgatatttcgcttcaggcctccggaatatggcatcagttctgccactgccttaacctctgcgccttccagcgtcatacgtctggccatgatcaatccgatatcaccggatcccaggatcactactttttttcccggcataaatccttccatgtttacaaggcgctgtgctgttcctgctgaataaatgcctgccggtcgatatcccggaatgttcagcgcacctcgcggtctctccctgcagcccatggcaaggatcacagcttttgcccggatctgatacattccctcctggcggctcatggcagtgatcaccttatcctggctgatatccatgaccatggtgttcagccggtactcgatctgctgctcttttaccatccggataaagcgtgccgcatattccggtcctgtcagctcctcctgaaatgtatgaaggccaaatccattatggatacactgattcaggatcccgcccagttccttatcacgttccaggatcaggatactctctgctccctctttctttgcagccagggctgctgccagtcctgcagggcctccgcctatgatcacgatatctctcttcaccataatcttatcactcatggttctcgccctcctctgcaattttcttgttgattccttcgatcagtctggaatctccgcctgtttttgtgatctcctccatggaaatgccaagctcccggctgaggatctccattgttctgggagagcaaaagcctgactgacatcttcccattcctgctcttgtacgacgttttactccatccagagatttcgctccgagaggtcttcggatcgcatccagaatctctccctcagagatcatctcacatctgcagatgatatttccatattccggtgatcttttaatcagctcatttctttcttccagagaaagctctgacggatccaggatcccttttctcaccggatcaaaatccggatttacttccggatgtaatttttcttttacgatgtcagcaatcatacagccaatggccggtgagctagtaagtcccggtgatgcaattcctgcacaatcgataaatccgggtgcatcctccacctctttgatcacaaaatccataccatcctcgacagcacggagtcctgcaaagcttgtgatcaccttccgcagtggaatatcctttactgttttaccggatttgacgcttactgtctccataccctccgaggtagttgctgtttcctcccgattctccagatccgtagctgtaggtccgatcaaaaggtttccatgaacagtctgtgttaccagaactccttttccgctcttgtttggaagtgcaaagatcgtatgattcacatgtgttcctgtacttttatcaaggagcatatactcacccttacgaggagtgatatgcagttttttctcacttaccatattatgaaaaacatccgcatagacaccggcagcattgacgatacagcctgtctcaaaatcaccctttgaggtttccacaacaaaacctttttcctgttttcggatgttctttacttctgtgtcaaatttaaattccacaccattgttatatgcattctctgccattgcaatgttcagctcaaagggacagacaattccggctgtcggtgcatacagcgctgccagcacctgatcagacagattcggctccatggcaagtgcttcttctctgtcaaggatccttagtccctctactccgtttttcagtcctctttcacgcagcttatgcagcatggcgattccattctcagtcgtacagacagtcaatgaaccagtctgtttaaaaggaaaatccagttccttcgaaagctgtcccatcatattgctgcccttcacattcagttccgccataaggcttcccggttctgcatcataaccggaatgagcgattccgctgtttgccttggaagttccacagcatacatcctcttctcgctccagaacgcagattttcagccgatatcttgaaagctctctcgccgctgccgctccggaaactcctgctccgataatgatcacatcatacatagatctgtttctcctttcctgtttgcggatcttctgaactgtccccggctttctctgcgccggaaacagcagaatatccgttgcaacacaagcattgccgtccgcaggtatatattctgcgaggagtactgcttacgaacagcaatctttcaagtgaatatgccattatttttatgccgtaacccttgtaatccttttgaaacattaacatttgcgcataaaaatagccggcataaaaacacacttatccatgtgtcttcatgccggtctctgttctcaatggcattctctgtattcagcaagctgaatcagattccttcttcactttgtattcattgtatcagactattcttcatatttcaagtgcatttttcgtaaaatacatcgttttttctttaacatgctcttaactttctcaaaaacatgataagtttcattgtattcccgattcccgatcatatttcctccacagaaataactccttcctgctgtcttacctcacgaaatacagtatggcgtgctttccatttggcagcctccattgttgcctggatcaccacactctgtgttttggatctctttttgatgataactacgttggagatcaggatatcctcttcccgaagcttctttatgaccatactcatcttgtcttcattttcaaactccatatatacatcataggtattggaatgctcttccacataaacctctatatatttcgcatatttgaacaccagaataagtcccagcgtggtaaaaatcgcaccgctgtaaaaaccgatccccacagcaagtccgatgcacgcggaagtccaaagactggctgctgtcgtaagaccggatacatgtctctgtccggtcacgatgatggttcccactccgagaaaaccgattccgctgacaacctgtgcgccaagtcgtgcagtatctccgattcctgccccattagaatatacatggataaaatcgcccgtcatcataaccagagttgcccccatacagacgatcatatgtgtttttacacctgccacacgcttcttcattccacggtcaataccgatcagacatccaagaaacatcgcaagaatcagccgaaacagcgtcgatcccatatttaaagtgtgcaaataatccgatattgcattgcatgctccgagaattccgcccataaatttgcccctttcctgttgtaacattattttctgccgatgataacgccaatagcgcatcacttcattttgccctgcacgaacgccgcaggccacactcactccattcgaaagctgtctagtcagccggactcactccgtccgtctcactacacagtttttcatatgatcctataccccggatatacatgatctgtagtctcacagcatgtaaaacagcagggataccggcgcccggcggcggtatccctatctgttgctctatctactgatcagagggcattctgattatttaatagactcgttatagttctcgattgctttgtttacagaagctgcaagctgatcaacagcgtcctgagttgtgagcttgccatcatatacctgcggcatgatctcattgaatgtaagacgggcttctgtctgtacgccggagagaacacctgctgtattgcagtttacaggagaatccttcagctggttgatagctgtctcgaaattcgggttttctttgagataagccttcatatcatctgtctcataagctttctcgttgattgcaaagtatcctgtgcccatggaccatttagcctgtacatcaggagttgtgatgtactcgatgaatttccatgctgcatcttcgttagcttcgttacctgtatctgtaagccacagggatccaccaccgatgataacaccgccttcatcattctgctcgattctcgggagatatcctgtaccaacttcgaacggagaagaatcaactgcgtttttcaggatagcagtagactcgatgatcataccaacctgtccggagaagaacgctgtctgcgtatctgctgttgttgttccgtaatcttcgaaatatccggaatcatacagctttttccacatgtcaaatactttcagaccgccgccgttggaatcaaaatcaacagctgtaactgcctctgtacgtccattgtcattgtttccgtatgttacgccaagtcctgcaagctgctgctcaaagaaccatccgtaaatagcctgtgaataaccaaccggagctgctccgctctctacgatcttcttggcatcctcaagaacctcatcataagttgtcggaggagtttcaggatcaagtcctgctgcctcaaatacgtctttgttgtaatacagcataggtgtggatacgttaaatggcattgcatactgcttgccttctacggtatagtagctgctgataacatccataacggaactcttatcatagcctgtgctctcaaatttgtcttctacaggaatgacagcaccactgtcatacatgaactttgttcctacgtcatacatctggcagacatccggaagaccggagtcactctgcatagcagctttcagttttgtgatggtatcatcataggttccctgatactcagctttaatctcgatctcatcctgggatgcgttgaaatcatccacgatctgctgaagcacctcaccgtttgtgccgcccattgcatgccagaatgtaagtgttgttttctcagctgcacttactgagcacggagctgccaaagatgcagccatgattcctcctaaaagaatcgccatccattttttgttgttcatatagaaaccctccttttataatggtccgacccgccccaatacaggtcggacaaattaacatttttgctacttgctcttatgggattggatcaacccttaacagcacctgctgtcagaccactgatcatctgcttctggccaatgataaatacaagaatcgacggaatcaggataaccatagcaccggccataaccggtcggaagtctgttgcctcagcaccctggagcataccaagaccgatctgaactgttctcatatttacactgtcagttacaagcagtggccacagatagtagttccagctctgaaggaatacatagatgatcagagcacccagtgatggtttgataagcggaacaccgatggtatataagaacttgaaatttgtacatccgtcaatctctgccgcctcatggatctccttcggcagtgtcaggaatgcctgacgcatgttgaatactgcaaaagctgctgctgcattaggaaggatcagcgctgcgtatgtattacggataccccagtcagcaatagtcaggtagtttgcgatgatgatcgcctggctcgggatcatcatggttgccagcataatatagaacaggacctttttgcctttgaactccatcattgcaaaagcatatgctgcaagagcacctgtaacgacctgagcaaatgtgataacaccggatacgatcagtgagttcttaatgaaggtaaagaacggtgcaagctgaaatgctcttgtgtagttctcgatagtcagatgggacggccagaaccttccgccatagatctccttcagatccatcatgctaacattgaaacagtagataacaggaacaatgataataattgcaaaaataatattcagcgcatacatcgccacttttacatatggtttttctttcatcagtaggtcaccttcttttccagtctaaactgcagtgcagtcaggatgatcaaaataacaaacagaattacggattctgaacaggctacaccgaaacggctgttgataaatgcctcctggtaaatctcatacacgataacgttggtactctctgccggtccgccctgggtcatcatcttgaactctgcgtatgcctgtacggagttgatgacattaatgatgagaaggaagaacagcgtcggagagattgacggaatcgttacatggcggtgcttctggaagaaattcgctccatccagggcaacgctctcataaagctcagccggtacactctggatcgctgcagtaaggtaaatgaagttcataccgatagccatccatacactgacgatcgtaactgcaatcagtgcatatttcttatctgtcagccatccgatatgagttccgagagccttgttcaggatacccagagagctgtggaaaataaacatgaacactacagatgccgctgctgcggaaatagccatcggaagtgcatatacagtacggaaaaatcctttcgccctgatcttctctgtactgatgatcgccagtataaaaccgagcacaatagaaaggataactcgcataacagagaatttcagtgttgccaccaaactgttaaggaacgttccgtctgtaaaaatattcgtatagttgtcaattcctacgtactgtgccacctgaccaagaggtgtggttctggcaaagctcagctggatcgtcttaacgaacggccagaatacaaacagtataaaaaggatcattacaggaaccagatagagataaggctccactgtcctgaaaaaagattttttacttttcattgtatatcacctgcttttcataaatttacgtactaccgatcagctgcatcatcccgatatctctgtctccctgacagtgctgatcatgttgctcattacacattttgctgaaaaacacttccgttatatcttccagcaattaccccaatacattaagcaaaacgctcatttacgtcctgctgtcaaaaatgcccccttactaccctccttcgcatttgcgcgtttgttatctttaccaactttttaccaaatattaacacatttcttgaatataatcaacagttattttttctttttttggtatttctttatctattcttgataattatctattttaaattgttactttcttatctattttgcacaattcattgtacctcaacaaggcaatccattctgatcaccttccataaaaaaacagataaaaaaatcggcagaaaataacgcatccttcgatgcatatcttctgccgttctcttttctcaatggcatcgtctgtttttatacaaaacagacacaatctcaacttgttgatatgaattatacagtaaaattcactataaatcaataccaaatacgtattttttatgcaaatcttataagtacttttttcacaagcaagccatttcattacacggaaattatctttgtttcacagctattgtggaacaattatacttttttcttcctgtaccaggatattaaatacaaaactataccaaaaattataaaaaatggagcaactgccaccaaaacagttgttaaaagtatcacaattaacactgcaacagcgatcacgatcgcctttccataccatgtgctcagatccagtttaaagcttcttgcctttccggcactgctctccgtcccattatccgcataatcatctgcgccgtagctctcttcagaataacctgactcatcataaacagctgcactgtcatctgtatcgatcaaagtcttggcgatcagcctgggatctcccagttctgccaggacatctgattcacttcggccgttccggacctgagactgaatgtaatcctcataataccgcacatgagccgcagctctcccctgggccatctgtccggacagctgccctcgtaaaacctcaagaaactctcttctgctcataaatatgtcaaacctttcttacgaaatataatgaaaaaacaaaactcaaaacaactccagaaacctcaccttgaaaatttctgcaaattcttttttaatactctcttataatttttctcattataccataacccataaatttaaatcagaaacaaatcataaaattttgattaaaaaataaaaaatcatagcacatcgcaaagggcggttcatttccggatgccgccaaagccgcattcggaaacgaaccgccctccatgacgttcgttataccgtcaaaaattactcaacatgaacagcgcctgtactcctgatattcatcggatagacattttcccttccgacatactgagccatatagtccacatacgcatctgcattctcgatcggaagcacgcacatgataactcctgcaaaaccaccaccatgaactctgcagataccagcaccgatcttattcagaaacagcttggtaagtgccagactcaacgtgatcttctgctccttgcaattctgcagagaataacagttctgcagccactcccaggaagaattaccggactcctcaagaagacgcaggaatccctcaccgtctttattctcaacagccttcactgcatctgcaacacgtctgttctcttcataaaaatgcatcgcacggagaacagcacggtcattcggaatatccttcacatgtgccagaagattctccatactggactcacagagaagctctacgcccatagccttcgcagcctctcgcatctccataggaatagaagaatattcctcactgagatctgcatgacccttgccggtgtttacgatcacaagtctgcagcccatatcctcaaaggaaaatgcaatcttctcacagctgatattctctttatcagagaaatccagaaggatcggaccgccggcagcacaagccatctggtccatcagaccggaagcctttttccagtaaacattctcagcatactgacctgctctcgcatactcgccgtactccagtttaccttcattaaagaaataattggtgatcgcacatacaagcatctcaaaggaagcagaggagcttacacctgcagcggcaataaccttggtagaaacataagcgtcaaatccaccggtagcatagccttttttctgcatatactccataatacctgcaacaagagcatctgtaccttttgtataggtttctgcgctgagtttgtcaagatcaacaactacttcctgtttgtaaccctcactgatcatatggatcacattggttccgtttggataagcagcaccgatggtatccagatcgatacttgcagcaatgatctgacctccgttatgatcaacatggttgccaatgatctccgtacggcccggagcagtaaaaaactctgccttgtcatgatgatatttcttctcgaaattcacagcaagattggtataacgggcgctgctctcctctgtctcaccatagatttttttcagcacgtctgctgccggaattttaattgttcccattttttcttcctcctgttatatagtttacaccccagatccggaagaacctgaaaaaatcttccgctctgtcacgcttcatgtacttttattataacagtcccgtcttttctgtccataacaattttgtgtaaaaaccgtattattttgtggtgatcccggaatatccctttgcattttatgccttttctgataaaataagttccactaagaaaagcagatatacacttcagaatccgcgcacagaaggaaggaggtaacaccatgcagatcatcacagatcctgccggaaaagaactgaaaaaacacggagacagctccttcccattcctggtaagctacgagcggctttccggctatgagaccggttcctttctgtggcactggcatccggagatcgagcttacctatatcgaaaagggcgaaatgctctacaagatcaatcagaatacctttcacctgaaagagggacaggcaatctttggcaatgccaatgcccttcatgccggatatatgtatcaagatcaggactgtcagtatatccccataacctttgaccccaaactgatctacggattttcgggaagccttcttttccagaaatatacagaaccgatcctccgaagctccctgtctgccgtaccgcttgatctatcctgcaaatggcattccgaggccataaaagatatccgtgacatcatcgacctggactgcagccgggaacccatgtatgaatttgaggtcatcgccagactgcagcacttctggaagatcttgtatgaaaatacgatctcccgggcaattcttccatccggtcaggatgaagaaaactaccgccgcatccgtcagatcatgtcctatatcgcagaacactactctgaaaagatcctcctgaatgatgttgcagacctgatccacttaagtcccagcgaatgcagccggcttttcaaaaaatgtatgaatatcactctcttcggatacatccaggaataccgcattgaacgcagcctggaatatctggaaaatccctcctgttctattacggaatcaggactgctgtccggtttttcggactctaattattacacaaagatctttacgaaaatcaagggctgtacaccaagacagtacagaaaaaatcaggagctgtgacatgctcctgatctttaaccgttcagtgctccatacatatggagcagaacaatatttatctgtgaaaatggctgttatccgaacagctctttcattgccggatacagtttgcggaatttccggtatttttcttcatattttgcaaccagctccggttccggttctaccgtatctactaccctgaccagcttattacagattgtttccacgtctgggtattcaccgcagcctactgctgccagcattgcaccgcccatggacgggccttcctcattctccggcacatccaccttcaggttcatcacatttgcaatgatctttttccagagagggctcttagctccgccgccgcatatcttggtgcgctcaatatggattccgagacttcttgcaacctcaagggaatctcgaagtccgaaagcaactccttccagaacagcctgggtcatatctgctctcgtggtatccatggacattccgaaaaatacgcctcttgcatccgggttgttatgcggagatctctctcccatcagatatggaagaaagaatacctggttctcaccaagcttccggatcggtgcctgctctgccacgaaatcctttgtcttaagaatctcctctgaccaccatttgttgcaggaagcagcgcttaacatgcatcccatcagatgatagcttccatctgcatggtcaaaggaatgcagtgcattgttttcatccactccgaaatctttgctggaaataaagatcgtaccggatgttccaagggaaatgttgcactggccgtcaccaacagttcctgttccgacagctgctgccgcattgtcgcctgcacctgctacaaccttcacatcttctgagaagccaagttcttttgcaacttctgctttcagatttccgactacctgccagctctcgtacaatttcggaagctgttcctccgtgatatggcagatttcaagcatctcttttgaccagcagcggttcttcacatcaagaagaagcatacctgaagcatcggaaacatctgtgcagaaggatccgcttaaacgataggcaagataatccttcggaagcatgatctttacaacctttttaaaattctcaggctcatgcttctgcatccagaggatcttcggtgcggtgaaacctgcaaatgcaatgtttgctgtgtactgagagagtttatcttttccaatgactgaattcaggtactctgtttcctcacctgtacggccgtcattccagagaatcgccggacgaatcacattgtcatctttatccagagttacaagcccgtgcatctggccgccaaaaccgattcctgctacttctttgcggtcaattccttctgtaagctctttgattccttccatgctctgagtaaaccaatcctccggattctgctcagaccagcccggatgcgggaaaaacagcggatattcttttgatacaatgttgcagatctttccggatccttccatgagaagaagctttacagcggaagttcccagatcaatgccaatataatacataataatttttcctcctgtaaacacagaaaccgcggctctcagttcgcagcgtctgcacgcctgagagctcgcggtttctgaatcgtacttgatttagcaggatcagtccgcatctgcggatgatcttatctgcctgttttaattatctccagggattctctgtcggatatctcacgcctgccggctggttgtagccgatctcctcaaccggtacaccgatgtatttgaatacctcgaaaagagcttttccgtgatgtccgaatgctacagctccgtgatgcgggaagcctccctcaatcagtacgtggcggtagaaacgtcccatctccggaattgcgaatacaccgatagcaccgaaggaacgtgttgcaaccggaagaacttcaccatgtgcaatgtatgcacgaagcttgttgtcagctgtactctgcaaacggtagaatgtgatgtcgccaggtttgatatctccctcaagagttccgtttgtaacctcgattggaagtgatcttgccatgatcatctggtatttcatctcacagaaggacagcttgctggatgctgtgtttccacagtggaatcccataaaggtatcctgaagtgtgtagttgaatttgccttcgatggactctttgtacatatccttcggtacggagttgttgatgtcaagaagtgtaacgatatcatcacttacaacctgtccgatgaactcacttaatgttccgtagatatcaacctcacaggataccggaattccctgtgctgtcaggcggctgtttacataacacggaacgaatccgaactgtgtctggaatgccggccagcatttacctgtcagtgttacatatttacgatatcccttgtgatctctcacccagtctttcagagtcagctcatactgtgcaagtttcgaaaggatctccggcttcttgtttcctgcgccaagctcctcttccatctctttaacgattgccgggattctctcatcacctgcatgattgttaaatgcctcgaaaagatccagctcagaattctcctcgatctctacgccaaggttgtaaagctgtttgatcggtgcattgcatgcaaggaagtttgtaggacgcggtccgaagctgatgatctttaagttgctaagtccttcgattgctcttgcgatcggaaggaactcatggatcatatctgcacagtcctctgcgtcacctaccggatactccggaatataagcttttacgttgcgaagctgcagattgtagcttgcgttcagcataccgcagtaagcatctccacgtccctggcaaagattatcctgtgtttcctctgctgctgcgatgaacatcttcggtccctcgaaatgttttgcaagaagtgtctcagaaatctccggtccgaagtttccaagatatacacagagtgcgttacagcctgcttttttgatatcctccagagcctggaccatatggatctcactctctacgatacagaccggacattcgtagatatcctttgcatcgtatttctttgtgtaagcttctacaagagcttttctcctgtttacggaaagactctctggaaaacaatctctgctgactgcaacgattccgatcttaacttctggcatgttgttcataatcttcattctcctttttatatccggcagattttccaccggtgatattattgttcgtttgtaactattcacttcatcaaaaatcagtcaagtgtgatattttcacccttcaatccattgaatgcgccttcaatcttcgcatcctcatgagcgataagccatttattcctggctgtcatcagaccgtcctctccgtcctctgacattgaaaaatcaatctctgtgttggttcctctcggaagaacaactacacactgaaatccactctcattcacatgacacggtgcatagtggagagttgttgcataaacctcgatcccggttcctgccggtaccagaaatgcctccacctttgaggtatcgtatgtaagatcctcttctatatcctgctgatgtccgataagcagtacaagatctgtcactgctacattgatctcggaattccgatgatattccagggcattcagctttttattgtgaccattgcaatatccgatctggacaggtaatccaccaaacgctctgtttttcagctctttttccacatcgagagcttccagctcctctgctgacggaacatataccacatcctccggaaccggtgtatgcttcatctccttcagaagcggaccgaaattgtatccctccagaacctttccgtatctgcggaaagccggatctgttactttctgaattttcacgatttaaccctccttacaaaattactgtttcacagcttctctgtatcttcgttttgaactgaaaaaagcataccacatcatggtatgcttttcgccgcttttcttgactcattcatagcacttttttgacatttttatgattctgacgctccactcttcccggcaggatcccgtaacgctttacaaattccctggaaaaagccctgctgcttgcaaacccgttgtcaagtgcgatggagctgatagtatgatctgtattcaaaagctccttataggcgtatgccatgcggatatcctgtaaatatgtcttaaaattgaccctcgcatatttccggaacatccttgacagatatgcatcggaatatccgaacatggctgcaagtccggaaagcctgagatcctccttgtaatgctcccgcatataagtggttatttttgacaaagcatccaatctgcggctgatcttcagcgcattctcctccacctctgtttccctgtatgcggaaaccataagataaaggacttcatagaacactgccctgatacggaattcgtaccccgtttccccggatacgtacacccgatacatctcccggatcagagaaaccatccgcctgtctgtttcctcagactcttcgtttctgctccgaaaacggatgaacctctgagcggtaaaataatccgaaaactgcttcagcgggatctgcagtacgatggtctcattacgtactggcgcctgaatagaatgtacttcattggaattaatgatcagaaactcccctgccttcagcggatactctttctcatcgatatagaaataaaggctcccctccatcaccgcaaagatctcgatcgaagtatgccagtgtttttcccttacataatttccgtttcttccttcaaaaagaaaaagcttaaaaggaaatccttcattgggaatgatcaattcatgctgaaactccatgctccttctccctttcctgctgtccggtctggacccggcgcatcatacttccgtaaaaagccgccaggatctgctgaaataacgttccgatcataaccggaaataatgtttccgccggaaaatacgctcccgcgatcaccgcaccggcactgatgttccgcattccggaaccatagatcatggaaaccgttgccgctttatcctgccttgtaagaatggcaatgatccagccgatggcatatccccctgctgccaggaccaggatcgctgctgctacctccagccgttctccgttaagatgcttcatataaggagaaaccttggaggaattggaagttaccacaaagatcaggcacatttttgaaaaaggtgccagctttttcggccaggtctccataacctttccatggctgccttcattaaggcacatggcaaggactgccggcagagcgatcatgaaaaccagctccttcatcattcccacagtatccatttttacgctggagcccaccagaagcttcaatactgccgggatcagaaagggagccaggatcgtatcgatcacaaccagcgaaagtgacagcggactgtttccattataaatggatacccacatcagactgatcaccgctgcaggtacggaaaattccagcaccattcctgtgatataattcatattgcccgggaacagaagatgtcccagaccgcaggcggccaccggtcccagcacatgaaggatcagcagcatcaggattagcggaagcggccgcttaaacacatctgccacatcacggaatctggatttcagcgcgccgataaaggtcataaacgcaaaagcatacgtcacatagggcacaccatgcttcgcaatatccggaaacagtgcccccgtaagcagacaagccggcgtcacaaaagccatccatttctccataaagctgttaaatttttccagcatatcacacctcttgtttatctttttttctgtctttttttacagtttatcacaaaaaaacagcggtgcaagaaaaaaatcctctgttttatagccgattccggacaaatatgatatgatagtacccatccaaaagcaacctgaaaccagggcggactacagatatccgccaaaatgatcatttattatgatctggaaaacgaggcaaaaaatgatttctttaattataccatgcttcaatgaggaagaatctcttccgcttttttacccggaagccacttctgtcctcaggcaaatgaactgtgattatgagctgatctttgtgaatgacggttccagagacagaacccttgagattttaaaagagctttccgaaaaggatcctcatgtgatttatctttctttttccagaaactttggaaaggaagctgccatgtatgcaggcttctgcaatgccggcggcgattatgtagcagtgatggacgctgatcttcaggatcctccgtcccttcttccggaaatgctggagaagctggaatccggagaatatgacagcgttgccaccaggcgtgtcagccgtgacggagagccacctatccggagtttttttgcccggaaattttatcagctgatcaataagatctcggatgcagatattgtggacggtgccagagacttccgtctgatgaaacgcagtatggtggatgccatcgtctccatgagtgagtacaaccgcttttccaagggaatattcggctggatcggttttcgcacctgctggctcccctacaaaaatatcgaacgcgtagccggtgagaccaagtggaacttctggaagctgtttaaatacgcagtcagcggcatcatcaatttctctcaggtaccgctgaccatcgcctcctggttcggaacgaccatgaccggtttttcctttctggtcctggtagccatcataatccgaaagctgatctttgatgatccggtcccaggctgggcttccaccatctgtgtcatcatcttcatcggcggcctgcagcttttctgcctgggtatcatggggcagtacatagccaaaacctacatggaggtcaagcagcgcccccattacatcatagcagagtccaacaaaaaggactttacacccatacgttgatttttattctgtcggaagctcgaccacctgatattcgtggcccagcgccggcaggattttttcttttacatcactggtcttcattaacaaagtggaagtattgatgcacggatggcatccgaaatattcttcatccaggacttctttatcaagcaccagatgtaccttcttttctctgtcaaagatcagtcccatcagacttaaggatcccggggtaatgttcagatattcctccatctgctctccgtctgcaaaggaaagtctggctgttccgatctgtttggaaagaaattttgttttaaacggcttctctccaggcatcagcagaagatagaaatctgttttctgtcggttgcagagaaaaagatttttgcatatctgcgctcccagaagctgatccactgcctcgcaggcctccatggtcatcagtgcctcatgatctgctcttttatattcaatcccaagactgtccagaaaatcgtacactgcgatttccttctccagacgaccctcggtattctccggtcttcctgtatagatcgttttgtcaattcttggttcttccatggtgtctcctccgttatttttacattctcatatgtgcaagtcttagtcgcagcatattacgctttgctgcttcacccgtaacctgccgatttgtttaatcatagcatacctgtagcaaataagatactccggatttccgtctgactattgacgatatcagcctcggatgctatactctcaggcagaaagggaatgaagttctcccccgatctttatcgaaaccgccaatgagctgatgacttctgtgcaatgcacggggttaccagctttttttgatggatttttaagatccgggagattgaaaggagttactatgacaaaagaaactatccaaaaagaacatcggatcctacagctgaaatatgctgtccttgcagtggtcgtgggaatctgcgtcgggatcgtagataccatcttcggccggggcctgctggcgatctctgatcttcgcaccgcacactggcgatatctgctgcccttcctgcctctggccggacttcttattgtgtggatgtatcatcatttcagccccttaagcttaaagggcatgtccctgatcttcgaaaccgggcagaaaaaaagagaccagattcctctggcccttgtccctctggtaatgatcggcacctggatcactcatctcttcggaggaagtgccggtcgtgaaggtgttgccgtgcagatcggtgctacactctctcacgaggcaggacgcaggctgcatatccgggaaaataagcctgtcatgctgatcaccggtatggctgccggttttggcggtctgttccagacgccactggccgctgtattttttgccatggaggtgatcgttgccggatatcttgagtacgatgcgctgctgccggcacttattgccgcatatacagcctccttcacctctcatttcctgggactggaaaaatttgctgtggatatccaggacacctggactgtgaccaatctccgaagcatgatctctctcattgctctcggacttgcctttggtcttgccggacgatgcttttccgtacttcttcaaaaagcaaagaaattattcggggaaaaaatctcaaatccgctgatccgcatcggtgtcctggccattccactggcagctctgctgtttgtgatccacggcggacgctacacaggtcttggaaccaatctcatctccgcttcctttgccggagaaacgatctacggatatgactggattctgaagcttctgtttactgtatttacacttgccatcggttttcagggcggcgaagtgacaccactgttctccatcggcgcttcccttggagtcgtcctaggttccatcctcgggatccctcccattatctgcggggcacttggctacgccgcagtattcggcagtgccaccaacactctcatcgccccgatccttatcggcctggaaatcttcggcaaccgaaatacccttcccctcatcctggtatgcatcctctcttatctgatcaacggaaatcactccatttatggagcacaacagaaggcactttgcagatttgagaagtagatatgtacatattttttattcggtcatggctgactcggttgtgaccgagtgaactacccagcacctaaaggtaatgggcttctaaggatatcagattcgccatatgattcctttcttcagctattaatggattctatctccgaatcatcatatattttctttaactcttttctcatttccttattgatatttatatattttgaatcattatcagcccattttactttcaggatatcgtgtttgcgtatatataatacaggcagccggcttctgtgcttagccataaagattcccccgctttcataaaaagtttcctgcaggtaatcatttatttcatctacctggatcacaaatgtaaaacgaatatccttctttttttcttctctggtcatctcattgatccagaactctgcaaatttatcatttaacaacaaaacatcatttctatccatatctgtaatatctataagcgcccagatattcacctgattatttctatttttcttgaaaaaacttacttttcctttttcatccagttcatattctgactttttttgatactggttatgtaaaagccctttttcaaatacaacgtttcgttcttcgacctcttctggaaaagttattttgatatctattaacctctcatatttgcaacaaataaaactgaatggcatccagattccttttttattctctatatacctgtagcttcttgcatgaatcctagcactatgcttcaaaaattgaacataccccgctgtcattaaaatatacagtgataataacgctttttcaatcgcatcattcccactgctattcgtccaacatttccaacaggaatatactgctgctaaaaaaacatctgtcaaaagcaacatttgaaacagaaaacaccctctgattccggaaagccattttcgattttttctcatcatcccataaacatataaaggattttcatctacactttccgaagaaatatcctgatccggtgttccgccaaatctgtatacccatccagtcaatgccaaatatcccaaaccggctattccaaatgtgaatccatcatcttcaaaaatccaacgatatgacaaaaataaaatacaaaataacaaaattttttcaggtatatttttttttctttttcggtttattatgatcccccctagtcgtcaggcctatacaacatccgatatgcccagacaatccaacagatcttttttcattttctcatattgttttttatatctcgaatatctatataccggaaggatttccaggcgattataataacggttatatatcgctccaagacggtatcgtcttttatacatcattatccctgaattattccgtacaatgctcttcagaacacgattatcatcttctacttccagcacaaaggaaaaatatatttcctttttttcctctttcgttgtaatatattgtttccaaaattctacaaaagctttatttaattttccgatatccgcttcctgaaacagatctgtttttacatatgccagaatatgtatctcatctgttttgtcatatctgtagaaaaaagtttttccatttcgaggagctttatacgtatttatatattgataaattccaaaacctttttccattacatcagaatgtatctgtaaatccctgtaacacaccggattttcataatacatattgatattctggcacagaaaactgaatggcgcccaatttccttctttatctgttggatatttataattctttttataaaatttcacataaaatatccacatgcatgatcttgccatgatcataaaagctagcgagatattcagaaggatttctatcactgtactatttatatctggatttacatactgcatccccagatatgtaaaatacactcccagccacagaatcattatttttcgcaaaaacaaaaaactttttaactttccgtttttcctgataggaagagcatatttcgattcctttttgtcatttaacataccgtgtacataaaatggattctgacagttataactatccggcacattataaggggttttccatcttgacggtataataactgtaggaataaatagaatatttgagatcatcaggcttaccagaaccgccaaaatttccattacaccgaccggcgccaaatagaaataaaaagatttcagtaatccagtaaacatcaggacatatacacacaaataaattgatttgctcaacacgtcgatcatttttctgtataattacctctttcttttccaatacatattcttttaatcaagtgatatcttctctccatttacagaaatccaatagtctttcggtttgtgttccatgtatccataacatatcttttcatttttgttattttctgcttccagaaattttgttcccacagaatccttcacatcggctactacgtaattatcatcattcggtgttaccagtacataccattccccattgatttctatcgttgacatatcgatatttatctttacatcttgatactctctgcctgtaccataaaatatagaatccggcaatttccatttcccagaactttccggaaaaatcttcccctctactgttccttcgttatccatgataacatatgtagaattttctccctgcagaatacggatgatctcaggattatcaccatatgcttccacggctttctccacagaactgaaacttcggtgagtatacactgtatcgcaaacaaagagtccgattcctaatataacaattgacgcaacaaccttaactggtgtcttttttgattttcttttataagaaatagcgatcaccagattaacaataattatcagatatacaattggttctatcactttgatcagcatattttttttcacattccctttgcatacagtctaccgatctatatcccgtcttccgatcacccgcttcagttcttctctcatttctctgtaaatatttttatatctggactcacggtccgtacattttatttttatgatgtcatgttttttctcatacaaaacggccatacgacttcgatgtttatacatccgtattcctgatccgtcataaaaaatcctgcctatagcatcattgattctctcagtctggatcacaaaggtaaaacgtacatctttctttttttcttctctggtcagctcattacaccagaaaatctcaaatgcatcattcagaagctggatatgcattttcttcatatctgctatatcaatgatcgcccataagtttacctgttgattttttcttttctgataaaaacagatttggtcattctcttttaatatataatttgcttttttagcatatccgtttttaaaaagacattcttcgaacaccaaaggctgatttttctccatttcttctgttggatcaggcagtatccttcctgccagtccctgcatttcatatccgataaagctgaatggcatccagataccttttttatttctcggatagcagaaacttttcttataaatatggatataatatgcctccactacaccaagactcattattattccccagtaaatccagaaaaattccagtctgatttcctgatatcttctatgtattatatgatcagaaatgaaccctgctgtcatcagaagaacataactcaaaagcaaaatctgtagtacaaaatatccatttatcccggaaaaacatttcctctttttcaacatttttcgtacatacagaggattcctgtcatcatataaatttgcaaaaggaaaactttcatttcttgcccaaattctatctgccgataatacagcttctcccattgccgccaatactaatgccattctgatctccggcatgatctggtagcaagctggtgtcagaagtaatgttatcagaaaaaaacgttttgttttttcactcaagtgatatcttctccccatttacagaaatcccataatcttttgttttatgttttatgatatctattattttaatgactacttattattttccatccagaagaatttttttcatagctctgacccaatccttcaaaatcccgattggaaccatcttctgtccacttgcagaaacccagtagtcctctgggtattttttcagatatccatagtaaacgttttcgcttccttttgcttcggaaaattctgttccttccgaatcgtatacattcgttatgggagattttattcccggatatggtgacaccacaacataccattccccatcaactgctacggtagatacgtcgactataatcctgtctcctgtaaaacgctttgtgtcctgaaactctgaatcttccggaagtttccatccgctttctgttttttcaaaaatctgtgagtccatcacatctccatcatccataataaccaatgctgaagtttttcctcgtaatgtcgccacgacatctgaccgatcatcataggctgttactgcttcctcaagtgtatggaaactttgttcagcctctttgttattttcggacatcataaatatgatgaccacagacaaaagcggaaccagtataaatatggatatttttcgtgggattctttttctggaatccacaactgccactatcatgagcaacagcaataagattccccacgaccaccagttagacagtgaaatattcatttttatgttctccttttcctacaatcttgacgcttcacagattgatcgctactttatctccatctacagaaatccagtaatcatctggtttcgttttcagatatccataatataccgttatattctcatattccgcttttaaaaattctgttccagccgaatcgtgaacctcatttatagaatactcccccataagataatgtgggagtattacaatataccatactccatgtatttctattgatctcatatcaatattggcatcttctgaaggatagctcatactttttctgaaaaatgctgaatccggcaatttccatttctttccattttttggaaaaattcttccttcaatagatccatcttcatccatgataacatatgtagatttctcatcctgcaaggttgctattggcttcgccttaacatcatatgcccgaatcgctttatccagcgaggtaaaatttcgctgcacaaatactgcctgaaacatgataaataacaagccaaccagaaaaattggtctgatgataaaaagaggtacctttttagattttttcttgcatacgagagcaactgccaatgcaataaacattaatattgttataactctttcgaaaatgctcaatatcagattcgccatatgattcctttctcaaaaggctaccataatccaattgaatagtagcctttttgctaattactaagccataaattttacaaaagcaggcattgccaccattaattcaggtataagtaagcaccctaatgccgctgccagaaccatccatgaaatttctactgatatttcagttgttgtttcacttttatcggatgtaactgtataatctgttgccactataagagaccctttattgttaagacccacactacctcctatagttttcttttttcctatacttaaactttgggttaatgtcccctgactaatagaagtgcctgagtgtacaacacctacatccatagaataaccaaattcaaaactcttaccattaacatgatttgcatataccgttaccatttctgaattggaagaagtattacgcgtcgatatggtctgagtaactttaaccactccatctactaaaacttcatctactttactggtatgataactttttgttccaacaaatgttgcaatattttcccttacaaaattatataccttagcaaccgctttcttcgtttttttccatgtagatttaaaaaaatgcactatctgtttaaagaaagttccctctgggtcgctattagataccggattatttccacaatagcagaatacattgcacattgtgctgttaaatccggaaatatacgaatccgcactgataaatctccggatctccggatcataataccggttcttcagatagtacattccggtttcttcgtcgtagtaatagcctctgtagcggaacgggtttgtttttccgatggtgctggccttgctgccagtgatgctcaggatttttccccagctgttatacttgtattctactacagtctctccggcgtcgtcaatcagtgcaatgacatcattctgcaatagtaaatttttcgttacggttccctccgacagcttttcaatctcccacgttcatgctatactgaacctatctctgtctgcccgtttcagtcatggggcagacttatttttttccaggaaaggatttatttatgaagcgtatcaaaaatatcgatctgctccgtgcgggggcgatcctctacattatgctgtaccactgctacgttctgtccgggcagccatggcagtcacatacagccatccacacacttctgactcttggaggtgaagtaggagttacactgtttttcctgttaagcggatatgggatctatctttccctttcttcttcggaggcgcgaggctgtctccccggctggcgggcttttatgaaaaagcgctgtatccgcattatgccccagtattatgtatgtatcacggtccttctgatctttatgtccacgcagatgttcagcaatgagggacttcggcatatcctggcgtattatacttttacggagaacttttccccggtgactcatggttccatcaatggtgcgctgtggacgatgggcgtgatctttcagttttatctgatcgccccgttcctttataaggcagtccggaaaaactggctcgtctctgccattgtgtccattgttttcactgttatctgccggttcgccgttgtccgctatctccacaattccgggatttcggataactctgtatattttgtatacgagcgtcaggtattctctgcgctggataatttcgtgctgggaatggctgctgccgctttctggaaacagaccggagatcgtatgcaggattaccggctgaagcttggacttccggtttctattgcaagcaccgcactgatcctggtatggatcttttattatcacagtcacgggctttatggcaccgctccctccggttatccggcacattccatcctggcggtcctgttcagtatactgcttgtgggattctccctcctgccggaaatggatttcaggtttctgcgtccgctgtacttcgtagcccggaaccagtacgggatctatctgtggcatatgcccatcatcatgatcctgcaagccaatgctccatggttcaacaccatgagccagcagcgcttctggctgtttttgccatgtatggtggtcatcacctgcgtattcggctattttgcgacccgctttatcgatcatcccgcttctgcaaaaaagaaaggataacttctcatgaaagacagaaccgccgttaaccacaatatccgcaagcattttaacgaactgatctacaacacagcccgttacacagaaatcgcattatccatcgtgatcattatcgtgatcgcactgtccggactgcgtctgatccttacaactgccggtacctccatcatggatatggacaccagcttttttaccagtttcctgtcacaggcactgtcccttgtagtcggtgtggagtttgtaaaaatgctctgccgacattccgcccagactgttgtcgaggttctgctttttgcaacagcaaggcagatggtcgtggaacatctcgatcctgtacagacactgatcgggatcatcggtatcgccattctttttgccgtccggaaatatctgatgacggacagcgatgatatgaccccgcatcagaagaacgcttcagaagaatcctcaaaaaaagctttctcttctgagtgcaaatgagcataattgcagaaaagctccaactgtatcccgatattgatacggttggagcttttcttataaattgcattgatataaaccctatacgatactattgtccacgtcggaccagctgcatgcccacagcagctatctccagataatataccctgcatagatcaggtacatacacaccatggaaattccctctttccggctgattttctgctttgtggccgcatagatccacacgatcagcgagaacacgataagtatgacaatatcaataatattttcccggatcagtgccaccggattgatggcagatgcaactccgagaaccatcagaatattaaaaatattggagcctaccgcatttcccacagccatatccacttcgttctttctggctgcaaccacggaagtcaccagctccggaagggaagttccgatagaaacaatggtcagtcccaccagtgtctggctcattccaagatcaatggcaatgcggctggcagcatccaccgtaagatctccgccaaaggcaatggcaagtgcgcctcccacaataaagaggatgctcttcggccaggaaaggatgccgatttcttcttccagctcttccattccttccatgtccacattttttcctgctgccctggccttcatggcactttggatcattaccacaatatagcctgcaaaaaatcccagcaggatcattccatccagatgaccaagtctcattccgatcgtatctcctgctgccaggatccccagccccagaagaaggagcgcacagatcatggaaaacggaatatccctccggatggtttccttctgtaccaggatcggtgtcaggatggaacagactccaacaaccaccatcaggttaaaaatattggaacctaccacattgctgaccgcaagctcattgttattgaccagtgacgctgtaacgctgactgcagtttccggcaatgatgttcccattgccacaatagtaaggccgatgatgatcggcggcaccttcagcctttttgcgatactggagcttccttctacaaagaaatccgcacccttcatcaggaacacaaagccgatcacaagaaaaactaacacaaggatcagcggtgaactgtttaccagattttccatttttcttctcactttctttttttatttcccataacccggagattcattgtcgcccgccctgctgaaaaaattctttccggcattcttttgttacataaaaaagacccatgtatgccctgctgcaataaaatataacaaagcatacatgagtctcattctttaagatttgccaggtttttcagaaaaaaccgggtctgttgacaaatcacacttacgtgcgaactactccctcatggaattgaaattttcaatttttttcaatttaacagaattgtttttaaaagtcaacccctggccggtgacttttctttaccgaaagcacatattttatgtatctttattgttttccgctttcagaaacaatccctctcaggatctgtaggactccatcttcactataagagggacacacttccatggctgctgtctgcacttccgctctggcattggctactgcatagctccttcccgctttctggagcatggcaatatcgttgaggttatctccgaatgtacaggtttcctccggagaaattcctaactgttgctggataaattcgacagctgtacttttttcgccctccggcggtgtactgtccatccattcttttccggcagccgccagcgttaccttatccctccatgccggtgtaaaatacggggcacaaagctcctcgcaccgttccgggtgatagacagagaatttcagcacctgttttccctgaagagaagaaagatcatccacttttctcatatcatagccataggaatcccgcagccaccggaacatccttccattctcattctccgcatagcagcactccggtgtggcaataaagcagtcacattccggcattttttctttcaccatatgatgcatgcgtttccaaacctcatccggaagtgtatgtaccttcaggatcttatcattcttccggatcaccgtaccgccatctgacacaaaatacaccagatccttcaccggctcaaacagcttcctctcactgtcatactgccgcccggaacacaccacaaaggtgattcccagctcagtcagcttccggatctctgtcatatattccggattgatagtcatggtcccatcttttacaagagttccgtctacgtctgttgcgatcagttttatcatgttgtttttactcctctcccatctgaaataccaatatcctctccctgggattttttccgtcgaaaagatcctgacagtcgatctcgtccaggaattccagttcctctacggtcatcagatatgaaatatattcgtcagatggataatagaaaaacagtagcatttctcttgttttttcataccaggattcccggatgcgtccgatgacgcttctcagtatttccacagaaaagggattgaaaaaataaaatctgtctgcggactccggtacctgaaaaagggccgcattctccagtataaatgatgtttttgtcccggaaacagcccgctgcctgttttcttctgcggcttttgtcatacgttcatcgtactccacgcctgtagtccggcatctgacctgccacgccagaaaaaaatccactctgccttttccacatccatagtcgatcagatgattctttttccccagatatccacaataagccagccgttccagcaccccgtacggcgttggctcgtatggataacagtactgatccgatctggaatcgtcacgaccggtggttttgatcttcagcagcttatcatattttacttcattttgatccatgcttctgttaatctccgttcgctacatcgggcagcttcgtttttcctctttatccatatctccatggacatacctggcattgaactccatattgatctcacggatctctttctttccgtcaatataatcctgatacatatccgcaagtctcgccatacagccatcacagttcgcggaaatatttccaagagattcctccacgatctgtttacgttcctcttttgttgtatctttgatcagatatcctggcattgttttttcctcctgataggttcacctgtgtttcaggtattctgtatttttgttattgttcactttttcttttgaaaaaagctgcttgtatcaaacaaacagctttacaaaaatttttcttttctgtttttttattctactctggccaaatgtcagtgtcaacacaatttttcgcctgtttccgaaacacaaaacaaaagcctccggaacaattccagaggcttcatacgtgcgttagaggattcgaacccccgaccttttggtccgtagccaaacgctctatccagctgagctaaacgcacatctttgttgcttttcctttgtgatattttgtatcaccgctgcaacaatatgtatgatactctaagacctataaaatgtcaagggttttttgaaactttttttgattttttttaaaaatattttttattgctatttttgatgcaaaagcaacagttttttaattccgtctaagtgcctcgatcgggctcagtttcgctgcctttttcgccggatagattccgaagaatacacctactgcgcaggagaacagcgtagccgccaggatggttcccgcactaatcccaggtgtgatggtcattcccatactgctgctgatcaccgcacagatcccatagccgcctacaatccccagcacaataccgatcagcccgcctatgatcgtcaggatcgctgcctccgcaaggaactgtaacataatggacgaggttttcgctccaagggatttccggataccgatctccctggtacgctctgtaacggacaccagcatgatgttcataacaccgataccacctaccagaagggaaattcccgcaacaaaagagataaacgcagtgaccatgccaagcatctggttcatggatttcatgacatcctggaagctctgtacctggaaatactcatcttcggcacactggtgacgtctctcaagaagatttatgatcttgtctgcgactgcctgggaatccagactcttatccgcctgaactatgatctgataaaattctccgctgcttccggtgaagtcgtccatggccgtataaggcacatttatggtcaccggcattccatcgtaagtatagctgacaaaggttccgttttccttctgtgtggtaactccgcagatgcggaatgtcttggtcagatcatagcaggtaatgtccagtgtcattcccactacatcatccgttccgaaaagcctcttcgcatcggcatcggagatcacgcagacgttttttccctcttcgacctccttctgcccgaaatagcttccgtacttcacagaagcattgtccaccagcttggcatcctgggcctccccggtcactgtaagattaaaatcaccctttccggttacggtctcgcctgtataggaatctgaaacattaacaccttccacgccatccagctcccggactgcatcaatatcttccggctcgatccagacctggtctgctatggcatcatcactgcagtaaacagcgatctggccgccgccgatatcattgatctcgctgttcatctgattcttcgtaccctcaccgatggacacaatggcgatcacagatgcgataccgatgatgatccctaacatggtgagaaaggatcttcccttattggccatgatattatggatcgccattttgatatattcataaatattactcattagcagtctcccctgtctctgctgcactgtcactgtctgccgctgctgcctctgccttcattccctcttccagggagcccagatcctcgatgacctcatctccggctttaattccatctgtgatctcaacagaatcttcggaactgattcctgtagtgatatcctgttttgtgatcacaccatccttcagcacataacagaaggaaccatccttgccgatatttaccactccagccggaagcgttaccacatcctctgccttttctgcatagatctttaccttcgcatctactcccagaaaaatatctttgtctggcttgtcgatgcccactgtggcagagatcagtgtggagcctttttcgttggttgtggcaatgtgactgatcttagtcaccttaccggtatatttcctgtcgccgatggtaatgtccgcattctggccttcctttaccttatcgtagtcatacttagacacattgatatcaacgctgaccttatctgtattctgcagggtaaaaagctccattccctgtgttgccgctgcgccctgctggactgctgatttggaaatgacgccgttaaaatccgccgaaatgcctttctttccttcttctaccagctctttcgcagattttgcatccagctcagtaagattgttgctgacacgcattttttctttctcttcttctgtaaggctggcagaatctgcctctgcaatggatttctgggaagcaaggtccgactgcagatccgccagatcagaggttgcctgttcgatcgcattctcaatggcagaagtatccactgtacttcctgcagaagaagcatccgcagatgcatgatctgtcagccccggtgtttcctctgaagctccatcggtaacaaaatcaccggccgcactactgctgtaatcagaatactccggcatttttggctggctggccttcttatcctcataagcttcctttgcttcctggcaggtgatctctgcctgacttcttgctgcttccgcttcatccagcgcctgggcattctcatcgctctgctctgcctgccactgtgcaaaagccatctgatacctggtatctgcctgattataagcattctgtgccgttacataatcggaattcagctgtcccagctcctgctggtactgcggaagtgtctcattctgatatgtagtcagcgcttctgaatacgctctctgagtctctgcatccctggcagcctgggcctctgcctttgcctgggtctccgcctgggcctgtgcctgcgcatctgccgcagcctgagcctgtacagacgccagctgtgatctcagggaagccagataattctgctgctcccttacctgctgttccagactggaaacctttgcttttgcgctgtcctgcttctgccgggcctcattggatttattgatggaatttttgtaatcatactgtccggactgtacattcagctctgctttctgattatccctctccagattcttcacttcaaactctatcagcttcgttccctttgaaaccgtatcgccttctgcgaaggatacgcttttgatctgtgcgttcacaggagaataaaaggtcttctgctcatcactgacaacggttccggttgcatctacgatctcctccacatctcctgtctccgctttggtaacagcaacctgcggaatctgtaatcccccgcggcctgcacctgatgccgcataaataccgcctgccacaacagccactgctgccacaccgatcacaatctttttcccttttttcattcttaagcctcctcgacaaattcctcattgatcgtatctgattcaatttttccatccatgatccggaccacacgtctggcctgagccgcgatcccattatcatgagtgatcaggatcaaggtttctcctgatctgtgcattcccttcaggatttccataatttccctgctggatgcagagtccagatttcccgttggttcatctgccaggatcaccggcggcctggctgcgatagctctggcaatagccacacgctgctgctgtccccctgacatttcgtttggcttatggtccatacgtttctcaagtccgacttttttaagagattccacagcaagctttcttcttgttttccggtcgatcccacgatagatcagaggaagttccacgttttccagcgccgtaagatttgcgatcagattaaagccctgaaagataaaaccaatctccttatttcgtaccaccgagagatcattatccttcattgtggatacatctgttccattcagataatatttcccggaggtggggacatccagacaacccagcatgttcataaaggtggattttccggaaccggactgtccgataatagccacaaattcacccttatggatctccaggtccacatgatccagcgcccgcacctcattttctccgggattgtaaaccttgcacagatctactacccgtaccaatgcatcttccataataaaattactccttgtaaagtaaatcagtcccaggcaagcccctcctctgcttattgctttttgccattgaaacagagagcttccctgatcaggttaaaaatacagagcgaagtctgcaggggatactgctgtttctcgtcggaacgctccaagccaaaacagcagcaggcagactgctctgtcatttccgggaaaaccccgctcattgatctgtaacgaaaagattacctgaatgtcttcagaactgacacacatttatacatctgtttatgcatcaagtaaaaacgccttatatgccttgtatgcctcatatacatccgccttgctggtaacctcccacggagcatgcatactcagcactgccacgccactgtcgataacctccattccgtaaagtgccgcaatataagcgatggttccgcctccgccaaaatcaacctttccaagctctgctgtctggaaagcaacattgtgatcatcaaaaatcctgcgaactcttgcaacgtactctgcattggcatcgttggaaccggattttcctcttgctccggtgaacttgttaagaacgataccgcgtccaagatatgctgcattctttttctcaaaagcctcaccataggccggatcatagccggcacttacatcggaagaaagcatgctggaattacggagagctcttcttaatgcaagctcggaatagcagcccattccgtccagaagctctgccacactgttctcaaaaaatctggactgcatgcctgtggcaccaacgcttccgatctcttccttatctacaaggagacagcagccggtacgcttcggtgtctcctccatctccagcattgccgcaagggatgtgtaagcgcatacacggtcatcctgtccatatgctgcgatcatgctgcggtcaagtccacagtctcttgcctttcctgccggaacgatctccagctctgctgaaagaaagtcctcttcctcaataccatacttctcatttaaaatcttcagcacattctgttttaccgcatcctttttggaatcatccggaagctctgcaagaggtctgctgccgatcaggatatccagcatctcaccctcaataacctctgctgcctttttctggagctgttttccggaaagatggatcagaagatctgtgatgtaaagtaccggatcttccgcatcctcaccaatgctgatctccacaatgcttccgtccttctttgcaacaacaccatgcatggcaagaggcaatgtcacccactggtatttctttacaccaccataataatgggtatccagataagccagatccgtatcctcgtacagaggattctgcttgacatccagtcgcggagaatcgatatgtgcacagagaatgctcatacctccggaaagctcttccgttcctacatgaaacagagcaacgatcttcttcatccctaccgcataaaccttgtcaccggccttaatcttctcgcctttttcaagcttcgactcaagagattcatatccggcagcctctgcttccttcacgatttctgcaacacattcacgttctgtttttcctttatccaaaaattctctgtaagccttcgcaagcttctccatttctgtctcttctgcttccttataagaaagccacgcatttcttctttccattttagtggtccacctttctttatagcttccggcagctgccgtttctcatcatattatctgcaatctgtctactattataggtcaaacatttacgaatttccaccgcaattcccattctttacaaaatctttatgattcgttatagtagttcttaagaattggccctgtatccaaaattttcaggtatcttacacacggaaagctttctgtttcaccgtagactttacctgtatgctccaacagggcaaaggaggaaacaacatgcaatcatctgctcagctaaaagagcttcttcacagcatcaaccgcaaaagctatcctgcatacaagtctctgcggggtgcataccagtttgaccgttatattttgtccattgaccacgtgcagggggatccttttgcctctccctctcacatcagtgtgaagctttcccaccgagacaccggatttccggcagaatattataaggattccctgacccgcatcacactgggagactttctgaaccgccagtttgaacagcaggtaaaccgttataccttccgtgcaaagggctccggaaaaagcggcctgatctcagtaagccactgcggtcaggaggttcttgcacgtactgcctgtgaaataacggaaaaaggcatcactgcacgttttttcatcggttttccggccaatggcagaaccatcaactctcccgaactggaaaaaatcctcttcgattttcttccggtctgtattcacaaggcatttttttaccggaatcttgacccggaagcgctgagaaaagccatctgccttgccgaagatcaggcatttatccgtcaggagctgaaaaaacgttctctggctgcctttgtcagtgacggcgctatcctccccagggaaagcggcatctcttcacgcccgatgaaaaattccgttccttttgtttctccggaaagcctgagggtttccatggagctgccccacagaggaaccatcacaggcatgggcattccctgcggcatcaccttgatcgtaggtggcggctaccatggcaaatccaccttacttaacgcactggagctgggaatttacgatcacatttccggcgatggccgggagtatgtcattaccgatccttctgctcagaagcttcgctctgaggacggccgttttatcaaagatgtggacatttctctttttatcaacgatcttccaaataaaaaagacaccctctgcttttctacagaggatgccagcggcagcacttcacaggctgccggtatcgtggaaagtatggaggccggaagtaaagtctttctccttgacgaggatacctctgccaccaactttatggtccgtgattccttcatgcagcgggtgatctgccgggaaaaggagcccatcactccatttctggaacgtgcgcgggatctctatgaaaaggcagggatctccactatcctggttgccggaagctccggagcttttttccatattgcggatactgtgatccagatggataattatcatccggtggacatcacagcagtcaccaaaaagctctgtcaggaatatcctctctcagacattgaggcccctgcatttcgccttccggaaagccatcgcatcatgaccagggccaaagtggctccatcccgccacagccgtcccggacagccggaaagactgaaaaccaaggttcacggcaaagatggcttttctcttggaaaaaccgaagtggatctccgctatgtggagcagctgatcgactccgagcaaactgcatccctggcgttgcttctgaaatatgcctgcgaacatctcattgacggaaaacgtactctgccggagatcatcacttatctggatactcagctgaaaaggcagggattgtccttcttctcagaaggctcttatattccatgcggttatgccatgcccaggatccaggaaatatattcctgctttaatcgctatcgcaggccgtagctgtgcctgaagctgtatatccaataaatctcagacaacaaaaaacgctgccgataaacattggaaatctttatctcctctgtcattcggcagtttttttctgcaatgcaaaaccaccgtcctgtcggctctgtcttgccaatggaacggtggtttatcttcatacatattttagggaaaggaaagagtttttcttaagagcttctgttctcttaagatgtttatatcatacaggataaatgtgagagaaatttgtacaatttctaataaatttataaaatttattaacgaagtctaatcattttccaaaataatcctgctgatcattatttaccatggtcttccggaaaaacacgaaatattacagccgtttctttcgctttttagtcgtgtctctgctctttgttatcatatgtctcacagaatctggcagcaaaagccggcggctcctgatgcgcatacaaatgagaaatatctccaaaagagctcatacggaaggacgcgatcccttttcgcctctcctctgtaacaatggtgctcaccgatgacggcgccgcacagaaattctgcagcatcaccagcggagagatactgagaagatagctgatgagtacacagcttacaccgaaatggcagaaaaacacaagcgtatcttcattggctttttctgctctgtaataatgtccttcccgcacatagccatgctctgccagaactttatcaaaattctgtgtgacccagtcatactcttctttcatttttccctctcgcaggatgtcattatcccaccagcggtcaaagctgtagaaattttcgatcttcgtccagtcctggggaagccagtcccagggaatgatcttttccccatgaagatccggtcttctgatctttacgtcgaattctctcagccacttgcattctgtagctgttcttccgtttttcttcagtgtgcaggatgcggtatcctttgctcttccaagcggagaaacataaaaatccctgacatcaagagctgcgatcttttcagaaagaaattccgcttccttccagcccttttcggtcagggaatctattgtgtaatccgggtctccatgtcgtataaaaagtaatttcatcttttggtatcctccatttcataacctggatttccattatattcttattttttcagttgtcaattcctgatagcttctgctgcagggatcaaacctgatccgcggtttctccatggagcacagcctgctgctccctcagctcataaactgcctttttcaatgcctgaaagctctcctcactgattatgtgctcgatcctacaggcatcatgaatcgctgttttttcctggactcccagtatcatcagccaggaagagatcagctgatgacgttcatataccttatcggcaatcttatgtccgtcctctgtcagacggatatctccgttgtcggctactgtgatgagatttttctggcgaagattcttcatggcaacactgacactcggtttcttaaagcccatctctgccgcgatatccacagctcttacaagagagctcctgtttccaaggatcaggatcgtttccaaataatcttcagatgattcatttgatctcacgttatttacacctccctcggtttgttaaaactaaccaagttaatcataacatactttaggagaatgagcaatggtttttactgctttctgtttagttctgcctcaattgccagaaggcactggctggaacatatctgcagaattctggaaatttccaggagtttttccctggagcagtttccccggagcagttcacaatatccctgaaatttcatctgtaccaggatatgtaccagctcgtgatcaacttcttgtccacattccttttgaaaacgttcattaaggatctgctccattttcgtacaggcatcctcacggaaattcacatatctggtaccttcagctccatctatgaggatttttgcgatgtccctgttttcccagataaattccataagtatcctgtcatattcttccggatgcagttgtttttcctgatccgtaaagtctcccatgatccgcttcagatcctctaccgtctcttccacgatttcttcaaaaagagctgctttactttcaaaaaagaaatatagcgctcccgtagtcacatctgcttttttgcagatcgcacgaagagaagccttcagaaatcccctgtctctgaattcttccttccccgcttccagaagtctgctccgcacagcattttctgatttttccatattttacgcactccatcatttttcctgcattccgctttgcaggaaaattccgcttatttctgaccagctgttaattttttagcaatctgatcttactgatattttaccttaaatcgctgaaaaaagaaagtattttgtaccccgtgtcaatctgtcatcggggaatctccacggtctgtaacgatttcatagcctacagactccacacgtctggtaaggcaccctctgcactctgctgcttcctcgcctgtacagatcttgttatcataaagctcatactgtttacggttcttcaccggagaaagattgggcattactacatttgcacccgcctgaaaacccttttccctgcctctggggtccagggtccccagtgctgtggttgccggaagaagtacctgtggaagcaggatccggatgacagacaacagaaacagggtcagatccacacttcctgccggttcctctgcaaatttcgtatcatggtgcgggacaaatggtccgatccccaccatatgcggattcaggtctttaagaaaaacaaggtcttccgccagatactccagcgtctgtcccggcgcacctaccataaatccggcacctatctgatatcccagttccttcagggtataaagacactgtttacggtttgcaagacttaaactctccggatgaagataacgataatgttcctcactggccgtctcatgacggagtaaatagcggtctgctccggcatctttaaatctctgatagctttcttttgatttctccccaatggatagcgtgatcgcacagtccggatatccctgtttgatggaccggatgatgtcaaccatccggtcatcattaaaccatgggtcttcccctccctggagcacaaatgtccgaaatcccagctcatagccattctcgcagcactgcaggatttcttccttcgtaaggcggtaacggctggcattcctgttagaacggcggatcccgcagtaatagcagtcatttctgcagtaattggtaaattctatcagacctcttgtatatattttatttccaaaatattttttctgtatacggacagcctcttcccgaagcagacgaaccgcatccggatcctggtataagtgcagaagttccggatattcttcctttgtcagctgtccttcttttataaatttttcaacgatccccatactttatctgtccttctcttttatttgcaaaactatctgtaaaaaatattttatcacaaaaaaacagatattgcacaatataagtatacatgcaatatctgttcttacagaatggttaatgttcactccgttctcagtaatgctcttcacgatgcacagaatgatccaatttttatttaataagatcctttacaacctcaccggcaatgatcagtcccactacggaaggcacgaaggcattacttcccggtacctgacgtctctgagtacattttctttctgttcccggaggacagatgcaatgagacttgcagctgatcgccatatcatcaattggagtcattggcttctcctgtgagtaaaccaccttcagttttttgattcctctttttttcagttcccggcgcatgacctttgcaagggggcagacggacgttttataaatatctgtcactataaaacctgttggatccatcttatttccggcccccatagagctgatgatcggtgttcctgaagcctttgcctgctctacgagcatcagctttccggttacagtgtcgattgcatcgactacataatcatactgggaaaaatcaaaggaatctgctgtctccggcacataaaatgttttgtggatatttacaactgcatccggattaatttcaagaatacgttctctggccacgtcaaccttatattttcctacggtctttcttgttgcgtaaatctggcgattgatattggtgaggcatactttatcatcatcaatgagatccagggtacctacgccacttctgaccagtgcttccaccgtatatccgccaacaccgccaattccgaatactgcgactctggaatttttcagcttttccattccttcttttccgattaataattctgttcttgaaaactgattcagcattttctgacttctccttatattctttccatatatatttatactgacaacggatatattttttatatctgtccgatttgttttacaactgtcaggattctatcatgggaaaatagccttgtcaatatccctaccaataagctaggaatattttcccgttttcatcaataaattttatgatacaaaaaaagatccctaaaaaggaatcttactgatactgcgggtagccggacttgaaccggcacggagttgcccccgagagattttaagtctcttgtgtctgcctattccaccatacccgcatattcaattaatttgttcaaaaatggggcctatagggctcgaacctatgaccctctgcttgtaaggcagatgctctcccagctgagctaagaccccaaatatgaacgacccagaagagactcgaactctcgacctccgccgtgacagggcggcgctctaaccaactgagccactgggccatacaaaatataaaacttttaaaatggaccttcggggactcgaacccaggaccgaccggttatgagccggttgctctaaccaactgagctaaaggtccaaaaagccgatgatcggactcgaaccgataacctgctgattacaaatcagctgctctgccaattgagccacatcg

SEQ ID NO: 304 - DNA, 7165 bp, Unknown
  gut microbiota DNA sequence
tcggttttccctgtcattccagatattcaaacggatctaccggcacgccatcctttttcattgcaaaataaagattcgggccttctacagaataatatttggtaggtgcactgatatttccgatcacttcaccctcctttactgtgtcaccttctgccacagtaaggtccttcagctgcccgtatactgcctgataaccatttcccaactccatagtgacagtcgttcccgtgcaggcatcctgtacaacagaaagcacctgaccatcagccgccgcatacaccggcgcatcctccactgcctgcaaagcaatggcagagcttacacgatactgatccaaagtcggataatatacggtttcatccatattgtaatccacaagaaccgttcctctgaccggccattccataatggaatcctccgtaaaatccaaagcctgtgccgcaattccgacagctgaggtctctgcggtatctgtggaagctccagctccgttattcactgctccctctgccgatgtatttccggcattatctgctgtatttccagtgccatctgtgcggcttctgtctgcacctgccgccgcagacacgctcctatcatccgtaccacttccattatctgcatctgccgctgcattttcggctgtaccacttcctgcagtctcacggatgcttcctgtcactccatctgctccggcttctgaagctcctgacagacctgcttcatctccggtttctccatcagagatctcatcctgtgctacatcctgccagccatctccggcagctgccgcatcctctgcgttttccccgtccgaaagctcctcttccagcccggtctcttctacctgtacagaattttcctcctggggattttctgcgatgggctttgttccaagctgataaacagtaatcccaagtgccgccactgctgccagaacacctccgttgataatacctctcacgattttacttttcatattctttccacctctgtctgatatgttcattttcagtaacagaaaaaacagtaaagctgccgtttcggtcaccatttctatatctatagagtgtccagaatatggctgtctattcattttttgaatatttttttatcagacgttgcttcggatgcctgactttttttaatcctcagctttcagctccatctccggaaaatattttttcaggatctcctccgcactgcttccgttttttgccatctcatttccaccaaactgggaaaatcccacaccatgaccgctgccacgcactcgcagataataaatatcatcctttttcttcaaactgaaattcgcggattccagtcccattcccgctgcaaagctttctccctccagaagtgtttccccaatcgtaagctctgtcacataaccggcactgtcccgttttttgatcttcagctccccggaaagctgccccgcaggaatttccacgatttttatatgatccggagattttttgtcctcactgctatctgccgatttcagatatgtatacgcctcatcatgaaaagcttcttccccgctgcgggttttccctgcgcttctcttatgccagggagtcagcctcacttttccttcatatgtaagtacctgtccatccgtctcttttgctgcctgctcatagatctgccttttttctgcaaaaaaatatctccagacttcctctgtacttccgttttccctcaggatctctgccagatttttcccctctcccagccacctttgaatattcgaccgtgcgatcacagtctgcgcctttatggtttcttttttcatatccggggaaatctgcgaaaaaacaatgaccgggagatattcttccatatctggcaccctctctgccaggaccctctccggtccattaatggttgccgccgaaaaataaggaagaacaattgctaaaaacaccagacaatatcgaagaagcgcatattttttcataaaaaacaccataagcgttctttttcctaatatatgttcttttgccaaaaattattatttgctgtatactatagcagttctatgaatcaatgcatcaaaaaaagttattccgaacatgctgcagtaatttatggaaatgctatgtatcaatccaaaaaatatctgcagcgatcagtcctgctcaccgcttattgcttgccacgaatggaggtatcacacaccatgcttgccatctttctcgcaccattatatattctcattaatatttatatcgtccgctggatgattttgtggatgggtacctgcactcattttttccagacctttgcgttccgggcatgctttgcaggtgtttatatttttctgtccacttctcttctgacctgttttctcatccggaagccccctgcgctccatcgcttcctgaaaaatacggcaaattattttcagggaacatttctttacatcctgatcgtaatcgtaactacagatctctgcagactgatcctgaagcatacgcttcatccggcctggatgtattcccggaaagccttcgtagtcacaggcgctgtctgcacccttctgatcattggtgtcagtctctatgggatttttaatcagtggaatattaagacaaaaacttatgatgtgaaaatagacaagcaggtgaagggaatggactccctgaagattgtcctgctcgcagacattcatttcggttacagtatcggagaaaaacatgccgggcttcttgtaaaaaagatcaacgccgaagatccggatctgatctgtattgccggcgatatttttgataacgaatatgaagggatcaaaaacccgaaaaaaacagcggccattctccgttcgctgaaatccagatacggcgtttatgcctgttggggcaaccatgatctcagcgaaccgattctggccggttttaccttccgcaatgcaaaaaaagattatgatgatcccagaatgcggaattttctggaatcttccaacatccggcttctcgatgacgaaaccgtcctcatagataaacggttttatctgacaggccgtaaggatccttcacgctgccgaaaaatgtccgacacccgtaaggatcctgaccagcttacagcctgccttgacaaaacactcccgattatttttatggatcatcagcccggtcagctggatgaagtggcagccgcaggcgcagaccttgatctctgcggccatactcatgacggccagctgttccctctggacatcatcaccggcctggtctgggaaaattcctgcggctacctgaaaaaggggactatgcacaacatcgttacctccggtgccggcatatggggcccgaatatgcgtactgccacaaacagcgagatctgttcgatcacagtacatttttatcctgccagacctaactcctctgatccctcataaatatcttccaccggcagctcctccgcactctcactatcctcttctgttatttctgttccgtcattttcttcttccgtttcagagtccttcggaaactcaattacttcagccgtatcaccactttctgatatctccggctcttcactggaatcatcaaatatctcttcctcagtattatcgtccgtctttccttcttcagaactcatattgagttcctcgctgctctcttcttcagctttcttttcactgtttcggatgatctcaagggcttctgtttctgaaataatgcctgaattatcttccattgcatttgcttccggcacttcataatcatatacaaaggtattgactggcataagcttgtttgactgcacatcatagtcaaatacatgccacaggtatccttccctgttaaccggtacatttgcctggtagatctgttttccaccccggtaaacggttactttggctgacgaagcagataattctgtactcgcatcatcttcaccgtttgtataatcgtatacataaaagctatattttcttccggtgaagcctttgtatatggttgttgtttccggtccatagctgcttgtatcatccagatccagatttgctattacatctccatcctctgaatatgcatttttatccctatagtatacatggaagtagtcatctccgttttcatcagcaggtcccagcagatgagaatccagatctcgcggagtttctccccatgtaagcacgatctgaagaagtccctcatctcctgcactgatattggtcggtgacattgttacatcacgttcactgcatgcatttgcctgaactacaacattgatatgggcagaaacaaaatcttcattgcttgcattcagcgtatagtttccggctggcacggtcaacgtataggttccatctgctgatacgccttctttcacagtctctccgatcacattatcccagcccttacgtaattcataagttacattttctatatttccgccggtcatggaatgaataaatcttccactcagctcaccatctccggcttctgctctggataccatcaggaaagattctgcgtatgtgatctggttcgctgatacttccatggaactgctctcatatttctggtaaccggttgctgtgacaacaattttgtaggttccttcatcaagatcattaaatgaataagttccatcttctttcgtgaaagttttttcaaccttgactgttccggaatatgcttccacgctggcattttttacaggagctttactgtttgaatccaaaacgcttccctcaatgcttccggctccgactgtacatttatctaccagtgttccattttcaaaatgaaccttcaattttagtggattatcgtcatcatcagacagaaaatccttggacaacgtataatgccataccgttttcaggaactttccgaccaccgtatccggattcaactcacccgctgcgtaaatataggttcttacatcagaacaaagcacatttccggcatcacgaactgtataggatacgcttgcctttgccgcaggtcctaccttaatatcaattcccgccagatcccatgtctccaatgcagtcagatttaatccaaactgaagaccgcatttcgcagatccttctattgtgaccggtgtcaaagtctgactgaaatcatggataaatcttccatttccatctttgaattcatatccgccagttgcttcaacggaatatttcacaacaaactgcccggacacatcataaaacagagaaaccaccagatctgcagaaagaccagttgtaccaagctttataggaactcgtcccagttcaagtacatcgctgactgtttccatagttccacttgcatgtttgatctgctgctctgaattcacgccacttatataaagtccgccttcgaaatcagcttttcctgtaactgacgcaataaaatgccttacctctatctttccccagctaaatccggcatccagcttacagcttacatccggaatcgtaacagcaacagaaccggacagcttcaccttatcattaaatttatgattaagatcaaatttcaatttacctggaaccggaatacttccgccgagagtaagtcctcctgccggcacctcacttgaattttccggaatatactcatattgaacgccctctgcagttacctgcatattttccggatctgcaattcctgcaccttcaaaatcaattgatttgtaaacctctgaaatatcatccggtttgcctgccttaatgatcagacgtccctgtccgtcctttgtgatattctggacttttaatgcaatatctgtatctgttcccatttcctttgcagaaaacagtacaacctttccggtttccagatttttataagcatttccgtattttactgtgatcgtataagttccgtcactgttctggacaacattgtatatattttgggaagtatctttgacttcaactgcatttgctggcatactgattcctaagatcaacatcaggatcagcatcagcggcagcaatttttttgacgcactttttctcttcataagcacttttcccttctgctgtactatgctataatgttcatcaattataaattttcgagatcattcgaaatcatttataattaatcccccgtaaattatcagactatcaaccaagaaaggagaaaaatcatgagtgtcaccgtaaatccaaaagcccgacaaattttaccggttattctgggctgctacgtaattggaactgttttttttatggcaataactatctgttccgccataaaatatcatgattacgtacctgtagatgctgttatatcatctgtcagccgctcaaataatcctaacaagcctcatagttccaattatcataactatgtgaagtactcttacacctacaaggaacaaaactacacagctgaccgaatcgagtttttacgcctcggcaaagcccccggaaagcatgttcagattaaatgtgatccgcagaatccaaaccagatccagaatatctattctatgaccatctgtattgtcttcctggtaatcctgatcataacagatttcctgctcattcttatgataaagtcttaatactgtacagctatgctctaattatataacatttttatctcttgaactttgtcaaatttgtcgcaaagtgaacattttttgtcgaaaatgtccataatatttttttatcgcattgacatactcctaccattgaaatcctactcgatggctctgctgattcgttcgtcagtacgtaattttctatgatataaaaaagacggttacgctgaatcacaacgtaaccgtcttcctttatactatactcgcacagatataaaacaaaattcccacctactgccttgagcaataaatgggaatttatctgatccacttaaaaagtgaggcatcggggattcgaaccccggacaacttgattaaaagtcaagtgctctaccgactgagctaataccccatatttacattaaaacatacccaagctttttctaaccagctgttcatatgttttacattaaaacatacccaggctttttctaaccagccattcgcatattttacattaaaacatgctcaggctttttctaaccagccgttcgtatgttttacattaaaacatgcccagagccggaatcgaaccagcgacacgaggattttcagtcctctgctctaccaactgagctatctgggc

SEQ ID NO: 305 - DNA, 246 bp, Unknown
  gut microbiota DNA sequence
aagtagcggggacaggatttgaacctatgaccttcgggttatgagcccgacgagcttccagactgctccaccccgcgttattaaatgttaaaagccgatgatcggactcgaaccgataacctgctgattacaaatcagctgctctgccaattgagccacatcggcatttaagtggatggagaaggattcgaaccttcgaaggcggtgccaacagatttacagtctgccccctttggccactcggga

SEQ ID NO: 306 - DNA, 305 bp, Unknown
  gut microbiota DNA sequence
tttaattcattacagctaagctgtaacgacccagaagagactcgaactctcgacctccgccgtgacagggcggcgctctaaccaactgagccactgggccattttaaggtttgtaccttaaaaactacatacatgcttgttgatcgttaatcaaactctttgaatcaattcttaacctgcgtttcttggtcaagccctcacccgattagtaacagtcagctccatgtgttgccacacttccacctctgccctatctacctcgtcgtcttcaagggggtttacttcataagaatgggatatctcat

SEQ ID NO: 307 - DNA, 3590 bp, Unknown
  gut microbiota DNA sequence
agatatccggttcacgagaataccacagcagagtattttcaggtaggagatgatatgtttccggttctggtgcatgaactggagcaggcaaagcattttatttttatcgaatatttcatcataaatgacggggtaatgtggcagacgatccttaatatccttgaaaaaaaggctaaagaaggagtggatgtccgactgatctatgatggcttcggctgccttaccacattgccatacaagtatgatcaggagatgcgccagcgggggatcaaatgcgaagtattcaaccgatttcgtccgattcttaatattatccagaataaccgcgaccaccgtaagatctgtgtgatcgatggctggaccggttttaccggcggcatcaacctggctgacgaatatatcaatcagcgaaaacggtttggccactggaaggatacagccgttatgctgaaaggagaaggcgtctggaatatgacagctatgttcctgtatatgtggggaatcgttaccagaacagatacttctcttgatttcggaaattatgttccgcacaggtggcaccccaacgaatttccgggaagcggttatgtccagccattctgcgattcccccctggacgatgagatcgtaggagagaatgtttatcttaatattatcaatcgcgccaaaaactatgtttatatctgcacaccatatctgatcatagataatgagatgatgaccgccctgtgcctcgctgcaaaaagcggtgtagatgtccggatcatgacaccaggcatcccggacaaaaaaatggtcttcctgctgacacagtcttattataaacagcttctggaagcaggtgtaaagatctacgaataccagccgggattcttacatgcaaaatcttttgtctgcgatgacaaagtaggcgtcgtaggaaccataaatctggattaccgaagcctttatctgcattttgaagatggtgtctggatgtataagaatgatgtgatcctggacatccgggatgattttacagaaaccctggagtactgtgatcccattgatctggcattctgccagaagagaaatattgtggtacgtgccattcagaacgtactgagagtttttgcaccgctattataaaaactctttgacagacaactgtaaattctgtatgatatatcagacgggagttcaatgctcccgtctgatattgtctaaagaaaaataatttatagatacatatgaaatttttagttattggaggaattgatttgagccagaacaaagaaacagagatccagcttcagtacattgaaaaatgtaaagagcttcttgccaaaagcagtactaaacgtcccaccttccacatccagaacgaaggatgccagatgaactccattcagacagagtctattgcggccatcatggaaaaaatgggatatgaaatggtcgataccgaggatgccgatgcagttgtatttaacacctgcacagtccgtgaaaatgccaatcagaagatttatggacatcttggacatttaaagcgcatcaaacgagatcacccggatatgaagatcgtactgttcggatgtatgatgcaggaacatcacgtagtggaaaagatccgcaaggattataaatatgtaaatcttgtattcggaacccataatatccacaaattcccggagcttttttaccggacgctgcagaccgacgaccagatcattgatatctggaaggaatccgatgagattgtagagggcatgccaacttcccgcaaatactccttcaaaacaggagtcagcgtaatgtttggctgcaataacttctgcagctactgcatcgttccttatgtccgtggccgcgaaaagagccgcgagccacaggccatcatccgcgagatcgaagaactggtggcagatggcgttactgagatcatgcttcttggtcagaatgtaaactcctatggaaaaacgttggaaacaccggtgacattctcacagcttttgaaagaagtagagaagatcgagggactgagacgtatccgtttcatgacctcccatcccaaagatctttcggatgaactgatccagaccatggcagagagcaaaaagatctgccatcatcttcatcttccgctgcagtccggaagcagcagagtcttaaaagaaatgaaccgccgctatgacaaggagaaatatcttcagcttgtagataaaatccgtgaggcaattccggatatctctctgacaactgacattatggttggtttccctggagagacagaagaagatttccaggaaacactggatgtggtaagaaaagccaattatgataccgcctttacatttatttattccaagagaagcggaactccggctgccggtatggaaaaccaggtaccggaagatgtggtaaaagaccggttcagccgtcttctttccctggtgcaggaaaaaggccgtgagaattcttcacgtttccagggaagcgtacaggaagtcctggtagaagatgaaaaccgtgagaaaggtactcttacaggccgtacccagcataatcttctggtacattttccgggagataaggaacttatcggtaaatacgtaaacgtaagcctggatacctgtaaaggattttattattttggtcatatagtagaagagtaaattttggttaatataagtttatattgcccgttcatccgatcatcggtaatgagcgggcttttttattgtacgatttatgtcggcggtaaaaaatttcagtttcctattgacaaataccccttgagggtatatattgttccatgtaaagcagataccccatgagggtattttgagaaaggagagacagcccatgtctgaaaagaaagcctgtccctgctgcagtgaaaaacacactgcccgttcagaagaggagaaaaaaaagctgatcaatcgcctgaagcgtattgaaggccagatccggggaattataggaatgatggaaaacgatgcctattgtaatgacattctgatccagtctgcagcagtcaatgcagcagttaattcatttaataaagaactgcttgccacccacattcgaacctgtgttgcaagagatatccgcgaaggcaaagatgagaccattgatgagcttgtggcaaccctccagaagttgatgaaataaagggacataatttattttaggaggtactgaaaggaaatggaacaatataatgtaaccggtatgagctgcgctgcctgctcggcccgtgtggaaaaagctgtatctaaggttccgggagtgaacagctgctcggtcagccttctgaccaattctatgggagtggaaggaaccgcttcatccagcgaaatcattgctgctgtggaagcggccggatatggcgcatctttaaaaggcgctgccggagaaaaaatctccatgtctgcagcggaagaagcgctggaagatcatgagaccccggttttgaaaaggcgcctcatcgcatccgtaggatttttgctggtgctgatgtacttttccatgggacatatgatgtggggatggccgctgccgaaatggtttgacggcaaccacgttgccatgggactggtaca

SEQ ID NO: 308 - DNA, 149 bp, Unknown
  gut microbiota DNA sequence
ttttcacaccgagccatgcagctctgtgcgcttatgcggtattagcagtcatttctgactgttatccccctgtacaaggcaggttacccacgcgttactcacccgtccgccactagaattaaatcatatcgaccgaagtttcaataaag

SEQ ID NO: 309 - DNA, 2602 bp, Unknown
  gut microbiota DNA sequence
gctgcccagattgatcaatgccgtttccgtcggatctccgatctccactccattttcatttgttgaatcattacataaaatgctgtagtccaaaagacatctctgcgccggatctgctacatcaattgcatctgctgtgattctttttccatcaatataataatcttccactgtcattttgttctgtgtgagtgttccggtcttatctgaacagataacagaaacgcttccaagaccttccaccgcctggagcttacgaatgatcgcgtgctcctttgccatcttctgtgttccgaaagaaaggacgatcgtcacgatggagcttaaagcttccggaatcgctgcgactgcaagtgctactgcaaacataaatgcactgctgatcttctcaccgcggaatacactgatcgcaaacagaattccgcaaaatataaggatcagaatggaaagcttctttccaaaatcatccagattcgcctgaagtggcgtctgtttttccgaagtcgatttcagaagtcccgcaatctttccaacctctgtctgcattcctacattcgttacaaccgctctgccacgcccatatgtgacaaagcttccggaaaacagcatatttgtccgatcaccaagcggtgcttcctccaaaataatgtccatactcttttcaaccgcaagactttctccggtaagagcactttcatcgaccttaagacttgcattttcaatcaatcttccatccgcagggatcatatcacctgcttcaagaaggatcacatctcctacaaccagttctcttgccggaagctgtaccgccacaccatcacgcaatacttttgcctccggaccggcaagcttctttaaactctgcagagactgctcagcctttacggtctgcacggttcccaaaatcgcattgatcgtaataacgatcacgataactgctgcactttccacatctccaagcataccggatatcactgccgatgcgatcaggatcagcaccagaaaatccttatactgttcaaaaaagatctgcaaaatactttttttctttccttctgcaagctcattccatccgcacttctctctggaccgtctgacctgtccatcggtaagccctgattccctgctttccacacgctcgagaacttcttctgctgtctgctgataaatttctttcattacctttgcctccttttttgcaaatattcaccaactgtaatttttttatgcaataaaggatttttttgataaaaggatataaaaaaagaaacccttattgcacaacaaaaaatgcaataaaagtctcaccatttccctgcagcgccggatgtttccaccgtactgacgacactgcaaacgcagatttccaaacgtaggttactcccctttatcagttttaatagtataacaggatcggtacctctgtcaagatactttataaatcacgccttgcaaatatgttactccggcaacagaaaaactcccattttttgaatggaagtttttctgttaccctgaaagtattataggcctgcagccgttttattaccttttaagatttattactctgatcagccacaatatttccctgtacaactcttccctgatcttttccttttctcagtcctcgaactacctgcacatttccaagaatcagataatccatttctctcttagtgactttcgcaaaatttttctttgaaacaaaatagaaggtaactcccatcaacacccacacaatcagtgctgcaaaggactgtggagccatgaatgctggagaaccgggcacgatcaggagcagcaatattacaacagagatcacacagccgcccattgctactgccggatggattttatttgtatctgtatcatcgccatattttttcagaagaatataagcacctgcacaggtaaagaaatatccgaacgcagtacctacggaacacatatctacaacccagccgatcacttctctgccgaaaaatgggcagatacagcagatgatcatggtaaacccaacacatatggacggagttttatgctccggatgaaccttttcaaaagctgacggaagcatttttgctcttgccataccaaataaaagacggctggatgtcataaagaatccgttcataccggtaaaaatccccatgcacactgccagtgccacaaagcacacaccaacttttcccattgcaagatcaagaactgcacctgtatgccattttacaagagttccattcgcatctgtcatagtcagaacctgctgccagggaacaacacaatctgtcaccagtgccattgcaccatagatcaaagcacctacgatcaatgctgaaatgatcagcattttgcacttctgtggtggaaaatcatattcttctgccgcctgtggaatacagtcaaatcctacataaaggaacggagccaatgccaggatagatacaaaaccgcttccaagagatttgccttcggctccgtatgccggctgcaagtttgaagcatcaaaatgtcctgttgcgatcacaccaatgactgatacaacaaccgctgcacacatgataaggaccatcgcaagctgaagatttcctacagatttcgc

SEQ ID NO: 310 - DNA, 1553 bp, Unknown
  gut microbiota DNA sequence
aacgccgatacaggatttttataatcctataccggcgtttgtttggttacgagagaatgtgttttacgcttactttccaaatgtattgctggatttagcagcagctttagctgccatggtgttggtggactcaaacaaggaagttgtcggcgcgaccggacacatcagtactcgtcctgttccacgataaacatttaccagcccctctccgctaactgcagatcctacaagtgtttttgtagatctttctacggtgaattcaagatttgatgaccagcatacagcaagatttccatcaattttcagttcatcattttccaatatgacttcaatcaattcatcttcgggaacattagactccagtgcagctacaccatttccctgtaaactcagattaaacagaccttcgccacctagtacggctgatgaaaggttctttctggctacaactttactttttacatttgcatcacaagccaggaacatgccatcttcaattgtcattccggctgatccccacttgccaatgtctgcaaggataatatatttatatgtcggttctaataccaggcagccttcaccaacatattccggtttaactgcggtttcttttgtaacggcacctttgattgcttttccaaggaaatctccgatgccttttacgccagatgtagctcgtacatttccgcccatccattgcatggcaccggcttggataacagctgaatggtctttatcaatatcaataacaacctgtcttcttctgacattcattttactcatgaaatactcattcattgcattcataggtgaaacgctggcatcctgtacatattcaagtacatggaagttcccgatacttttcgcatattttctgttttcattttgtaagttttcaattcgcatagtataatctcccttttaataatctatgatgttgctcggatatgcttattataaaagagtcagcatagatagaaaacaattcgtgcagagaaatataaagacagaattctcaaaattcgagaaatataaagatgcaattcctcatggtggatgtgtattatgaaaaataaatttgctatagtgacaatatcaacaaaaaagtagaatataaatggggtgatcagatggaagtggcacagagaattcgattgatccggataatagaaaagatggagaaaaatccggcatttagtaataagattggtataaagaacacatctgaatatttatcagaaaaagaacagaaaaaatgaaagacacatatcaaaatgagtttcagaaggagtaaaaaaatgttatcgttattatttgcaatttgtatgatttggtttgttggaaaattttttatatttggattaagagcatcctggggaattatgaaattactttgcacagttattttcttcccggtgatattgattggtatggttgtaggtggactgatgtacattgcctttccattgttgattgtcggtggcattatagcattggtgacgtcacattcataatcgatcagtaggagaaaacagaaagtatcatcaatcaat

SEQ ID NO: 311 - DNA, 699 bp, Unknown
  gut microbiota DNA sequence
cgggaagaagcaacatcatagatattgatgcgaccatcatctgcgagcgtaattcccataaaggcatcatcatcggaaaacagggtgccatgctgaaaaagataggaagcaatgctcgctatgagctggagcgtatgctggaagcaaaggtaaacctaaagctctgggtcaaggtgactaagaactggagagacagtgatttcctgatcaagaactttggatatgataagaaagaaatctgaaaatgagtgatctgattaccgtacagggagtggtactttctgccatgccggtaggggattatgacaagcggatcgtccttctcacaagagagagggggaaaatctccgcttttgccaagggagcgagacggcagaacagtccgttcatggcagcagctaacccgtttgtattcggaagctttactctttatgagggaaggacaagctataatctgaaccaggtcagcgtgcagcatcattttgtggagctggccacccggcagccgggggtttactatggatattattttctggagctggcagattattttggcaaagagggaacggatgagaaggagatgatgaatcttctctatgtgaccatcaaagccattttgaatcctcatatagaagaccggctggtgcgctgtatctatgaactgcggactatggtgatccagggcgtgatgccgcagct

SEQ ID NO: 312 - DNA, 1105 bp, Unknown
  gut microbiota DNA sequence
actgaagtcttttttcataattccacataccttatctgcaccctccttcctgttcccatggaaacggctgttccatccactgccatgacttaagatcgctgtcgtttccggtatcaatggtcagcggtccataaaattttgcatatttttccaggagctcatttcttcttgctgaaagctcactgtaatattcaagagctcttttttcttttggatgcgtatccagaaaaaggagaagatcgtcaatggcaaagcttacctggtcaataaactgcagcagttcttttttggaagtacaatttccggacatcatcggccgcctcctctcctgccgcagaacggcttgcaaagctcagggaaaatagttccgacctgaagagcttttttcagctcaaaggtaggcgcaaattcctggtatggcacatacgccattgcaggaacctgttttgccatatcagaaaatgatcgatccgtccggcctgccatcccgctattcatcccacaggtatactgatatggccggcagcccgaacgattcatttgaaatcggtccataatcgaaatcctttcattcatgatcacgctatattttatgaccgttttttaaacttgtgaaaacaggaatgttcactttccttcatatatatctatctttctgccatttttttctatatatacaggaaaatattactgtttaaaaatcagatatacaatgctataatatccttgcctatctttacacggatgggcgcttttacttatgatttgtagccctgaccggctattgaaggaggaaattatgcaggtaattattgtaggctgcggaaaagtcggtagaaatcttgcagagcagcttcaggcagaggatattgatatcactcttgtcgacgttattgccgacaagatcaatgatctctgcgaaaatatcgacgctatgggaatcgtcggtaatggtgccagcatcaatactttaatggaggcaggtgttgatactgcagatatcctgatcgcagttaccgcttctgacgagctgaaccttctctgctgtctgattgcgcagaaggccaaccactgccagactatcgcccgcgtccgtaatcccatt

SEQ ID NO: 313 - DNA, 224 bp, Unknown
  gut microbiota DNA sequence
acagctcgggcatcctacctcgtgttctttgatgaagtccatcatcttctcctgggaccatgcatctacgcttccctcaatggcaatgtcatgctctgcacaaaagtcctcaatgagcttatctgcacggaaacgctcgtggcactctttacagtccataagaggatcagaaaatccgccaagatgtccggaagcgatccatgtctgcgggttcataaggattg

SEQ ID NO: 314 - DNA, 236 bp, Unknown
  gut microbiota DNA sequence
cagtcccaatgtggccgttcaccctctcaggccggctatggatcgtcgccttggtgggccgttaccccaccaacaagctaatccaacgcgggtccatcttataccaccggagtttttcacactgagccatgcagctctgtgcgcttatgcggtattagcagccatttctgactgttatccccctgtataaggcaggttacccacgcgttactcacccgtccgccactagaattaaa

SEQ ID NO: 315 - DNA, 508 bp, Unknown
  gut microbiota DNA sequence
gacggcggaaaggtaacaaaagcagcgacctgcaccacagccggaacgaagacctacacctgtacccgctgcaagaaaacacgcacagaaacgatcgcagcaacaggtcacaaagtagtgaaagacgcagcggtagcagctacttgtgagactgcaggaaaaaccgaaggaagccattgcagcgtatgcaacacagtgatcaaagcccagaccacagtggcggcattaggtcacagctgggacagcggaaaagtaacaaaggcagcgacctgcaccgcagccggaacgaagacttacacctgtacccgctgcaaaaagacacgcacagaaacgatcgcagccacaggtcacaaagcagtaaaagacgcggcggtagcagctacctgtgagaccgcaggaaaaaccgaaggaagtcactgcagtgtctgcggaatcgtaataaaagctcagaccacagtggcagcgttaggccacagctgggacggaggaaagataacaaaggcagcaa

SEQ ID NO: 316 - DNA, 2335 bp, Unknown
  gut microbiota DNA sequence
gacaaataggatcttcaggaagcatgtgcaagaatcaaaaaagcagtggaagagctgaaaaacaaatgatcagataaaaaatacccaccgcttttttggtggaaagcggtggatcaaaaatcctggtataaataatataataagaagaaacggtaaagcagaaaatgttcctgacggacttgtgcttaccgtttttttatttctgtcgttcccatacctggccgatcgggaaggacggagtggattctgcaagaaagtcttccagtgcattttcgaagaattccacggcacgtttgctggtggactttggatatttatgcttgatcttatagcagacacggtttggcggtgtgtttttcagttcactgataaaaagaggccggtaatgggaaagctccaggatcacagactgtggtgcgaccatccagtttcccggttttttccagagacggtccaaaagtgtgatggtatctgccgcaatgtgaggcctggaagcggaggaaagccagcggtcatgccagatctgataattgtcatcccaacttaaaaacagctccagggatggatccagctcatcggtatgtattgccggagccggaatcactggttgatccgattgtatcagataaagtttttcttcgaagattttctctgttataatattcttgtaatgcaatttgtggtagacaaatccgatatcaatgctgtgttctccaagaagaccgtagagctctgaagaatgatgggactcgatgttcaggtccagcttggtctgctcatttaagatcctgtcatatagtggtgcgaaaacagctacgttcaggctgtctgtacagccgatggtaagcagcagggaatcctgattgcgctgcagctccatagtttccttccagagagacatccagcgttccgcaaggatgataaaatccgttcccttggcagtcagttccacctgcttgtggcctttctgacggatcacaaggggaaaacccagttcgttctccagagatgtgagccggtggctgacagtaggctgggaaagaaaaagaagatccgctgtacgggtgatgctcttggtatttacaatggtgagaaaggtttcgatttcagcaagattcatatgaacagctccttttctttggtgttgtctataggatggtttaagctttgataatataaaaattatttatattatacagagaaattattcgttattcaatagtaagcttgtatgatatgataaatacaattaaaaaagaaaatcaaaagaagagaggttttcatatggcattaggatgtaggatcagacgaaactttgaaagaccgtcaaaagaattagtagaagccttccgtggaattccagttgcaaatattgatgataactgtggaaagatcgctgccgtagattccagtattttcccgctgaacccgaaggcaagacttctgggaactgcatttacagtaaatgcactggcaggagataaccttctgttccataaagcactggatatggctcagccgggagatgttatcgttcttgcaaacaaaggaagcaggatggagttatccttatcaacaacagccgtggtcagcttgttgttgagcaggatctggcagatgctactgaatagtgggaaggttttgctgctggtcttgatgttgtttctactgagccgatcaaggggggataatccgcttctcaaggctaaaaactgcatcatcactccgcatatctcctgggctgcgcaggcttccagacagaggatcatggatattacggttgataatatcaaggcttttctggatggtaatacggttaacagagttaacaaatagatttttttcggtgtttcgatttcctatgtatgatgtgtgaggaaaggacggctgtctcgcttttgggggtggccgtctttttctttgtgtggtggattgaatgaaccgtacgccggggatgtggcagcggtacgggcagggctccgtcggcggatactgctaaggctccggaaatcggctaaaaacattgagacaggggcagaactcgcctctggctcagacagcagcccctgtctcaataacgccgatccccgcagtctaagcagtatcacaccttctccgcagcagcccataccactgccacatccccggctggaaattcaaccgcagagagcagagaatagaagcgaatgtacatcctgcccagtgccaaaaaaacacaatatataaaaataaatcggcacagcgttccacgtccaacaccgaagcatacaggaaccagatcggcacagtgttccgcatccaataccgaagcatacagaaaacggcttcaaaacaa

SEQ ID NO: 317 - DNA, 10427 bp, Unknown
  gut microbiota DNA sequence
gtcccacatccaatacccaagcatacagacacaagtcaataccctcccctcatccacaaccaagaactcctaaaaaaagcccgaggggtgtgcagaggggccgcggctttgcggcccctttgcggttttctttttgcacaaaaaaatagctcctacatcgcaaagatgtaagagctaaattcgctggatggagaaggattcgaaccttcgaaggcggtgccaacagatttacagtctgccccctttggccactcgggaatccatccgtgaacaacaaatgtattatatataacatttgataaaattgcaagctttttctcaaaaaaaataataattcccacagcatcagcatttttggtaaaatactggacttaccaaaggaaatctgctattatgagtacggttggatataaaggacacggtttttccgtatcctaatacaggttaggaggattttatcatgttagtaaacgcaacagaaatgctgaaaaaagcaaaagcaggccattatgcagttggtcagttcaacatcaacaaccttgagtggacaaaagctatccttcagacagctcaggagctcaactctcctgtaatccttggtgtttccgagggtgccggtaaatacatgacaggttataagactgttgtaggtatggttaacggtatgatggaagagctgaacatcactgttccggttgctcttcatcttgaccacggcagctatgatggatgcctgaaatgtgttgaggctggtttctcttccattatgttcgacggatctcattatccgatcgatgagaacgtagctaagactaaagagctggttaagatcgttgctgagcacaacatgtctcttgaggcagaggttggttccatcggtggcgaggaagatggtgttgttggtatgggcgagtgcgctgatcctgaggagtgcaagagagttgcagatcttggaatcaacttccttgcagctggtatcggtaacattcacggaaaatatccggctaactggcagggcttaagctttgagactctggatgctattcagaaactgacaggagatatgccgcttgttcttcacggtggtacaggtatcccggcagacatgatcaagaaagcgatcagccttggcgtttccaagatcaatgtaaatacagagtgccagcttgcatttgctgaagctacacgtaaatacattgaagagggtaaggatcagcagggtaaaggatatgacccacgtaagcttcttgcacctggagcagaagcgatcaaagctactgttaaagagaaaatggagcttttcggatctgtcaataaagcatgatgaatcgaaaataatatatggaagaagccggaatgggagcaagcctgttccggcttcttttttcatgataaaatatcaatatttttactatataaaaaaatcaacatgtttcttgatttttttatatagtgaaaatgacctcttcgatttacaataatatcaagttaatcgagaagctgatttgaagcttatcggtcaggaatatgcgaaatggacgttttaagcatatccgcgaaacaaattgaatatcatataaggtaaaggagaggtacgattatgagaatgaaaaaagcaacagcatttggtcttgcagctttaatggcagctaccatgatcccggcagttccggctatggcaaaaggggatgacagtgaaggctctgtttattatctgaattttaaaccggagcaggcagatcagtggtcagacctggcaaagaaatacaccgatgagactggtgtaccggttaccgttgttacagctgcttccggaacttatgagtctactctgaaatcagagatggccaaggatgaggttccgacactgttccaggttaacggaccagttggacttgcatcctggaaggattattgctatgacctgaaagacagcgatgtttataaaaatgtggagagtgacgatttcgtactgaaggatgacagcggtgcagttgacggtatcgcctatgtaattgaaacatatggaattatttacaacaaagcgcttcttaagaaatactgtgagatggatggcgctgtgatcaagtctgcagatgagatcaacaattttgagacattaaagaaggttgcagatgatatccaggctaagaaagatgaccttggagttgacggtgcatttacttccgcaggctttgattcttccagtgactggcgcttcaagacacaccttgcaaaccttccaatctattatgagtacaaagaagacggaatcacatccacagatgcgatcaaaggaacctatcttgataacttcaagaacctgtttgacctttatatcacagattctacctgtgagccaagccttctttccagcaagactatcgatgatgcaaatgctgaatttggccttggagaggctgtgttctatcagaatggaacctgggcttatgatagcatcaaagataacgaagtagcagacgaggatatgggaatgcttccaatctacattggtgtagatggtgaagaggaccagggactttgcacaggcagtgagaactactggtgcgtaaacaaaaaagcagatgagaaggatatccaggcaactcttgatttcctcagctgggttatcacaagtgatgaaggaagagaatctataagccaggaaatgggatttacaacaccattcaagacctttgatgagaattatgagtctgcaaatccgcttgtaaaagcagccgacgaatatgtaaaagctggtaaaactccggtttcatggaactttacaaccatgccttctgaagagtggaaaaaccaggtcggcagtgcaatgcttgagtatgcacagggtaccggcgagtgggatgctgtgaaaactgcatttgttgacggatgggcaaaagagtacaaagcagcaaatgaaggctgataagatataactgaaacgtgatcacgaagaggtgggcggtttccgcctgcctcttttaatgaagagagggtgcgtaaagtagggaaggatgcatcctcaggagaaaggaagagaaaacatgcagaataagatgatgaaaaagtattttccggtttttgtcctgcctaccctgctggcatttaccattggatttatcgttccctttatcatgggcgtatatctttccttctgtaaatttaccacagtaacggatgcaaaattcgtgggattacagaactatgtgaagatttttactgaggatggaacctttggacatgcattatggtacaccaccgcatttacggttgtatcagtagttctgatcaatgtgatcggttttgcagttgcgttgcttctgaccaagaagatcaaaggaaccaatatattccgtactgtattttttatgccaaacctgatcggtggaatcatccttggttatgtatggcagcttctgttaaacggtctgcttcttcagatcaataaaacacttacatattcttctgtttacggattctggggccttgtgatcctgatgtgctggcagcagatcggatatatgatgatcatttacattgcaggtatccagaatatcccgggtgaactgatcgaggctgcacagatcgatggtgcgaacaaaggacagcttctgaagcatgtgatcattcctatggtcatgccgtccatcaccatctgtactttcctgacacttaccaactccttcaagctttttgaccagaaccttgctcttacaaatggtgagccttccaatatgtcagaaatgcttgcgctgaatattttcaataccttctatggacgtaccggatgggaaggtgtaggacaggcgaaggccgtgatcttctttatactggttggagcaattgccatgatccagaatcgtctcacaagaagtaaggaggtacagcagtaatgaataaaaaagtaaaattcagcggtctgtggactgcgatcctgagtgtggtatctgttgcttatattttcccgattcttctggttttgatcaattcttttaagaaaaaagcatacatcagccgttatccttttgcaatcccaacggataaaatgttcgtaggtctggaaaactatgtaaatggtcttacaaaaaccggatttttccaggcatttggatggacattatttatcacagtattttcggttgcggtaattctgctctgtacctccatgtgtgcctggtacatcaaccgtgttaccaacacgctgacaaaaaccatgtacatgctgtgcctgttttccatggtcgtaccattccagatggtaatgtttactctttccaagattgcaaacatcctgaagttgaatactccgtggggactgatcatcatttatcttggatatggagcaggacttgcggtatttatgttcagcggttttgtaaaatccattccgatcgagatcgaggaagctgccatgatcgatggctgtaccccgatccagacattttttaaagtggttcttccggttatgaaaccgacctgtgtaactgtagcgattctggaaaccatgtggatctggaatgattatcttcttccatatctggtacttgatatcaagaaatataaaaccatttccattgccatccagtatctgaagggcggttacggaaccattgatatgggagctatgatgggcgttcttgtcctttctatcattccgatcattgccttctatcttgcatgccagaaatatatcattgaaggtgtggttgcaggagctgttaagggctgacaaatcagttgaataatgttaaaatgaaagaaaaacggcctgatctgcgtgcttttacgtggatcaggccatatttggcgaggtgaggaatgtacagagttttggtggtagatgatgaaaaactggaacgtgacggaatccgctttcttctgtctatggaagagggagagtgggaaatttatgaggcggctaatggcaagctggcattaaatgagctgagaaagcatcctgtggatctgatgctgacagatatcaaaatgccgcatatggatggtctggagctttcaaaaaaagcaagagaggaatatccggatctggaaattatcattttcagcggttatggagattttgcttttgcccaggaggcaatccgctatggcgtgacggattatgtactgaaaccggtgaatccggaccgctttcatgacaccatacagaagatccagaaggagatcgcatcccggaaaaataaagagcagcagtctataaaagaaaaaagctttcttcagcagtattttcttctgagttacatttattccggagatcaggaacgcctgaaagaggcggaagaaattgtggatttttctgtctgggagcagtggcactgtgcaattcttattgaatcggatgaagcattttttgattctgccagtgatgaggttcccattgagatcagggaagagcttcgccgttcttttttctatctgaatcttaatggccgtcagtctttgctcctttttaaggatgtgtactgtgattatgtccttgtggcaaaaaatgtctataatcttctgaaacgccgtcatcctgttcgttttcatctggctgtaagccggcgttttgacggatatcaggaactgccggaaattatggaacagctggagcagcagatggaagaaaaattttatcatccggatattcatgtttacaccagcgaggaagatgaggaaaaaaataccggagaagaggagcaggattccaggcttatggaaaaaatctcagaagatatttccagaaaggatgtgaagcagctatggagccatttccgcagtctggcatccaaatatcagtccaatacccaattttcggccatgtatgtgaaatttgttttttccaatgtgataagggagctgtttcaggagaatcgttttgccggagaacacaggctggatctggaagtggatcatctgtatggctgttctaccattcaggagatcattgaggttacagaaaaaaatatccgccagtacgaggagttcctggaccgttccatgagcgaatccagagatgaggtggcagcagtaaaaaattatatttacaatcactatgcggaagatctgaatctggaaacactggcagaaaaagtatatctttcttctggttatctcagttttattttcaagaaggagacggggatgaacctgaatcgtttcatccgtgtgtttcgcatggaaaaggccaaggagcttctacgcaccaccaacatgaaagtagccatggtcagtgagcaggtaggatttgccaattcttcgtatttctgccggagcttccgggaatattacggaagcagtccggagtcctatcggaaaggaaacaatgaggatgaagagtcttctgaagaagtataataatatgaaataccggtacaagctgacaaatcttcttgtggtggtatccctggtgccgatgactgtgttggcactgtatagtcacagtcgtatgagtagtcttgtaaggaaaaatgagatggaggatatgtactccattttggagcagacaagagaaagcattgacgggcagatcgaaatttatgccagccttttgaattatcttacctattctcctgaaatccaggaggtgatcttcaacaaagatatggatcgttatactgcatatgaacagtatacggaagttgtggatccgctattgacggtgccgaaatcctaccacgaagcaattctggggatacagctttttgcagaaagcattcccgtgcgccatgaatataccttggctccgctttcagaggtggatggggaatggtggagtgacaaattaaataataccgtgacggttcagtggatcgtggaccgggataatcgtcagatcgcggcagtcagggaaatatatgatggtaagatcagggaggctgtgctctgtatttcgttggattacggaaaagtattccagcctctggccaatattatcgaacggaattccggaggctttgtggtggatgatcagcaaaatatcgtctatcatggagaaaatctggcggccagtgatatttccgtacagaaagaaactgcgaaaaagctggatcgtctgagggaagaatatacctatgtcagcagcagcggacatgaaacaaggtggacctattatttttacaaacctccggctgtgatcgagagctcggtttcaaaagtattgatcagtgagatcccgttgatcggcttctgtgttgtgatcatcattgtgctgggaatgacgttttccaagctgtttaccagaaagattgagcagcttaccagaaatatggaacaggtgaaccagggaagccgtgaagttacggtttacagtgattccggagatgaggtaggacagctggtgagaagctttcaccatatgatggatgaaattaatcgactgatcgaagaagtgtatgaaaataagatcgctctgaaggaatttgaactgaaagcgctgactgcccagatcaatccccattttctttataattctctttctattataaactggatggcgattaagagccgtcagaaggagatcagccgtgtgacgttggcattatctacattttaccggacagcgctcagtaagggagcagatatggtgactgtggaaaactgtattcggaatatcgaagcttatctggaaatccagctgatcatgcatgacaatgattttaaggtggagtggaatatcgatccgtctgtgcagcaggagttggttccgaagcttgccctgcagcccatcgttgagaatgctctggagcatggcctggatgtgaaggaggaaggggaaaagcttctgaaactttatttctttgaagagaatggggatgtagtgatccgggttgaagataacggaatagggatggagcaggagcaggcagaaaagctgctcacatatcaggcaaaaggctatggccttaaaaatgtcaatgaccgtatgtgtattttatatggagagaaatatgccatccggattctgagcaaggtaggtgaggggacaagcgttgatatgagaatcccgaaagaggtaaaaaaagatgagacttagtctgggaaaaacagtggtatttctgagtacgatgctgagcctgacacttttaacggggtgttctttaaaaactgcagaaatggaaaaaacagatatagatgttctgtccgaaaagagcagcaagagctgggaacaggcagaaacctcgcctctgggaaaatatccggagcttgtaacttatactctgggacagatgaaaggggctaataattctaatcttccggacgggcagacctatgaggacaatgcatatacccggtatctgaaaaagacactgaatatacagaataagaatgtttttatggagagtgaggagcggtatgacgaagccctgaacatcctggtcaaagatcggaatcttccggacatttttctggtgtcggacagggaaactctggaagagctggttgaaaatgatcttatcgaggacctgacggaagtatacaaaagctgcgcttctgataaaataaaggaaatgtatgagagctatggagaggaacttttggactccgggacttttggcggaaaattgtatgcacttccggagactgccattgatgatgggtcgcagcttttatggctgaggcgtgattggatggaacagctgggactgaaagaaccgaagacattggaagaggctttttcagtgatccgtgcgtttcaggaaaaccggatgggtgcagaggatggtgaagatcctgtgggacttgtctgtgatccgggacttgtgggcacggtcagcaccagctattcggtggaccctgtgtttgaaaagttcggggcgtatccgcagcagtggattgaaaatgcagatggagaaattgtctatggatcgctgacggaggagacaaaggaggctctggggtatctcagagagctttacaggcagggaatactggatccggattttgctttacgtgcacagaataatatccgtgatcttgtggtgaatggaaaatgcggagcgtttttcggactctggtggactccgaataatcctcttatggatgagtataagaagaataaagaggcagactgggaaccgtattatctgactgcggatgtaaagcggactgtggaggtatactctacgtttcgagataataaatatgtagttgtgcgtaaagggtatgagcatccggagattgcaatgaagattttgagtgtgttgttcgactattccagatatgaagcggaggatgcggatgagatgaacacttattttgccttgaatgtggatcctacggcgcggccgctaatgatcaatgtggattataatgaggctacttatatagtgacaaagcatatccgtgaggttctttacagtccgggcgatgagaagaccagggaggatctcagtgccattgaggcatcttattttgatgcgtgtaaggaatatcttgaggcagaggtgccttcggtggaggcatgggcggcgtataagtccagaatctcggcggtggggcttctggtggatgcgaattaccgtgctccggagaaaaagtttctgggggatggtgacggggagattcctcagactttgcgtttgctggagaagaatgcatttatccagatcattatggggaggatgcctgtgagctcttttgactcttttgtggaagattggtatcgtaagggtggagacagtcttacggagcgggtccgggaagggcttgtggattcgtgaggtggatgtatagagggacgccagaggaaggtggcattggtccggggtggatgttgtcgggattttgtgaggcggatgtatagagggacgccagaggaaggtgacaccggttcgagggtggatgctgtcgggagtttgagaggcggatgtatagagggacgccagaggaaagtggcaccggtccgtgggtggatgctgtcgggagtttgagaggcggatgtatagagggacgccagaagaaggtggcatcggtccgggcagggactccgtcgggggatactactagggctccgtgagacggctaaaagcattgcggcagggccagaactcgcctgcggctcagacagcaggccctgccgcaataacgccgtctcccgcagcccaagtagtaatcacccctcctccgcagcagcccggcccgatgccaccttcctctggctgacgtttccagccgacaggaaaaaacatgcggggtatggaagcggactgggcgtcctgtcctgaaatgttagactggcacagaatattcctataagtatcgaagaatacagaaacaggatcggcccagcatatcaccataaatatcgaagaatacagggaccagatcggcacagcgtaccactataagtaccgaagaatacagaaaccagatcggcacaacgttccattttgagtaccgcagcatacagacaaaagtcaaca

SEQ ID NO: 318 - DNA, 397 bp, Unknown
  gut microbiota DNA sequence
ttgcaatatgtctgatgatctgttccggagcttctgaacttgcaatggctcaatgggcatctgcttatgcagaatcagcactgggattatcaaaagctctgggagatctaacaggtccctgcatgtttgcagtaacaatgggaatcagccgtataatttttggtaaatatggagagcagttagatttaatgaagtttatgagtggttcaggcatattatgcgttgtctgttatctgcttactgctttgtcatccaacccgatcatcggactgatcggttgtattgcatgtggattttcagttggaatcatgtggcctggaaccatcagtatttcctcaaaaacttttccaacaggtggaacggctatgttctctcttcttgccatggcaggagattt

SEQ ID NO: 319 - DNA, 2500 bp, Unknown
  gut microbiota DNA sequence
atcatggctgagaatacagagactaaacttgagattccgacatatgatacaaacacagcagctatggatacaatccgtaattctcttcaggcattagcaacaggtgcaagtgcacaggaagttggagacgatatcgttgacaaaatgtctgcttacgaataaagagaattttgactgaacgcatgatgtgtggataagagaaacagggggaagcatcatctgcttccccttgttcattacggaggtatacatatggcaggtaaatctgtaccaaaggtaaaacagaagctggacaaaaaagatcttacgctttctttagcgttccttcttccggcaattttaataactgttatttttgttatctaccctgtttttgacaccgtaggcttatcattccgcaaatggaacggtatgtttggtgcagcaaagcagtgggtaggacttgagaactatcagaagatcttttcagataagctgttctggaatgcaatgctcaacagcgtgtactttatgatcggtggtttcgttatcctgatgccactttcatttggtctcgcaatgctggtaactgcaaagatcaagggaaccggattcttcagaacctgttacttccttccgaatatgttaggaacaacagcagtagccctgatgtggacatttatgttaaatccgaactttggtatctttaataccattgaaaatattttcggccttcatggtacgatccctgatgtgctgacgataaagactgtaaacgtttggatcgttatcctggtaaatgagtggatgtatgccggatataacatgctgatatttgcagcgggtctggtggcgatcccggatgagttaaatgaggcagcagcactggatggagctaccggatggcagagagttcgttacattaccctgcctctgatgaaaaactccttcaaggtattctctattttgtgtatcacaggatgtctgaaagtattcgatattatctgggcgatgacaagaggaggcccgaacgatatcagctccacaccttcaatcatgctttatacacagggattctcctataagctgtttggacgaagcagtgcatacggcgttattctgttagtactgggtgttgcactgagtcttataactaatcatttgttccgtgaagataaagatcttgcaatgtaggcggaaggagaagagacaatatggaaaaaacagctaataaacagaaaatgcacggaggaaagatagcactgtacgttatcgcaatcctgtggacagttgttacactgtttccggtagtagtaaccgtaatggcttccttcaaaacaaactcagagatctacctgaacctgctgagcttacctaagaagcttatgttccagaactatatcagcgcaaacaaaacagcggatgcattgaataccatcaagaactccctggttgtagcaactctgacaactgtatttaatacggtagtcggaatgatggcagcatacatcttatcaagaaaagattacaaattcctgaaatgggtatatgtattctttatgatcggagtaatggttccggttcactgtacactgatcccgatcaacaacattgcaacagcattaaatgcaaagaacaacctgttcttcctgatcctgatctatgttgcgtttggcatgtcccaggcgatattcctttatacaggattcatggatggaatctccaggaacctggatgaggcggcgatcattgatggatgtaacaactggcagctgctgtggaagatccttttccctgtctgcaagccgatcatcgcaacagaggcgatcttcgtattcatctatggatacagtgaacttgtattctccatgatcctgatgacagataccaaatatttcacagtttcacgtgcgatgctgaacttctcttccgcgcatacacaggagatcggaagccagtttgcatatgtagtaatgtctgtaattccgatgattatcatttacatcgtgttccataaacagattgaaaaaggtatgctttccggagctatcaaaggctgatgcttttaatctaaacaggaggaaaaaatcatgtatcagtttgacagaaaagaatatgaaaaacgtatggagtggtaccaggatgcccgctttggaatgtttatccactggggattatattctatccctgcaagaggcgagtgggtacgaagtgtagaggaaatacctgaggaagaatatcttccgtttatgaaagaatttgatgcaagagactacaatccgaagcagtgggcaaaagaggccaaggctgcaggtatgaaatatgtagttctgacagcgaagcatcacgacggcttctgcttatttgacagtaaatacacagattacaaggtaacaaacacaccggcaggaagagacctgatcaaggagtatgtagaggcacttcgtgaggaaggccttaaggttggaatctatttcacactgcttgactggcatcatccggattatccgcattacggaga

SEQ ID NO: 320 - DNA, 733 bp, Unknown
  gut microbiota DNA sequence
gtataatcaggtagaagagatctgtacaaactacggacagatcgatatcatctggtttgatttctcctacgacgatatgagaggggaaaaatggggcgcaaccaagctgatcaacatggtgcgcagcttacagccgcaggttatcatcgataaccgtctggaagccagcggagagggaagaggatccctgtatgagtgtgatccgacaccgtaccatggcgatttcgtaagccctgagcagatcatcccgccggaaggaatctgcgataaggaaggcaacccgatggtctgggaagcatgcttcaccatgaacaacaactggggatactgtgcaaacgatcattattacaaaccggcttccatgctgatcaagaagctggtagagtgtgtttccaagggtggaaatatgatcctgaacgtaggaccggatgccaaaggtaaattcccgaaggaatcttctgcgatcctggctgagatcggccgctggatggataagaatcatgacagtatctacggctgtgtaccggctgaaaacattccgaagccggattacggacgtatcaccagaaacggaaacaaatactatgtgcatatttatgagaatacactgggaccacttccgcttctgggatttgataaggataagatcgtgaaggtgcgtgcactggatgacggacatgaggtgccgatctccaacgcatggatgcacagcgattacccggatatcgcattc

SEQ ID NO: 321 - DNA, 151 bp, Unknown
  gut microbiota DNA sequence
aaggcaggttacccacgcgttactcacccgtccgccactagaattaaatcatatcgaccgaagtttcaataaagtaattcccgttcgacttgcatgtgttaagcacgccgccagcgttcatcctgagccaggatcaaactctctgataaaa

SEQ ID NO: 322 - DNA, 149 bp, Unknown
  gut microbiota DNA sequence
tacatttaaagaacggtttaaacaaaccaaaagcagtaaaaacgagagatagccaaacggttgtcttgagtaaatgaatcaaacattttatcagagagtttgatcctggctcaggatgaacgctggcggcgtgcttaacacatgcaagt

SEQ ID NO: 323 - DNA, 220 bp, Unknown
  gut microbiota DNA sequence
tttttcctgtcggttggaagcgtcagccagaggaaggtggcatcgggccgggctgctgcggaggaggggtgattactacttgggctgcgggagacggcgttattgcggcagggcctgctgtctgagccgcaggcgagttctggccctgccgcaatgcttttagccgtctcacggagccctagtagtatcccccgacggagtccctgcccggagcgatgcc

SEQ ID NO: 324 - DNA, 224 bp, Unknown
  gut microbiota DNA sequence
tcgctcacgcggcgtcgctgcatcagggtttcccccattgtgcaatattccccactgctgcctcccgtaggagtctgggccgtgtctcagtcccaatgtggccgttcaccctctcaggccggctatggatcgtcgccttggtgggccgttacctcaccaactagctaatccaacgcgggtccatcttataccaccggagtttttcacaccgagccatgcagctc

SEQ ID NO: 325 - DNA, 144 bp, Unknown
  gut microbiota DNA sequence
tctgcctgttgctgtattgccggcgctcacttgctcccgtctgttgtcgcatcactggcatagacctactaaaaactgttgctgtattgccggcgctcacttgctcccgtctgttgtcgcatcactggcatagacctacttctg

SEQ ID NO: 326 - DNA, 6624 bp, Unknown
  gut microbiota DNA sequence
ccgacgaaacaaaaatcggctcagcctgacactgccaatacagcagcatacaggactaagccgataaattaacacactccaaggcgtagcacagcggcgtgcccggaggggtggggtgtggggaggggaaacgggcttcgcaactccgagtgcctcccctccccacgaatttccccgctttttcaaagcaaaacttttccacgaaaaaccctacaatactttggaaagaaactccttcgtcctttcctctcgaggatccccaaacagttctttcggatttctatcctcaagaatcaccccatcatccataaagagcactctgtcactgacctcccttgcaaagcccatctcatgggtaaccaccagcatggtcatgccttcttttgcaagctccttcataacctcaagaacctctccgaccatctccggatcaagagctgatgtcggctcgtcgaacagaagcacctggggattcattgcaagggctctggcaatggcaaccctctgcttctgtccgcctgaaagctttcctggatagacatcggctttttcttcaaggccgactcttctcaaaagagccctcgccttctgatcagcttccgctacattccatttgccaaggcgcaccggcgcaagggtgatatttttcaatactgtcatatttggaaacagattaaaatgctgaaaaaccattcccacattttccctgaatttatctacatccagcttcggatccagaagctgctgtccgtttacggtgatctcgccttcctccggtttttccagaaggttcagacatcgcagaaatgtagattttccggagccggacggaccgatgatgcagatacactcacccttgtttacgtgagttgtgattccctttaatacgtgtacatccccgaaggactttttcagatttttaacatcaatcactttctctcagtctcctttcaaatctcttcagcagaaggctcaggcacttcacgatcagatagtacatgatacctgcaacgatcagcggtatgaacatctgataagtacgggaagaaacatagcttgccgcttttgtcagatccatgatacctacataacctaaaatagatgtttctttgatcagctggataaactcattacccattgccggaaggatggtttttacagcctgcggaatgataatgaaacgcatggtatctttatacccaaggcccagagaacgaccagcctcgctctggcccttgtctacagataaaatacctccgcggataacctcggaaacatatgcaccgctgttgataccgaagctgaccactgctgccacatatcccagcctgctgtggaacactgcaaaatagatgatcatcagctgaaggactgacggtgttccacggatcacatcaacataaatatccgcgatcgtggaaagaatggttcttctgccttttttcgcagctccaagacgtaccagagccactacaagaccgatcaggatacctacgatcactgacaaaagggaaacgatcagcgtaatcccaagaccgttaatataaaacttccaacgattatcctgaaggaaaataaagcttaaaagtcccagaaaaccatcggttgctgctacatctgtcacatcctcgctgttttcaagtgtatccacaaaatacttctgataaagatcatcatattccccggatttttttacttttgcaagcccgtcattgatgatctggacaagctctgtgtttcctttttcaatacagaaaaccgtatcctctgctgtacttggcacggactcatactgcaggtctgagttctgtttgcagtaaatctcagccatgatattgtcgatcagaactgcatctgctccaccgtttttcagctccatgactgcactggaagcgtttttaaatctttttactttggcatccttaacttcaccgtaatcagtagtctcgccggatgcgatcatatcactctgtgcaccctccagaactgcaacggtttttccggacatctcctcaaaatccttgatcggattatccttacggctgatgatgcactgtgtaccggtgtaataaacatcggaaaaatcaacgctttttttacggtcctccgtaggtccgatcccggctgcgatcacctgtacatcaccagcctccatggaacccatcagggaatcaaagggcatatccttccataccagctttacgttttcttccttggcgatcgcctccagaagatcgtaatcaaaacctgtaatatttccattatcatccaggtattcaaatggtgaatactctgcgttcgttcctatgatgatggtctgctgttctgccgcttttactgccactgcactgctgaaatatatcggcagagccatgatcatacacagtacaaaacagataagagctctgctttttccattgcgtcccattattttcccctcctgctattcatatttttttccgtagccaaaagcaccttccatgccacaaatgcccgctgcaaaagcagctgcctcttcaagactttcacagatcgcggtttcctccgccatgccgtttttcattcttccgatatacccggtaaggaaagatgcgatcagtgaatccccggcgccaagagtatcttttacttccgtaagcggcgctgccggctgtcggtaaaaattccttccgtcataaagaatgcagcccctggctcctctggaggccatggcaagcttcggccccatggagatgatctttttcagatgctcttctgcctcctggtcggttccgtcaaaggagcaaaatgcgtaagtaacctccggtgctgttttttcataatattcctctgtggaatcatcagaaaagtcaaaagaaaccggaattcccgcctctttgatcttatgcagctcttcctccgtaaaagagtaatttccgctatgtaccacatcaaagcctttcatatattccagatcaaaacgatcaaggatatacggtgtttttccacggataccaccatcattaaaatctaggaactcacggtctccgtcttttaatgtgatcctggaataaccgttctcgccgtgcagctgtctgcactttacggtttccacgccgattttttccagtgtatccatgatcagttctgctctgtcgtcatctccgaaatatcccatatacgctgttttttcacatccggccatctttccgtaaacactgacgtttacgcagtttccgcctggatacatggttttcagatgatcatagatatccactacattgtctccgaagccaagaagctttgtactgtatttactcatattttccctttctctgtgcacaggcacagcagcacctttagtactctacaacgcccatatatcttctcatatccagcggatgacggcgtttatcctggagagcggtacggtaaacggtcgtcatggtgtagaacagcatcggggtaaaatattccacacagctgtcatcaattgcttccataccaagcttatctgcatcgatcacttcgtatttctttccgtatttttcaaggaaagtcagcacacgctcatccatcatacggtttctgccccggctcatcataaggatataaagatgatcctcatccgttacctcaaacggtccgtggaaatattccgcactgttcagataaccgcagtccatccactgcatttcctgaagtgagcagatcgcaaagccatatgcctgagaataggaggctcccgatgccatgatatagaggttcggttcctctgaatatttttctgcaaaaagccatgctgcattctgctgatccttcactgcagctgcaataacatcatcgatcttttcaaagccttccacgatcttatcgtaaagcttatatcccggctcctgtaccttcatcagctcattaagaatacgaagtacgattccctgaggcttctctgcttcctttacccccggtgcccagtcgtatacaacggagatccatttatcggtatcacatggggaacctggcgcatgtgtcattgtaacaacagccgcacctgcatccattcctgtttttgctgcctccagacactcctttgtcttgccactgtgggagcagatgatcagaagactgtcttttcccagcttcttcggcggtgtcagtgcaaactctcttgcagggatccactgtgcatccatcactgtggattccgcacggacaaaataatatcccggatacagatccacaagagatcctccgcatgcaagaaaatacacatttttgattgttccatgctctttgttgatcttatttacgatttttactgcgtccattttcatcctccggttttcgtggaaattcgtctgagaatcctctgaatccattgaaaatacaggtttttttcggattttcagatgaatttctccttcttgtacttttgcattttacctttttgaagaatataacatattataacgttatagtaaagagtatattcatgatttatgattaattattcatccaatataccttctgacgcactgcagaggtttgtcccttactggacaaatacatccgcactatagtaaaatatcttttatgaacaacctcagaaaggatattttcatgttaaataaaaattcgatccagccgctttacaagcagcttatggatatcatcacccagcagatcaaaaacggtacttataagcccggagaaaaaatccctcctgagccggagcttgccaatctttaccatgtcagccggatcactgtccgacgtaccgtggaggagctttgcacacagggctatcttatcaagcatcagggaaaaggaacctttgtaaaatcccccatgatcttccggaaatttgaatcccagaaaaatatgagcttttccgaatcctgccgtcagaatgaccggattccggaatctcacgtactgtccttctgcaaaaaacctgcaaacagcgtaacctctgattttctgcagcttacttcggatgaggaagtttttttcctggaacgtcttcttctggctgacagtattccggttattgatgtccacacctggctccccacatggcttttcccggattttgatccgaacgctgtagaaaacggttctttttttgaatatatcaaaaacacctaccgctgtacgatcgcagaatccagccgcagcactatttctgttactgcagcctccccggatatggcaaaaactttgcgtctgtcttccggcgatcccgtgctgatcctggattcctatatggaagctcctgatggaaaaccactttacatcagccgtgaatacattgcaggttcccgctatacgatttcattttgaagaatcaaaaaaacggcacagaagtgttatgctaccaatacagcagcatacacctctgtgccagtgtttatttatccaaaaatattactgttcactccgttctctgcaacacgcttcgcgatacacaaaatttatcctttatcttttcaagactccgatccatcactgcctgtcatctgtgcctcaatggcctttccaaggcggttatagatcgtcaccgcatcctccacatggagtgggcttccggtatttcccgatgcgcctgccgttaccaatatgtattccctgtcgtagacctctgcaaagcttgcaagacacagacccgcctcgctggtatatcctgtcttgccgcccaggatcttgccgccggtaacggaagggtcagaaagatttttgaacatggtactgtaatatgtgatcccgctgggatggatattcgtcactcctgtagaatgccgcggactctcaatgatctctctgaacgtatcgttccgaagcgcatacctgagcagcaccgcaatatctctcactgtactgtaatgatccggatcatgaagccctgtcgtatcacagaaatgtgtaccattcattccaatcctctgtgccttcttattcatcagctccacaaatccatccctggaaccgcctacggtatccgccagtgcgatacaacactccgcaccggatggcagcatggcaccataaagaagatcgatggcccgcacggtctcaccgggctgaaagcctgcctgggtggcatcctgctcataaagcccctggaacatttcctgggtcagagtgatctcctgatccagatcatccaggttctcaatagccacgatcaccgtcatgatcttcgtcatggaagccggatagatcttctcatcgcccttcatatttccgatgatctttccgccttttacctgcatcagcactgcgtagggactgttgataccgctcatctcaagcttacggacaaccggtctctgcagagactccatccagtcacctacccctttattccagccgatgatcactataagtgtcaggatcacgatagcctctaccaccaggcagagtatcatttttattttgtttacctggttttttattttcttcgctttacgcttttttgatctcaatttatactccctgttccgacaaattcatctgtaagttttacttacagaaacgttttccccatcttttttatattaacatgattattattttcttctgtaaaatctatatgaaaaagctctgatgagctttcggtctgttacaactctgtttgtgccttat

SEQ ID NO: 327 - DNA, 23210 bp, Unknown
  gut microbiota DNA sequence
atttattttataacaatctacgccagcgaccctctctcaagccactttccactcacgaatcttataacaaaacatagcgatcttgcagcccaatctacgaacattcctatccatacaccaagcactccaagtccaagtacaactccgaatatataactgctgccgacacggaaaagccacatcgatactatacttacaatcatagtatacttcacatcacccgatgcccttaaaggattcgacaatgtaaatgaaagcggccatataaaaagtgatacaacattaaaacatcttaatatagtgaccgtaatatgtgttgcttctggtgaaaggtgaaaccatgaggctataaatcctgctgcaaagaaaagtggtatgttgcatgcccagtcgccaagatatgaccaccagagaactttctttgtatacatctttgcctgatccttcttgccagctcctatacattgcccaacaactgtgataagcgccagtcccatagatgaagccggaatatttgcaaaatctataactgtataacccactgaattcgctgctgtagccgccgtaccaaacgtagcaaccatacttacaaccataagctttcctatctggaacataccattttctatgcctgatggaatacctattgtaagaattttctttatatagttccagtccggaacaaagtactttatatggtctattcttacagggttcgtcttaccacacacaagcactgacataacgatacctgctgccacacggctgagcgcagtagaaagcgcaacaccagctacactccacttaaatacgaatacaaacaacgcatttccagctacattaatcacattcataagtatgcttatattcatgcttaccttactgttgcctacacttctgaatatcgccgcacccgcattatacattcctaagaatggatacgaaagcgctgttatcataaagtacagcactgcacaatccataacagactcttcaactgttccgaatatcatcttaagcagtggtcttgtaaatgaaactgaaaatgcagtcattataactgaaaatactaacaaaacggtctcaagctgcgctcctgactttcttgattcatcatccctgcctttacctatatactgactgcagacaacagcgccacctgtcgcaagtgctgccataacctgtatgataagcctgttgatattatcaacaagtgcaactcctgcaactgccgcttctcctgactgggataccataagtgtgtccacaagtcctacaagaacagcaagcagctgttcaaacataagcggaattataagcttccttaaatctttaccactaaacaacatatgtttactccatctatattttcattttatggtgtaagtgttaattcacaactattctgcacagcttatattaaagagctgcagaatatgcctttgaccccatcaccaatcatacatttatcacataaaaattcggtcagaacgtacttttaacattctgaccgaatataataactatattatcagctgtaataaacatctatagaccagttagctaagcttctaacaagcctttttaccatcagcaatattagtctactgtgtaaatccagcccttaggagcttcgattctacccatctggatacctgtaagagtttcatataacttctttgtaacaggtcccatctcgtccataccacttggtaagcagatttccttaccatgatcaacaatctttcctactggagagataactgctgctgtaccgcaaagaccacactcagcgaaatccttaacctcatcaaagagaacttctctttcttcaacttcaagtccaaggtattccttagcaacatgtactaatgaacgtcttgtgatagatggtaagatactatctgacttaggagttacaacctttccatccttagtaacaaagaggaagttagctccacctgtctcttcaaccttagttcttgtagctgggtcaagatacatattctcagcatatccttctgcatgagctgtaacgattgcgtgaagactcatagcatagttaagaccagccttgatatgacctgttccgtgtggtgctgctctatcaaaatctgaaaccttgattgtaagtggcttagcgccgcccttaaagtatggtccaacaggtgttgtaaatactctgaactgatattcatcagcaggcttaacacctataaccggattgcttccgaacatatatgggcggatataaagtgatgcacctgaaccataaggtggtacccagtcctcattagctcttactgtttcagcaatagcttctacaaacttatcttctgggaatactggcatctcaagtcttctacaagaatctgccattctgcttgcgttcatatctggtctaaaaataactgtgtgaccattctctgttgtgtatgccttcataccttcaaaacatgactgtgaatactgtaatacaccagcacattcgctgataacgactttgtcatcatctgtgataacaccgttatcccatgctccatccttataattagctacgaatctcttatcagtctttacatagccaaaccctaaattagaccaatcaatatctttctttgccataattctacttcctttcgtgttcgacagtttactcacctactgtcaggagctttctataataactgccgcagacaattctatcctgcataattcacatgcagtacagtcagcatatacgccagtccactaaccccttggcataacacacccttttgtgttcattataatgaatcccatcgattaattaaattacggatattttatacccacattttctataagtcaataaattttgtttatctaatcattatatccatgcattttttatatatttgtgcgatacagatgctttttagctgttttttccgtgcgtgttcagggatgtttcacatacctgaacacgcaattattcatagcttgtaatctgtgtatagaagttatcataatctgttcttccatctgctgtaaatgcaatagccgttcttggatgctggttagcatttccagttatcatatactgtacatcacatccccatacgactccagccttcttaagcggtaccatatgcttctcaacaaacttaagtactggtgatattctatacttaggatttcttaagaagcccataagaagctctgaatagcagttaccggcgcctcttcccatgccactcattgtaacatcaagatagcttacaccaatagtacaagcttctattgtattggcaaatgcaagctgctggttgttatgtgcatggatacctacgctctttccatacttttcagctaccttaaggtacttatctgcaagtcttcttatctgctctggataaagtgaaccatagctgtcaacaagatatattacacttgccttgctctgtgctgcaagaagctctaacgcaagatctaactcattctcacttgctgtagatatagccataatattgatagtcaccttatagcccatatctgcacagtaattaatcatctcaatagctgccggaatagtattaatatatgtagctacccttatcatatctataacactttcagacttaggtataatatcctttttaaaatcagttctaccaacatcagccataacagaaatctttaagtcagtattgttatcaccaactatttccctgatatccttctcatcgcagaacttccacttgccataatcatccacgttaaagacttcctttgatgccttgtaaccgaattccatatagtcaacacctgctgccacattggccttatacaggtcacgcacgaaatcctcactaaactcaaaattattaacaagtcctccatccctaagtgtacaatctacaactttgatatctggtctgtatgatactaactcacccttctgttccataacctgattacctcttcttccttaaatgttcgcagataactttaaattgatccacgattaatgcaattcgctttaaagcgttacactttaaagtgctaaactgttgtctattataacactattatttaatttgtaaatacctttaccacaatttttatatttcaagcgcatcctgcataatatccatcatatcaagcataccctcaagatactcacttgcacttgtaaactttcttttagtgactgtccatacgaattcaggtgtacctttaagcttaaactccagcgcaccaccaaatgaatctacaagctttggtatattatccgagttaatatctgctttaggatatatagtcataaccgtacgccagttagaggcaccacccgatggattatgctgtgtagcaccttttatatccataatccctatcttatgtgctttcatcttgataagtgcaatcataagcagattagaagcacttgatggcacacttccatatctatccataagctcgtctttcatatctgacagctcgtctcttgtttcaagtgcagcgattcttttatatatatcaagtttctgatattcgcttcttatataagttgctggaatatacgcatctacttccatatcaactgtcgtttcaaactcatactcattcttcacgcccttaagagtattcaccgcctggttaagcattttacagtacaggtcatatccaaccgcagccatatgaccatgctggctcttaccaagcacattacccgcacctcttatctcaagatccttcatagctatcttaaaaccagaaccaagatctgagaattcctttatggcactaagtcttttttctgccacttcagatatcatcttgtctcttttatacataagaaatgcatacgaagttcttgtacttcgtccaactcttcctcttagctgatataactgtgaaagtccgaactgatctgcattttctataaccatagtgttacagtttggaatatccatacctgtctcgataatggttgttgatacaagtacatctatctcaccattaacaaactgatacataatcttttcaagctgccttttatccatctgtccatgagcatattctactacagcatccggaacaagattctgtatatattcggctctttcttctatattacgcactttgttgtatacataatacacctgtccatttctggcaagctcccttgttattgcctcacgtatcatctcgtcattatgctctgttacaaatgtctgtataggatgcctgtcaactggtggttcttccagcacactcatatctcttattccaacaagactcatatgcagtgttcttggaataggcgttgcacttaaagtaagaacatctatgttattcttaagctccttgattttctccttatgtgtaacaccaaatctttgttcctcatcgatgataagcagcccaagatccttaaacttaacgtcctttgacagaattctgtgtgttcctataaccacatctatcattccgcttttaagttcctcaatagtctttttattctgtgctgacgtcctgaagcttgacaactgtcctacatttaccggaaagcctttcattctctctgcaaatgttgaataatgctggcttgcaagtactgttgtcggcacaagataagccacctgctttccatcctgtatcgccttaaaggctgcccttatggcaacctctgtcttaccatatccaacatctccacatataaggcggtccataacacgaccactttccatatcgttttttgtatcctgtatggcgttaagctggtcatcagtttcttcatacggaaacatttcctcaaactcctgctgccataccgtatcctttgaaaacctgtatccttctgccttctgtcttatcgcatacagtcttacaagttccttagctacaacttcaaccgccccatgaaccttcgctttagttttgctccactccttgcctccaagattattaagcttaggtttcttttctacatcctggtctgcatacttctggagtctgtcaagctgagtagcaagaacataaagattaccatcatccgcataagttatctttatataatccttctctactccatccacctttatcttttctattcccttatatacaccaagcccgtgattctcatgtataacataatcacctatattcagttcgttaaagcttgctatatttttgccatcatgttttttctttttaagcttttttattcttttggacgtaaatatatcattttctgctataacaacaaacgaaagaactggatactcgaaacccttatgaagacttccatatgtaactataataagtccttttccataatccttactaaaatcctcactgtaaaatgctggtatatcaagtttcccaagatcgtcagctattctttgtgcccttgtcctagaactgcatacaagcaccgttgtatagccactcttcttgtacttcataagatcctttgacaggtactcaaagctgttgttataagagcttatacttcttgcctcaacatgcatcttatagtttatttcaaaaccttccggtttataatcaagagttgtaagtataagttttttatattttcttatatcacctgttatctcaccaagagtctttatcttatgtgtctggcttggaaggacatagcctgctgcaagcctgtttttcatgctttcaccatattcatataatgtaagctcgttacactccttaagtctgttaggttcatccagcacaacaagagtactttccttaggaaaatactctgctaagcctactgtgtctttaattattgtatccagaaacttatcataactgcctgttctttctacatccccaacaatcttattaatattgttgccagcctctatctgctcctgtgtacgccttcgtttatcataatcaaagcactgaagctgcttatctctttcttttcttatcttatcaagtccagcctgcttttcttccgctgtgaaaagatactctgtagctggaaatatatgatatgatttcagcttttctattgacctctggctttctgcatcaaacattcttatggaatcaacttctgtatcccacagttctattcttactggcgcctcatctgtatatgaaaatatatctatgatgccacctcttattgaaaactggcctttgccctcaaccattgctgttcttacaaaacccatggataccattttctttgcaagttcctctgtatcaatactgcttgtgctatcaatcgttattattgaatccatatatcttttcagaggaatcagtctgtctgatactccatcaatggtagttactactgtcagcagactacccgagtcagctctgatgcttccagcttctccattacgtttatccgcttcctgtttactgctgtctttgtccgatacttctacgtgttctgccgcttttatatgttctatgattctgcttatacagcttaatctttgtcctgttatctgattgcctgtaacatctgcactatagaatattgcgtccttagctggataatacaatgcatcgccattaaaaaatgctgcatcatcacacatatttcttgccttggcttcatcacttgttataacaagcataaaacgataatcctgtcctatagcacttgctatatgcaccttctgcgtatcaatacagccacttataagtgctgtttttccaccatccactgataattctttattaagttgctctattgctgctgtatcacatacaggcttaaaaaatgtgttcaaaaccatcctcctaattaaatctgtctgatataaagatgtcgggatcaaaagctcccgactttgatacctacgaattgttccgtgctacgcactcccacaattctccccaatattcgcatatcgtgggattatccgttaaatttattcataccactttcaatgccttcgcttattatgcattcaactgcttcacaggctcttttatttccttctctgagtgcaggatataattcagctggaaactttccaagaacccagtctgcaagatcccatccctttggcttgtctcctacaccatactttattcttttgaatttatcactgccaagatgagctattatgctctttattccgttatgtccgccagcacttccctttggacgtaatcttaaccttccaggctctaagcttatatcatcaaatataactatcaggtcatcaatatcagccttataataatccataacctctcttatacattcgcctgaattgttcatatatgtcataggctttacaagcagaaccttttccccttctataacaccttttcctataagtcctttatgctttgctgtatcaacactaatattatacttgtctgcaagttcatctatgcatgaaaaacccgcattatgtcttgtccctgcatactgtgttcccgggtttcctaagcctgctactatatacataaatttattctccctgttctgtttatcttatcattaaactttaattgccgcattgctatgcaattcgtacaatcctctgacactttgatccaccatcataatataaatgatatccgtcaaaaaaggaagtatttatattatttttaactatttatgcaatataaaaaaactgcaatcataacagttagcgtgttcctaactattatgactgcaatctttttattttacaactttaaacaaatttaactttatgaaatctcatattatattatcttatgcgtttctttcctgctactgtacaagccatcattatagccataactgcaagtaataagtagatagcaactggagctgcatctcctgttgtaggtgctgtaactgttgcatcttctgtaatcgttgtatcagctccagatgctgactcaacttccacataatcaataacaaatgggcttaatccacctgttacgaatgatatagcatcatcagatactgttacatcaagtttttcaagtgtattatcatccttaagatgataaacaactactgcatacttagtataatcaatatctgcattcttcttaagacttatcttaagtgtaccattagaaagcttaacaacactaccatctttattgcttaaagaaatatcaatgatctgtgccttgtctgtaagctttatatcctctgcattagcaactgcttccttaactgctgctacctgttcctcacttgcagccttttctattgctgtaacagaacctgtagctacgcccttgcctgactcatctacgaatttagcttcctttgatacctcaacggctgctattccactttctgttggagtaactatctctactggcttaacatcatatgcataatgagcaggaatccatccaagtactgtattaactgctgaaacattagctgattcaatataatctgcaactgcctcagctgactgattttcagccttgctgaactgtcctttagttacaaaagcattttctcctgaaacattattatattccttgaagatagctgatgttccatctcctgtgctcatctcaccccatccatcttctaacacataaccattagtctgtgttccaataaatgtagcattagagcctgcgccccatgttctaccataatatcctgatactgcaccggtgcttacaccatctgttgtcactttacagtttctgaatacatatggacttgtcttagctgctgtgatatagccaagctttgcattgtttttagcagcatccttttcatcatccttatatgtcttccactgtaattcacagttatcaaatactgctgagaattcgccacaaatataatctacattaccaccaatcacacaattgttgaaatatgtatgatagttattgttcttagaaccatttcttccaagtgtatcctgtgaagaaagaatcttacagttataacactcaatgttatctgcttcaatatagaaagcatttgatctttccttataaacatatgctgtaacatcagcatcctttgcaagtctgtctactgacaatgttgtacctgcaatatctgtcttctctgcttctgttaattcatagttataagtattcttaaatgttgtatcttctgcgatgaagttatcacctcttacgatgaatacaccaccccagagacttccgttaccttctacatatgaatacttatctcttgcaagtacttcattgtaaagacctgtaacaggatctactgaataataatatgtaccaacaccatagtaccatgaaatagtatggttattacctttaagtgttacatatggagctgccataactgtctgctcgaatatatctgctttaagattaatagtaactctgcctgcttctccttctggtctgtcctgcattctaagaattgcatctgaagcttcatttaatgtagcataatcgccaggaacattaagctcgctcttaaaagctactggttctgcctccttagctggaagttctacatatacttcattaactgttgttccctcagtcttaactgaaactctatcatgtgttacaccaccattagttgttacaacacttgtattgtattcacctggctttaatgtacatgtataagaatctcctgatacagtagccttatatgcacgtccgttaaccatgtttgtaagtgaaagttctttaactgttccttctggagtgcctgtaatcttaccttctacagttacatctggtacatcataaagagaaacaactattgcttcacctgtagctgtaaatatatcgctgtcaccaacagcagctcttacaccaccatcattagtacttaacttatattcatgtccttcaagaaggtctgcatttgtgccatcctttaacttgatagcgttaccaccaagattagcatctacaacgcttatctctaatgaatctgttaatttagcatctacattattaaacttaactggaacgcttacttccttatctacaatatacttataacctgcataaaacatgttattagtctttcctgttgtagacattacatatgtatgtcctggtattactgcaaatgtatatgaattaatacttgtttctgtatctgtatatccattcttagaaccatctgctgtattataatcatggattcttaaaaatgatgttgaactaaagtatactgtcatagtacctttagctgctggagtgaagatagttaatgtaccatctccctgtccaggaatagtaggaatattgttactatctgcatgtcttttacctgctgtatagctattatattcttttccgtcaactgttactgtctttcctggttttactgtatactgtgtttctccctgacctactaatgtaagtgtgctatcaccatacttgtaatcacctgtagcaacaacatcttctttagcaatgtcatcaagcattaaagtaaagctttcaactttatctgatttagcaaaattatttaccattactgagtgaagatatgcctcacctgatgcttcacatgttattgtaagtgttgtagcatctccgttataagatatgctctgtgatcctgcatctgcatctgacttacctgatgttgaaccaacttccttaccagaagcatctgtaaccttaaatgcagttccactgccatacttacataaagttaatgcaatctctgcacttcctgcaaccttaacttcaatcttgtctccattataaactgctgcaccatgctgtccatcatgccaatatgctttatcagcttctgatattaccttaaatacaccatcatcagatgtataaccattaagctgtgtctttgtactatataattttgtaaaatccagtacataactcttgccagcttctggtgcccccgcagcttttgctatagttcttacaccaggtgcaaactggaatgttccaatcgctaaaacgaatgtaagaacaactgctaaaagctttttagcttttctgccaatcttcataaaatacctcctgaaatattacggatcattccgctagattgactactactatatcccattatcgaattagtaacaacttatatttttatattttccttattgattacatgtatttttagtgttaaaatacatattgttacaatattaataaatatttatttatttttttgttattttgcacatattttatatgtgtattaattatatattaaacatactattcaactcaaaatattatcttatatacagaacgctccatttctttacattttacaattcacgcagttcttatacagcatcatattcattagaaagaaggattataaacatatgaaacagacgatacacaatatttcaaggttccgtattgaacgtggcatgcatgaaccacattattccatgcactctgcacacagtcatacatattatgaacttttttatctcgttaatggtaattgtacaatttccctggacaacaagctttatacgctttccgctggaaatattatatttatccctgctaatgcaatccacagaacaagctatataggtgataattcatccgaacgcatatacatagaattttcttctgattatatatctactattgaagatatccttggaaaaaactggacatacaaaaatctgtggggacatatactatatatagaaccaacacatagatcttatatcaactctttatttgacaagattatctctgaatataacattattgaccactattcagactgctgtatccgtcagctttttcaatatctgattataatgctcataagagttgacagaactaacatagatgaaaaaaattatataacacattcacataaaaaaatagatgctgatatgataagtgcctcaagatatattgctgagaatttcaaaaacaacatatcactaaatgatgttgccgaatttcttaatcttaaccctgcatatttttcaagcaaattcaaagcattccacggtataggtttctctgaatatttaagaaatacccgcattaatcatgctgaatggtatctgattgagactgacttaagcatgtcagatgttgccgatgaatgcggtttctgtagttctaactactttggtgatacatttaagattgtaaatggcatctctccttctgaattcaggagaaaatataaaccaaataaagcatagtgtgaaaaataagatttttcacacgcaagatttgtgcttacgcacaaacttgagatgcgcaaaagacagcgcaagaatggagattaatatacaaaaactctctgccatcctacaataatcttgttggatgacagagaggtatttttcaatccttacactgcttcttctatcttttccccattcttgcttacaatctgtccttcataaatctcatatatctcatctgacagataattaagctcctctgtatcatggcatgctataattataagcgagccatttgccttaagttcatcaagtatgccctttataagacctgcacctgcttcatcaagagcattgataggctcatcaagtataactatatctggtttttccataatagctgctgctatacctaatctctgtttcatacctaaagaatacttcttgaatgttcttgtatcatcagggtcaagtccaacttttcttatggcttcctttatctcctcatcattaatcctgttctggatagaagcaagaatcttaagattcttaaaacctgtataattagatataaatgatggattctctataagaagtccgatacttggtggaaatgatatctgcttaccaagctccctgtcattgataaatacctttcctgatgttggaagtataagaccgcttatcgctctcataagcattgtcttacctgaaccattctttcccttaagacctataaccttgccactttcaagtgtaagatttatatcctcaagtactgttactttcttgaatgactttgtgtagtgttctaatcttactactgtccccatattaatacctcctcttaattaaacaatcatcccaatccgtatattagttttatgcaggataacacaggataaatgatttatatacatgtataataacacttttactagataatgtatactaaaattttaaaaatatcatattatataaaaaagatgccgtattaataaagcaatattaatatgacatcttttttatttaatcatatgcgtgtcaaaagcgaattacgttctctgataattcctctacttcatcagcatcataatatgctttcaaaactgcactttgaagattttccctggcatgcttattgataggatgagctatatccttaaatcctccctcaataagatgcttactaggcatagctacaaacaagcctttttctccttcgactactcttatgtcatgtataacaaactcgtcatcaaaagtaattgatacataagcccgcagtttaccactgcctgcaatcttcttgactctaacatctgtaatattcatttgttacccctatctgtcttctatacaacctttttctactctggttaagaccttaaatatatatttataatctttaataatatgatggactgtcttctatgacaatctttataccattctcaccaacatatcgtgaattagctttaatagtgctgttactctcaactatacagttctcaatatatgcattatctcctatatatgcattattcatgataattgagtttttaacaacagcattattgcctatgtatatcttcttaaacagaactgaattatcaaccgctccattaactatacatccacacgatataagactgtttgatacattggcaccataattatatttagctggtggaagatcatccaccttagaatatatatctggatactgcttaaagaaataatctcttacatctctctttaagaaatccatattagtcttataatatgaatccacagatgatatattgttccagtatgtatcaagcttgtaaccatatatcttcttaatgtttctatatcttacaagtatatccctgacaaaatcatacctgtcttcttctgctgccttttcaagcagttcaataagaagacgtcttcttactacatatatacctgttgatacagttgacagattcgtttctaaaggcttctcatcaatatctgtaatacgtccatcctctgcaagtgcaacaacaccatatcttcctatgtctgctctgttatcaagcttctttacaaccatggtaacatcagcctttttctctatatgatactgaagcaccctgttataatcaagcttgtagacaccatcaccagaagcaataactacatatggctcatggcttgacttaaggaaatctatattctgataaagtgaatcagctgttcctctgtaccagctgctgctctctgctgttatagtaggtgtaaatacgtataatccaccctgctttctaccaaaatcccaccacttagatgaacttaagtgttcgttaagtgatcttgcattatactgtgttataactgcaaccttctggatatgtgagttagacatgttgctaagtgcgaaatctatcgccctgtagcttcctgcaacaggcatggaagcaatagcccgcttgtttgtcagttcacgcatcatcctgttgttaccgcctgctaatactatacctattgctttcattctacttcacctgccttaattatgattccaccgcttggtaataagccatccggataatcctctgctgatgtaactccagatatcgccgtattctttccaatcttaactccatcaggaataaccgaacattccccaatagtgacaagaccagaattatatatcttagggaacttgacattcggtgcttcttcgcctacaccaagttctacattatcacctataactacttcttctgctattattgacttgttaactattgtattctttccaataacggaattattcataatgatggaatctcttactacggcaccttcttctatggttacacctgaacctataacagaattatagattctgccatatacttctgttccatcgcctactatactcttttcaataaatgtattatctgcaacatactgaggtggaatagtatctgttcttgtatatatcttccagaattcttcataaagattaaatacaggaattatatctataagctccatattagcttcccaatatgaacttaatgttccaacatctttccagtaactgttatattcatatgcaaatattctcttgttgttattaaagcagtatggaattacatgcttgccaaaatcacattcgttctggtctttaagctttataagtgcttcctttagcacgctccacttaaatatgtatatacccatagatgcaagattactcttaggctctgctggcttttcttcaaattcagttattctgttatcctcatccgtaacaacgattccgaatctgctggcttcctcaataggtaccggcatagctgctattgtaatatcagcattgttagccttatgataatcaagcattatcttataatccatcttatatatatgatcacctgaaagaataagcacatattctggatgatactgttccatatattcaagattctgataaatggcattggcagttccagtataccattcactgcttgtactcttctcgtaaggaggaagaactgttacacctcccacattacggtcaagatcccatggaataccaattcctatgtgggaattaagtcttaatggctgatactgtgtcagtacaccaacagtatcaatacctgagttaatacaattgctgagtggaaaatcgattattctgtattttcctccaaacgcaactgcaggctttgctacttttgctgttaaaactccaagtctactgccctgaccaccggctaacagcatagctatcatttcttttttaatcatgctaccacctctgatgtttaatttactatcttaagttgtataaattatatcatataattccgattaagtaaaaataattttgtctttttttggtgatttttcatacaatttattcacctttttattgttacattttaacatatgtattttcagttaattttacgctttattttacacagcacttatatgcagtatacattttatgcattccacatcattattattacaattatatgatgtcgggctcaaaagccaccaaccttgatacctacggattgttctgtgctacgcactcccacgtctacgctacgcttcggtccatgctaaacatctgccacttatttctcataaccatagtaccccctgcatatataactttatgcgttttatgtttgaaaaatatatgctttaggcatataatctctatgatgacttttaaatatcttactaaatattaatataaggtaatatgattctggaacatgtatacaagcctgcataagctttatgttctgacatcatgtcatcatcagtttattaacaataatttatagaaagaggaatatcatatgtttaatattgattttaatcatccgatacatgtacatttcataggcataggaggcataagcatgagtggacttgccaggattcttcttgacaggcacttcactgtctcaggttctgatgcacacgaatcagagcttacagatgaacttgcaaaggatggatgtcttatatcttatccacagtcagcagacaatatcactggtgatattgaccttgtcgtatacactgctgctatccaccctgacaacaaagaacttaaagccgctattgctgctggtattcctactatgacaagagcagaactgcttggtcagattatgaagaactatcacacagctgtcaatgtagctggtacacatggaaaaacaacaacgacttccatgattactgaaattcttcttgccgccaacgctgacccaactatatctgttggtggtatattacacagtataggcggcaacataagagttggaagttcagacatttttgttacagaagcatgtgaatacacaaacagcttcctttcttttaatcctacgttaaacattatacttaacgttaaagctgaccaccttgatttctttaaagaccttgatgatatacgtcattcatttaagctctttacagaaaagcttccatctgatggaaccttagttatcaacacagatattgataattacgaatacttctaccaggatacagactgtgaggttatcaccttcggttctgatccagccaggtcaatgtacagtgctgccgatataaatcatgatgaatatggacgctgttcttacactcttcttattaataataaaccatcaggaactataaagctttctgttcctggcgtacacaatgtatacaattcgctttctgcaatcgctgcatgtattaagcttggtatatccatggaagctattcttaaaggtcttgtgaatttcacaggtactgacagacgtttccagaaaaagggagtatttaatggaataacagttgtagatgactatgcacatcatccagatgagataactgcaactcttaattctgcaaaaatgtatccacacaacagaatatggtgtgtattccagccacacacatattcaagaactaaagcacttatgccggattttgccaaagcgcttgctcttgcagataatgttgtacttgccaaaatatatcctgctcgcgaaacagataatctgggaataagttctgctaatctttgcagtctgattaaagctgaaggaaaagaatgttactattacgaatcatttgaagaaattgaagactttttgaaaaaaaattgtatcaacggtgacctgttgataactatgggggctggtgatgtttataaaatcggggaagacctgttaaaataggcatttctccactgtataatattttttcaacaaagttatccacattatccacatttttatgttgttatacacaatataaaagtgtggatttttttgttaacaacctttaagtcaaaaatacagcaaaatacattatttataccactttgtccacgagttatccacattatccacaatatccacaacaatatccacctgcttttagcacacttttcatttaattttcactatgatataatctgcactggcagaatatctgccgcttaacattatgttacatcatagcaatcattaatcatcaggaggatagacaagctatatttatagcttttaatatcatatgggcaatcttacattaactacaaagaacaattatggatacacagccatttccaatatatttataagcagctttgtacctgaagccaatggcgaattcgtaaaggtatatctttatcttttacaccttataagcactggcaattccaatataagtatctctttacttgcagatacctttaaccagactgaggccgatattatgagagcactcagatactgggacaagctcaatgtcatatcattaacatttgccggtaacaacgacagcctgtccaacataaccatcaatgacttcagctctgacaacagtgccgccagcactactaaagctgattttaacaataccacatttcctgaagctgccaagctggcatccccagcagctatagcaccaacagtgcctgctgcaccttcatataacatatcagaaggtccaaaacatgtcgaaccttccagcatgcaatattctgcggaaaagataagcgagcttaactccgatgagaacttttctatgctgctttatgttatagaatcataccttggacgtcctctgtctattaaagaaaccaatgcaatagtatacttttatgattcgcttgacttttctatcgaacttatagattatctttttgaatattgtgtagaacacaacaagaaaagcattaactacattgaaaaggttgctcttgcgtgggccgataaaggtatacatactgttacagaagcaaaggaagaagtatctaaccataccgactctgtttaccagattatgaaagccttcggaatctctaacagagatcctggacagcatgaacgtgcaatgatatctaagtgggctgatacttactgctttgacactgatataattatagaggcctgcaacagaacaatcaaagccatacaccagccaagctttgaatatgctgatactattctttcaaagtggaaaagctcaaacatcacaactatggcagacatcaaaaaggatgatgcagcatatgcggcaagcagcaacagcaaaaccagatatcagagttctgctaaaaccggttcaacaaaattcaacaacttccagcagcgtgataaaaaatccgatgactggtacaactctttacttagcaataacaattaacctgtcagcatagcttatgttttacagcttactgatattaccagatttaacttatcaacatatttaattatatgaaaaggagtagttatgtcacttactaacacacaatatgctgctgttatgcggatgtatgatgatattcacacgcacaatgcagccatacagaacgagcgctacaaagaagtaacaagtctttgtccacaatatcagacaatcgaagatgagataatctccctttctatgcaggaggctgccaaacgtatcggaaatgactcatctgacacgaatactgatgagttcaatgaacgcctgcagtcccttattaaacaaaaagctgtactccttgcttctataggcaagccatctgattatcttgacaatatttatacatgcaaaaaatgtcaggatacaggatatatcaacggcaccagatgttcatgctttagaaaaaaagccattgaccttatttatcatgattctaatctaaaaaacatcactgccaacgaaaacttttcaacattttcctttgactggtatgacaaaacgactattgattctgcaacaggactcacaccatacaataatattcacaaggtatttgatgtatgccagtcttttgtaaaaacttttgataccaacttttcaaaccttttattattaggagaaaccggtgtaggaaaaactttcctttccaactgtatagccaaggaactgctagacagctatcacagcgttatatacctcactgccatagagctgttcaaatgctttgaaaacagtgacttcaacaaaggcgaagatgtggaatatcaggatgtcagctactttattgactgtgatcttcttataattgatgaccttggaacagaaagctacaactcttataccatttccaagctgttttatgtcataaacgaaagaatacttagaagaaagagtgttattatatcaactaatctttctatgccccagttagagaatacatattcagaacgtatattctcaagacttatcagtgcatatacaatactccgcttattctgtgaagatataagggtacaaaaggctacaaaaggaaaacattaattttaaaaaatgtcaaatataatcttaaaaaatgccaaatataattgacttctataatatttatgattatagttaattatgtatgtgtatttagaatttaattcactggaaagtatgaattagattctttatataataaatattttatctatacaatggaggataatacaatgccacgagacgaacgtcatactgcaacaattccatacggaacactcggaatcattcctttaaagagctgctctgctatgggcgaaaaggttgatgaataccttgtaaactggagagaacaaagagaacacgagaatcagtctaatcttgcatttagcggatataaaagagacagctatgttgtaagtgccagcacacctagattcggttcaggtgaaggtaaaggcgtccttaacgattctgtccgtggttatgacttatatattatggtagatgtatgtaactacagcatcgaatattcactttgcggtaacactaaccatatgtcacctgatgaccactacgcagatcttaaaagagtaatcgctgcagccggcggaaaagcaagaagaatcaatgttattatgccattcctttatgaaagcagacagcataagagatccggaagagaatcccttgactgttctcttatgcttcaggagcttacagctatgggtgttgagaatatcatcacttttgatgcacatgatccacgagtacacaactctattccacttaagggattcgagtctgtatcatgcacatatcagtttattaagtaccttttactaggcgtagatgatcttcatatcgacagcgaacatatgatggtaataagccctgatgagggtggtatgggacgtgctgtatactttgccaatgtacttggccttgatatgggtatgttctataagagaagagattacactaagattgttaacggacgtaaccctatcgttgcccatgaattccttggtactaacgtagagggcaaggatgttatcattattgacgatatgatatcttctggtgaaagtatgatagatgttgcttctgagttgaagaagagaggtgcaagcagagtattctgtgcaactacatttggtcttttcactaacggctttgataagttcgatgaagcttacgaaaagggtattatcgataagattcttactactaaccttgtttaccagccagcagaacttctttctaagccttggtatatcaacgtagacatgagtaaatacatggctcttcttattgatacacttaaccatgattcttcaatcagtgatcttcttaatcctgttgacagaatccagaagagagttaaagagtataacgaaagatatgctaagtaatagatgaccataaggtcttagcatttatatatataacagggaatatttatcagtataatgtatggcggcggctatataatgtattggtaactattccctttttattgcagcttacatcttataatgataaggtactgaatgtaattaatatttaatgcactaatacaaccattcataactaataataaataaagcctttctgcagcaatgcaacaaataaaaaacggttactatattatcgctatgtaatatagtaaccgttattttaagttattcaattgtttttcctccaaatcattattcttttaattaactattctacaatgaatataattattcataatgcttggtatgtgtcatatttccattggactataccttcctttctcactcaattccttacatctatattaacattcttaatgaatgg

SEQ ID NO: 328 - DNA, 73130 bp, Unknown
  gut microbiota DNA sequence
gcagatgatgttgcagttgatgcatcacatccaaactgccttaataattcgtttgttaaagttgtcccttccattgttagtaatgacaaaatcatttttttatacggtatttttctgttccttgaaaaatcaatatctgggttagaaacaagaccagttaaatcctgtttctgagtattgactattctaagtaataatgtttttaattcttgagcttttctattcatgcggtgtcctccttgcaaaaagatgatttctaattacaagggccgctttagctgcatctataaataaatcagtagctaaagcggccgcattttttgattgacatgtcaatacttttccataaaaaaatcccacaccacactatgggtgatgcgagattttcttaacttaatgccattgggtttgtgcccccggtgtttatttaaggaaatcttttctcattgggttgaatacatcaacaagtataccatcttcaagggcagtaacgccatgttctacattagatggcatatatacactatctccctgattgacaattttagtttcgccaccaatcgtgaattcaaagctgcctttagcaatatatgttatctgaaggtgctcatgcttatggaaattcccttttgatccctttttaaaagaaatttcacacatcataaggtcatctgaatagcaaagtatttttctggtaactcctggttcacaatcagttggaattacatctttattgtatttaaacatacatagcctcctgttttgttttttttaattatagttatatgctggtatgtttgcaatataataatttgtagtgattgtcatattataaagattttttgatatattttatggaatatttattgtatagaatattttaatcagtattctaattgaggtttaaatatggtattatatatatagtagtaacttacagattaatattgatgatacattagggaattgggtgaatattatgaataagtacagaggcaggtatggggctgttatattagggcttatgtcagctatagtgataagtgcgtgtcatgctgcggggagtaaaggaaaatataatgatatcgaagatgctggtatatatgatacagaacagtcacatgaaacagaaaataacgatatgattatggagacagcttctgaatcatatgattatgaaggggatatcacacataatgaaaatgaattacagcaatccgcagatggacaaacagcaacagaatatacggcgccagaacatatggatggtaaggaatataacaatacacataaaagcgttgaaagcagtatgtcttcaaaagctgctgccacaaccagaacaagtgaaatcagtcagagtgcttctggtgtagataataatgctacaaaagcttatttagtcaggacagaggtaagaaaagtggtcaattcatatgaaaaaattaaatatggtgccacacgtaagaatatcacagaatatacatatgaaatatatagtgatgacagcaggaaagaagttgcacatgccagcagtgttgtgatagaccgttcaacttatagtgcaacagatgatatattagaggaagaagcagagtataattctgtcagctatgccgacctatggaatgaaattcttcaatgtgttaaccgcttccgcgcagacaataacatagctgctatagttcttgataatgatttgtgtaaggcggcatgtatgagagctgtagagatagattattctgcgtattttagtcatataagaccagatggcagaagtgccttcacagcattggattattatggctgtgtgacaggattcagaggtgagaatcttgcaggaggacaaagaacaccagagcttgttgttaaagcatgggaggagtcagataaaggccatagggagctgctgcttaacccgaaggtaaaaaagatggggtgtggctacagctattcaggtactataggttatccggtatgggctcttgaaatgacagattgaataagtatcataagataagcaggaaacagggaaatgaaaaagagtatgagaatattatgtattatatttgcaattgtatgctttgcatattatatacgctgcgcagcgtacgcaggtgttaagtcatcttttatatggatatggctggtgggtacagcagctttttgtatattgtatatattggggctgctagaagacagacatatatatactcttccacgtatggttaaatatatatcacttgttattatatgttttggcacagcactatttataacattagagatgtgtataacattttgcatgaagaagaagccagaggataactgcgattatataatagtacttggatgtcagataagaggagacagaataacaaagtcattaaaaaacagacttgatgcagcatatgattatgcatgcagcaaccaggatacaagaattatcgtatctggcggacagggaaaaggtgagaataaaacagaagcccttgccatgtatgaatatctgtgcaacaggggaatatcatcagaacgcatagttatggaagataaatcaacagataccaatgaaaatatgctttattctgtcagacatatagacgattataatgcaaaggttggtatagttacgaatgattttcacatattccgtgcaaagcttctggcaagaggaaaaggacttaacaatatatgcggtattccagctccaagtgatgaagtgctttttgtaaactatatggtaagagaagctgtcggaatagtgaaagacttcgtatatggtaattatcaggtgaaatgaattatttaatatggaaaaaacttcttatgtcccccagcttttcataacactggttatagccgtcattatacatagacaaaatcttgtttttgtctttttctaatcgtgagaagcctttgcttacagtaggacgtattatcataacatcgccatttttttcatattcctctaattcgtgaaggcatgcgttatatctttctgcacgggaaagcagggcatctgaaagcttagggtaagttttctcatatgactttgctattgcctttgttgaacctgatgtgtgtttactgtaaccagcttcgcgcgtgagaataacaagaactttatcacaaccgtcattaaacgctctcttaaaaggaatagaatctgtcagacctccatccatatatggaatatcattaattataataggaggaaaaagcataggaagggcacatgtagcctttaatacagtgtttgtatggtctttgcctgtatatttcatatattcaggttgtccagtaagtatattggttacgacacagtagaaatctcccttataagccatgaacgaatcataatcaaaaagattaagctcgttaggtattgtttcataggaaaattcaagtccgtatacagatctgttgtttttatcaaacatgttctcaatgccaagatagcgtttgtcatttctgtacttcataagtacattaagattacgtcctggttgtcttgaagccatagatacaccataagcggcaccggctgagacacctatcatatagtctggcataatattattttcaacaagggcatccataacaccacaagagaatatggttctgaatgcaccaccttcaaatacaattcctgttttcatacaatcctccattatatataaaaagatgggcgtttctgcacatctgcaatattaacttatattttatatacatcattaaagttgtcaagtttaaaatgctggggtgtcttactttagtatgataaggttgtcgatagtttgacaatacaaagaatatatggcagtatataaaatgtaagaattaataaagatttttgcgtggtgtaaactagtattattaagattggaaggagattagttttgaaaaaaggattgaaagggcttaaggctgtggcatttgtcgttgtagcagcaatagcagcattatactattatattgagcttcctgcgataaatatacattcgccaggcttctggaagtttataatatttgtgatgcttatagtaactgttgaagtatggcttatgaatcatagaaaagcagccggaggcggaaggtatagaggaaatatttctgcaaaggagttctttagtgattttaagacacaggcgggttctgttctttttaaaactgcatttgtgtgtacagttattcttgttgttttatatgttgctggaaatattctttcatcacctgtcatcaatgcatctaagtatcagcagcttcttaaggtggaaacaaggaattttactgatgatattaaagaggtatcatatgacaaaattccactgcttgataaagattcagcctctattataggaactagagttatgggtactatggtggatatggtatcgcagtatgaagttgatgatatgtattcacagattaattataaagaaaaacctgtcagggtgacaccattaagatatggcaatcttataaagtggtttacgaatcataagaatggaattcctgcttatataagaatagatatgactacgcaggaggctgaatgtgtaagactgacagaaggaataaaatattcaaagtctgatcacttttcaagatatatatacagacatttaagatttgcatatccaacatatattttcgatgatattaattttgaaatagatgataatggaacaccttactgggtatgccctgttaagaagtataatatcggattgtttggtggacagacagtaggaagagttgttttatgtaatgctgttacaggtgaaatgacagattattcagttgatgaggtgccaacatgggtggataaggtatattcagcagagcttcttattggcctgtatgattataacggaagccttaagcatggatttataaatagtgtattaagccagaaggattgcctcaagacaacagatggatacaattatattgcacttgaggatgatgtatgggtatatacaggcataacatcagttggtcaggataattctaatgttggatttgttcttatgaaccagcgtactatggaaacaagatattatgaggtatcaggtgccgaagaatattcagctatggattcagctaagggaagggtgcagaatcttggatatacggctacatttcctcttattatcaatataagcggacagccaacatattttatggcactaaaagatggtgcaggtcttgttaagtcatatgcaatgcttaacatagaaaagtatcagaatgttgctataggtgattcggttctgcagtgtgaatctaattatattaaacttcttaaagataatggaatagtagaggagcagcagccggaggtaaaagaaacgaaaaaagtaaaagatataatatcaaaaataatgccggttgttattgatggaaatacacatatgtatattatgctaagtcaaagtgacagcatatatgaagtggatgtttcaaaatatgtggatattataaaatattcagaaggtatggaaataacgcttgaatatactatggattcccagcttaataaagtagttggaatcataaaataatataagtttatgttatctggcattttatttgacatgtttcgacagctgtttgtattataatacagttacaccgcaggatattatcactgattattaaatctggttataaatatttagtgaaaattaagtgattgagtgtgaaaaaactgtacttatttggtattttatgacaaattatgttgcaaaatttacgaaaagttgttacaattgtaactaaattaaatgtataaggagaaagataatggatattattgtaaaatacattgatgaattgcttgaaaaaagcacacctgatgcacctatgtggaacatagaaaagataagagatggtggtgttaagtctaactggaattatattgatggtgttatgataaaagcagtgcttcagatgtatgatgtaacaaaggatgagaagtatcttaagtttgcagatgactttatcgattacagagttcatgaggatggaactatagaaggatatagtgttggtgagaagaatattgataacgtcaatgcaggaaagacattatttgagctgtatgatcttacaggaaaagaaaagtatagaaaagctattgatcttgtatactcacagatagaaattatgccaagatgtaacaacgaggcaagatctttctggcataaggatatatatcctaaccaggtatggcttgatggtatgtatatgggacagccattttatcttgaatatgagactaagtttaataacagaaagaattatcctgatatatttgcacagtttaagtatgttattgaaaacatgaagaatccacttaacggattatattatcatgctatagatgtaagcagggaagcattctggtgtgataaagtaacaggtttatcacagcagtgctggttaagggcaattggctggtattccatggctcttcttgatacgcttgataaggttgataattctgaccacaagtatgatgcagaatgtaagatgcttgaagatgcttttgttgatcttattaattctatgcttaagtaccaggatgagagcggtatgtggtatcaggtagttaactatggtggtatgaagaataactatcttgaaacaagtggaagctctattatggcatattcacttcttaagggtgtaaggttaggatatcttccagaaagctatagagagtatgctgaaaaggctattgatggtatatgtgctaagtatttaaagactgatgatggtaagatgtcacttggaggtatctgtcttgttgcaggttttggtggtaagaataatagatcaggaacatatgattattatatgtcagagcctatagttgaagatgatgcaaagggcgttggtccattcctgcttgcttatacagaaatgttaacttataagaagaacaataagtaatatagaattgtttatattcaatgggggatcaatatataatattggtcctcttttgcttatataaaatgttgtgttaaaaatcagattaatatcggattttaagaatggaggattagtgtgaaaaataagatttttcacacgcaagatttgtgcttcgcacaaacttgagatgcgcaaagaagcagcgcaagaatggaggattattatgaaaccatatattacaatggaagaggttatacagacacagggagcagacagcagaacacacaggtttcttacagaaaagaatgggtgtactaatggctgcgcatcaggaacaactatatacgcatcaacacagttttcagacagacctggtgtacatgaagaccaggaaggcttttatgttcttgagggagaaggctatgcaaaacttgatgatcttgtatttccaataaagaaaggtgattcctttgtggcgttagctggtgttgctcatactataaggactaaagaaggatgtgaaccggttaaagtgttctggtttcatagtgctaagtgattgtgaataatggggttgcttatggatgaaaaggaattcggaatgctggaggaaaaacagcagaagaagtatctgtttaaagaaaatgtaagattgaacgaacttaaacaggagcttgaagctgacagggaacttatagacatccagaagggaatgcttcatagacagcagaaaaagaaccagctgctgcaaaaacagcttgaaaaccagaagattttttttgaccagaagtgggagatacttgagcgcgagacaagacagcttgcacttgataaagaaaagtttaacagggaaaagcttatgtatcgtgacaaggtttatcgtgaggaaagaagaagtatgtctaatgcggaaaatgtcaaaatatttttccgtggggtaaatgatacagaatcagttaagaagcgatacaaggcattactaaagatatatcatccggataatatgaatggtgacaatgaccttgtgcttgcaattaatgaagaatatgaaagattattaagattttaccttggaacatagcacaaatctgacaataatagttattattgttaggtttgtgcttgtttttattgttgttatgtaaactgtgttgtataatagcaacggatattttacatacgatatctatgtggatataatatgatgtatggattgagtggattgcaaagtaatgtagcaatactgatacatcaaatatcaaaagttacttggataaggagagagaagaatgtttaagattaatgaaaattatttaaagcttccaggaagttatctgttttctactattgctaaaaaggttaacgcatatagtgcagctaatccagacaaagaaatcataaggcttggtataggagatgttacacttccacttgcaccagcagttatagatgcattacataaatcagtggacgagatggggcatgcagaaacatttcatggatatgcaccagatcttggttatgagtttttaagaagtgcgattgtagagcatgactataaaaagagaggtgcagatatatcagctgatgaaatatttataagtgacggagctaaatcagattcaggcaatatcggagacatcttctcagttgacaataagattgcagtgtgtgatcctgtatatcctgtatatgtagatactaatgccatggcaggcagaacaggcgattatataccagaacagcagaagtggagcaatgttatatatatgccttgtacagcagaaactaattttgcaccagagcttccaaaggaaaccccggatatcatatatctttgcttccctaacaatcctacaggttcaactataacaaaggatgaacttcagaagtgggtagactatgctaacaaggttggtgcagttattatatatgatgcagcttatgaagcatatatatcagaagataatgtgccacatactatatatgaatgtgaaggagcaagaacatgtgctattgagcttcgttctttctctaagaatgcaggttttacgggtacaagacttggattcacagtaatacctaaggatcttaagagtggtgatgttatgcttcatagcctttgggcaagaagacatggtactaagtttaatggtgcaccatatatcatccagagagcaggtgaagctgtatacacagaagaaggacagaaacagacaggagagcagatagcatattatatgaacaatgcaaagactatacttgaaggcttaaagtcagctggctatacagtatcaggtggtgtcaatgcaccatatatctggttaaagactcctgataagatgacttcatgggaattctttgattaccttcttgaaaaagctaatgtagtgggtactcctggttcaggatttggaccaagtggtgagggatacttcagactgactgcatttggttcatatgagaatacagttaaggcacttgatagaattaaggcattataaattgtggcttgtttaagtttgttgtttataaataggatcacattacatttcaatagggaatacacaagtggcttgagtgcagtgcactcaagccccatcctgtatatccactatatattctatgctatttaaaatatcctctgttatttaagcagttttttggctgtttttaatatgagataagttactgtaacatcatttgaattaaatatggtcaaacttaggcataagtgctgcaccaatagctgtaggacctgtgtggcatgccgttacaacaccaatacgtgtcttgaattccacacctgattcaagcagtttagtctttatggcttcttccacttctttacggaattcttctgcctcgtcattgttggtacagtagccaacggtgatatcatagtcgttgatatctatgccaggttcttcgaaatgcttgcataaaaattcaataactttagctttggctttctttcttgtcctaaagaatccaccaacactgatttctccgcccttcatgatgatgataggacgtaaactcaacttgcttgttatcatagccgctgttctgacaagacgaccgcctttagtaagataatcaagcgattctgttgtgaatatgattcttccgtaaggtcttaatgcctcaagctttttaacagtctcctcataagaataaccagcatctctcatgcacatggcttcataaacaaaaagagacatagatgcagagttctgtaaagaattgataacggtaatcttagcatcaggatgatcctcaagaatcatatcttttgccgagcaggcagagttataagagcctgagaaaaatgttgtaatacagcagcatattataggaataccagcctcaactgatggcatgaaagcatcaacataatcctgtatagatggaagagaagactttggaaaagcattctcatctgtcatttttttataaaattcatcatagctgatctcgaactgctctttatagtaagtatgtccgtcaaatgttgtatataaagggactaatgtaacatcatgttcgtctgcgtagtctttaacccagtcacatgaagtatcacttataagtttaaacatatatgcctccaacttgagtaaaatttctttgtatatgataacacatagttttgaatactacaatatataatttgaaaaatgttaaaatgccatgtaaagatttttctatatagatgaatgagctatgaataaaagttacagagagtaagagttatacgaaggatgaaatttacaaaaaaacaaaaatatgtaatatttatacaaaaataattgataataataaaaatatatggtaatattgctgtaagttttttgaagatgtaagggccttaaataccttttgatcctgacatctacattattttaatataaggaaagagagaaagaaaaagatggaagcattattgattttggtcatcgtggcatctttgcttgctattggctatgcggcatttaactttgcaagtgttaagagacttgatgaaggaacagatcgcatgaaggagattgcatcagccataagagttggtgcgaacgcatttatagagtatgaatataaaataatagcagtagtagttgctgttatagcagttatctttatgattatatttacaattcagtataaagcgtttagctgggaaccatcggtatgttttataattggagttgttatgagcgcccttgcaggatatgtaggcatgaagatagcaacttattctaatgtaagagtatctaatacagcaagacagacaaaagatataggtaagacactaaaggttgctttaaagggcggttcagtcatgggattatgtgtaggaggatttgctcttttaggactttttcttgtttatcttatattcggttatggattgggacatataaaaacagaatcacttatagaaggacagcatgtgttcacgcagtgtctttcatgttatgcattaggctgttccatagttgccatgtttaaccgtgtgggtggtggtatatatacaaaggcagcagatatgggagccgatcttgtaggtaagacagaggcacatataccagaggatgatccacgtaatccagcgactatagctgataatgtaggtgataacgttggagatgttgcaggacttggttcagatcttttagagtcatttgtaggtgcaatatcatcagctattattcttgcagtaagcttatcacttcatgcagcggctgatgcagctataccatatgatgtattacaaaaaatgatgtatttcccacttgtttttgcatctattggtcttattgcatctatacttggtattgcatttgtacttttaaagaaaggttctgataatcctcacagggatcttaacatatcaacgtggagtgcagcagctataactattattggtggctttgtggcaacatatatgttatttaaaggaacgtcggatttttctgcaataagttttaatataggctttatatcaccatggatagcagcttcacttggtgttgtaagtggtgtggtaataggaggaatagcagaatactatacaagctatgattataagcctacacagcttatagcacttgcatctaaggaaggtccggcacttactataacacagggacttgcagttggcatgaagtcgtgtatgctgcctcttattgtacttggtcttacaacatatgtttcatatgcagtgtctggtatgtttggtattgccatggcagcagtaggtatgctttccttcgtatcagctacagtatcagttgatacatacggacctatttcagataatgcaggtggtatagctgagatggctgagcttgaacctgcggtaagagatattacagacaaacttgattcggtaggcaacacgacagcagctataggtaaaggctttgccataggttcagcctcgcttgcagcattatcacttatggtaagctttttatatgcatttcttccagcaggtgaaacactgtcactggattttactaatccgcttatacttgcaggtgcattagtaggtggagcacttccattcctgttttcaggtatgcttatagaggcagtagccaatgcagcaaggaagatggttgaagaggtcagaagacagttcagggaaatccctggtatacttgagggtaaggcaaaacctgattataagacatgtatagagatatcttcacagggtgcattaaaggaaatgaaggttccatctgttctcgctattctgtttccgcttgtttcaggctttctttttggacctatgtttgttggaggacttcttataggtgcaacactttcagcgatcatgcttgctatatttacaggtaatgcaggtggtgcatgggataacggcaagaagtatattgaatcaggtgcaattaaaggacagggtaaaggttcacctgcacacgatgcagcagttgttggtgatacagtaggagatcctttaaaagatacagtaggtccttcactagatattcttatcaagattatgtcaacagtatcgcttgtagcagctgtacttttctataattataatcttttatatcttatattcggtataagataaagtcaggactataatataagttgatctgacaaaggttatagattgaacatggtagtgaaggataaagtaaagattgctacattgctatgcaattcacacacttacatcataatatacataagcggaaaactatattcacagattattaatctgcatagtagtttccgcttattttatgcacaatttatgtgaaatttattcaaaataagtttaaaactgaataaaaaccaactaaacttagataatcagatatggtttattatttaaaaaagtggtagaataaataacataacatcttattattaaagaagaggatttataaaatgaaggtattggcatttcttacagatggttttgaaacagtggaagcgttagcagttatagatgtattaagaagagcgaagattaatgtaataacagtttctattacaggtgataagttagttgaaagtgcacagaatattaaagtccaggctgatagcctgatatcagagataaaatgtgaaaaagatgatgtgatgtttcttccaggaggaccaggacacaaagcatatgttgattgtgaagctttgactgatatgcttataacacataacaatgaaggtggaaggattgcagctatatgtgcagcaccaagtgttataggaaggttgggcatgcttaaaggaaagaaagcaacatgtttccctggttttgaagaaatgctgaagggggcagagcttgcatgcgcagatgtcagagttgtgacagacggcaacattacaacatcaagaggaatgggaacatctattgatcttggccttgaacttgtaagactattagaaggaaaggacgaagctgatagacttgcgcatagtacacagtatgtgaatgcataatgttgatttgggagttaagataaaagtatgaatgagtattatgattacgatgaggcattaaaagtaaatcgggaaagaaagcataaggctgcagcattaaaacgcaaaagacaggcacagatacgtcttataaaaagaaatatattatgtgcggttattcttgtagcattgacactgcttgttattcagtttttaagacacatagttccggatataagcagacagaatgagttaaaacaggaaatggtgttggctgatactggaaattatgatgatgtgataacggttgtacaggaaaaaccaacctttagatatgcattaaagtcggttatgtataaggaaatgacagatacggatatacagtcaccatatatagcgcttcttgatgttactgataatgagtttatagcaggaaaacagattaatacaaggatatatcctgcatctatgacaaaggttatgtcactgataattgctgttgaaaatataaaagatcttaatgaaacatataagtttggatttgatgaactgaattatctttatatagagcaggcctctgtggcaggctttagtgttgatgaggaagttaaagctaaggatcttttatatggtctggttctgccatcgggtgcagatgcggcttatggtattgcaaggctggcagcaggttcacaggaggcttttgtagagcttatgaatgaaaaatgtgatgagttaggtttaaagaatactcatttctgtaatccgtcaggacttcatgacgaaaaccagtatacaacacctgctgagatggctcttattatgaaatatgctatgagcaacgaagagtgtgcgaaggttcttggaacttatcagtatacaacagaagcaacaccgcagcatccgcagggaatatctcttacaagtactatgttttcaagaatgtatggaaatgaagtagaaggagtaactattaaagcaggaaagacaggatatacagatcaagcacataactgtctagtgaattatgctgttaaaggcgataaagagtatgtaacagttatggcagcagctggaaacagatggtatgttatatttgatggatttaagattcttgagcgttatcttccataacttaccataataatataataaggattacacataataataccaggataagcaataaagcttattcaataacaatgatacgtcataagacgtaaggacggaggtttattatggctaattcaagttcaacttcatcaaagactaaaaagaatgcacaggatgcactcgacagattcaagatggaagtagcatcagagatcggtgttaacttaaaggaaggctacaatggagatttaacttccgctgaggcaggttctgttggtggtaacatggttaagaagatgataaaaagacaggaagaacagatgtcgcagggtaactagaaatagtgcttaagatgttctgatagttttatgtttgtcatcagcatgtgacaggaaatgctgaaacatcacctgatatatgatagatatcttatatcaggtgatgttttttattgcttatatttttgacacttacatcatattatttataccaatatttgtttgagtctatatttaattatacccataggccgtaagtaggcttatccattttctggtccagtgtttccatgagaaatcagagcatgcataattatatccgtttctaagttcatttataatattttcgtctttgtgttctattctttttagaagctggtttaatatatctggcatagagtcaagagcctcaagtgaatatgtatggataccataatcacttttattttttaatacatatgtaaaataatcagatgtatcagacaggcagagacagccattcataagtgataaaggtatgcggtcgtgaataccgtatttaaaccaaggcatctgattaactgatatctgtgaagaagcatatatgcatggtaagctgttgtaagatacttccggtcttatatgaaggtatttagatatatcaggagcaagaatatcgcatttgtcagcgaaagcatcccatccatgtccatatattattatatcgatatgatttttgattatctgggtaatgatttcttcacgtatgacggcttgaagaaatacatcaacaagaaaattattatacaggtattcaacaggccgcatatctgtatttaagatgtctgcctctatcagttctttaacagcagcttcctgtgtgagtctgggcttttcaagaagaagcgtaaaaagcggatgattatcaagggaatgcctgctgctatatagtaaagacgttttgatgggatctgtgtaagtgcccgtgaatataagattgtcaggccgtttgaaatatccggataggactttgctggcattgtatgtgtatgaatctaaggaaccagacaaggaaccggaagtttgctgcagtaactggaagttatcagcagcaagaggcatgacatgtacgcttcttatgtgtggaaaactttcttttatcaatgctgcatggttcatatcaagacatataatgttaaagttgtgtatggtggcactgagagcttcataatgatataaaggatgatccagtatataatgccatataggaatattaaaataattcagcagatattcgttgttatatctgataacaggaatacgtgtattgatatcaataacagcatcatagtcagcatcaaaataaggcttcaatatggcgtaagccatatcagaagcctttggaacttttatatgagttacatgcatacctgcattgattaattcatctgagattcttttttcaaaataatctgttgaactataacatatatcttttgaacttagaaagagtatttttttcatatatttatttccttttttactttgctgttacattaaattctgcattataaaatcataaatatcctggcttgaatctttccatttgctgcacatttcttttgcctgttcctctaaaggtacatcaagatttaattcaataagcttgctgtttccttccttaaccataagatgagcaatatatgaaccattggtggtgcggtagtagtctgaggtggttccaacctcactcttaagttcatatttgtttgtgacaagatagttgtctatttcttccctgatagtctgggatatctttgtatagaaaaaagctacagtatcttcaccttcctgtgtcagcttatattgtgtgttattctcatagtttatctgttgtatgaatgaatcctcaacaagtgagttaatagtttcctgaaatgtaaaataattagtatattctttatcaagcataaaagtagatatctgtacattggaaagtggaaagtttactttacttagcatgtatagaatcataagcttgtatagagttgtcgaatcagtgttcatgtataattccgtccttggtagatgttattatctttaaaatactggttgagagtgtttaaaaccagtttcttattagcactccacataggagcttcaagcagggacttaggaccatcgcctgttatacgatgtatgaccatatcctttggcagacgtgctattatctgtcctacaatagtagtgtattcgtttaaatccagtgctttaaaagcaccattaatataatcagtataaagatctgtaccttttaaaatgtgtagaagctgaagtttaattccccatgcaccgctgtgtgcgatataatcggcagtttccaatatatcagaagtgctttcaccaggaaggcctattatcatatgtacaatagggtgaatacctatgtttatcagtctttttacacaattatcgtatgtatcaagagaatatccccgtcttatataatcagcagtattttcgtgtatagtctgcagcccaagttctatccatacaggctttatagaagcaagttcggatagaagtgataatatattgtcgtcaatgcagtctggtcttgtcgctattgaaagaatatcaatatcatttcttgatataactggcatataaagattacgaagataggacacatcagcatatgtattggtaaaggactgaaaatatgcgatataatgtccatcattatattttgctgctataagttctttggcttttataatctgttcatcgacagattgtgaaagtgcatatcctgccctgccaccggcaaaatcaccagaaccaccagcgctgcagaatatacatcctctagtgtcaattagcccgtcacggttaggacacgacataccaccgttcagggctaatttatatatcttatgaccatattctttttttaagtattcgtttagtgaataataatatggcaacattatctgatatgatccataacagctttagccacaacatctgtaacctgtggatcaaaagcttctggcagaatgtttgtatcagaaagctgtgattcaggtataaggtttgctatagcaagggcagcagcaagcttcatttcttctgttatctgtgtagcacgtccttctaatgcacctttgaatataccagggaaagctattacgttattgacctggttaggaaaatccgagcggcccgttcctacaactcttgcaccagcagccttggctatatctggcatgatctcaggtacagggttggccatggcaaatataatagcatccttattcatggttttaaccatatctgctgttactatattaggagcagaaacacctacaaatacatcagcaccaacaagggcatctgcaagtgaaccagttttttcttcaaggttagttacttccatcatagattcctgcatccagttaaggccttcgctctttttagaaagaatacctgacttgtcgcacattgttacattcttgaaaccatatgtaagaagaagcttggtaatagcaacgccagcagagccggcaccgtttattatgaccttacattcttctttggtttttcctgttaccttaagaccattgattataccggcaagcacaacgatggcagtaccatgctggtcatcatggaatacaggtatatcaagaagttcttttaatcttgattctatttcaaagcatcgtggagcagatatatcttcaaggttgataccgccaaatgcaggagctatattaacaactgttttgatgatttcgtcagtatcctgtgtatcaagacagataggcactgcgttaactccaccaaatgatttgaataaaacggcttttccttccataacaggcatagctgcatgagcgcctatattgccaagtccaaggacagcacttccgtcagatacaacagcaatagtgtttgctttgatagtgtacttgtaagcagcttccttatctttagcaataaccttgcaaggttcagctacaccaggtgtgtaagcaagagcaaggtcttctcttgtagtgatactcatcttaggagttgtttcgaactttccgttccattcttcatgaagctgtaaagctttttctgcattagtcatgatatatatgttcctttcattatataagtgaatcagtaatggtaaaattaacaatacaaaatactgaaaatattatcccaatattcatataatatcacaagctaaaaatatcatcaatataagtctttcatttctggaaaaaatattgtataatgagaaagaaatctaagatacacgtttcagtatcgtttcccagataacataacagtatgatcaacgattgatagaattattaagtttacgaaagcttatatacaaaagcaaagagctatgcgtaatgtgttggtattcaggaggttttgaatgagagaaaagttagaaacactttcagtaagcgtattgaaagaatttgcaaaagataagaatataaagaatatatctgccatgagaaaaagcgagcttatagatgctattctggctgctaacaatgaagaagagcagacacatagtaaacatgacgaagaaaaaacagttaaaaaagaagtgaaaagaagctcgtcatatgaaagaaatgcacatgccgcagatattgtcaatgatgaaaaagtatcatatgacaaccggcagcaggagaatagacagcaggaaagtactgatacagcagatatacaggaaaatgtacctgagatagctgatggtatattagaggtgcttcaggagggatatggatttatcagatgtgagaatttccttccgggagataatgatgtgtatgttgcaccttcacttatcagaaagtttaacttaaagacaggagatatcataagaggacctaaaagacctaagacacagagcgaaaagttttcagctatcagttttttagaaacagttaatggtcttagtcctatagtggcacaaagaagaagagcctttgaaactcttacacctatatttcctaatgaaagaatccatcttgaaaagaattccaacacaatagcaatgagaatggtagaccttatatctcctatcggtaaaggacagcgaggtatgattgtgtcacagcctaagtcaggaaaaacaacacttcttaagcagattgccaatgcagttactaagaataatccagaaatgcatcttatgatacttcttatagacgagcgtcctgaggaagtaacggatataagggaatctatagttggtgataacgtggaagttatatattctacatttgatgagcttcctgaaagacacagaagagtttcagagatgactatagaaagagcaaaaagacttgtggagcagaagcaggatgttattatacttcttgatagtataacaagacttgcaagggcatataatcttacagtgcaggcaagtggacgtacattatcaggtggtcttgatcctgcagcactgcatatgcctaaaagattttttggtgctgcacgtaacatgagagaagggggaagccttacaatacttgcaacagcgcttgttgagacaggaagcaagatggatgatgttgtattcgaggaattcaagggaacaggcaatatggaacttgtacttgacagaaagctttcagagaagagagtttttcctgccatagatatagctaagtcaggaacccgtagagaagatctccttcttaataaagaagagcttgaagcggttgatattatgagaaaagcacttaacggcttaaagaccgatgaagctgcagaaagaattcttgacttatttaccaaaactaagaataatgcggaattcgtacagactgtcataaagaatagaagagtgtaaaattttcaatttgaaaaatttatataaaaataaaatttgtgcttgcattatatagaacgctatgatacaataacaaagctgtttatcaaaatgataaaaagaaataaggataaatcatataaagatattgtaaagaggtgaaaataatgagagaaggaatacatccagcatactaccaggcaaaggttgtttgtaactgtggtaatgaattcgtaacaggatctacaaaggaagaaatccacgtagaaatctgttcaaagtgccatcctttctatacaggacagcagaaggctacatcagctcgtggacgtattgataagttcaacaagaagtatggtgttaataactagttatgagcatgaagttgaggttgtcaaaaacctcaacttttttactttatacgtttttaacaaaacaggaggtatgtgctatgaaaccatcaggtataggtggacaggctgttattgaggggattatgatgcgcaacaaggataagtattctattgcggtaagaaagcctgatcatgagatagaagttactgtaagagattgtaagctgcttacagaaaaacataaatggatgggatatcctataataagaggtgttgtaagctttatagattctcttataacaggaatatcaacaataaattattcggcatcattttatgacgatccagaggaacaaaaaataacgaaagcagatgagataggaaaatcactgtttaaagacaagtttgagtcagttttgatggcatttacagttatattatctgtatttatggctgtagggctttttatgctgcttccttattttgtttccagacttgtaaagggatacgtagcatctaaaacacttcttaactttatagaaggacttgtaagagttgctatatttatattgtatctgcttattatatctcttatgaaagatataaaaagaacatttatgtaccatggtgcagagcataagtgtattaactgtatagaaaatggtgcaagactcacaacagagaatgttatgaatagttcaagatatcataaaagatgtggtacaagcttcctttttatagttatgttcataagcatcgtgttcttcatatttataagagtggataacacagcacttcaggtagttataagattacttcttgttcctgttattgcaggtgtttcttatgagttcataagatgggcaggaaagaatgataacggattcacagttgttcttagtaaaccaggtatgtggcttcagagacttactacacgtgaaccagatgaagagatggttgaggtggctattaaggctgtagaagaagtgtttgactggaaggcgtttttaaaggaatattatgcccattcgcctaatcctgaggcagatatgcttgcatcagaggctaagcttgccatggatggagaacttatacacaaggctaaaaatacaagaaaaatagatgccagaaaggttgcacatgaggcagcaatggctgaaacaataagagcggttgagataaaatctgtatcaaacagtgatacaacatcagataccaaagctgctgatggaaaaatctctgatacagaaaaagaagaagtagtaatgtctgaaacacaagatacagcagatgccgttgagacatttgaagatgtaagaaagacagaagataatcttgaagctgctgatgtagctgaaagccaggatgatagtgcagaacagcagactaaggaaaatgaagaaacatcacaagatacagaagaagcacttccagaaggctttgaaatagaagaggaatatgaaactgtcaataaggtagaaggtgctgcaggcggtgagtatgcagtgacaacagaaaaggttcctgaaacagatgaatcagagaatatgacagtggaagaggttgaagctggctttgagatagaagagcctgaagatacagaagaagcagaagatataaacgcagatgatgtaccgttattcaaacagagagacagacactaaatatgatgatatacaatagtaataatataccagctatacacacatacaaagatgcagtaagatatggtgcaagggtgcttaaacaggcggatatagacaatccggattatgatgcattagagctgttcctttatgtgacaggcatagatagaacaacctatcttattaatgcgactgatgagatagacaatgaagccctgagaaaatatcttggatatataataaaaagatcacatcatattccgcttcagcatattatgggatacacatatttttatggaagaaagtatattgtgaatgaacatgtacttgtaccaagacaggatacagaagtgctggtagaagaagtggcaaagcttacaactgctgatagcagggtacttgatatgtgtacgggctcaggatgcattattatatcgcttgcatcgttgggacatacatatagcggtatacatggagcagtcggagttgatgtatccctagatgcattagaggttgcacagaataataaagatattaataatgtaccatatgttgaactgattcaaagtgatatgtttgaagctttggaaggcagtggaatgaagtttgatgttattgtatccaatccaccttatataccaacaagagttataaagggacttgatgaagaggtaaggctgcatgatccgtttattgcacttgatggagatgaggatggactgaagttttacaggattattactgataaagcaagagattatctaaataaagacggatatctgtgttacgagataggtcatgaccaggcagctaaagtcagtgatatattgtcttcatatggatataatgatattagagttataaaggatcttgcgggacttgacagagttgttgttgcaagatattatggtacgagtgtcagaagtggacgttataatatatagatagaatggagtcagaatactatgagcatgtttgatagattagaagatacattacgccgttatgaagacgtaacggcagagcttggtaatcctgatatagttaatgaccaggaaaagttcagaaaatatatgaaagaacagagtaatcttgcacctatcgttgaagcttatacagaatataaggcaagtaagcagaatatagaagatagtcttcagatgataagtgaagaaagtgacgaggaacttttagagatggcaagagaggaacttgctgattctaagaagaaggttgaagaattagagaagaagcttaaaatattacttcttcctaaagatcctaatgacgataaggatatcgttgttgaaatcagagccggtgcaggtggagaagaagcagcactttttgccgcagagcttttccgtatgtactcacactatgcagatactaagggctggaagatagaagtagttaatgctgatgaaactggtatcggcggtatgaaggaagtcgagtttatggttaagggacagggtgcatactcggttatgaagtacgaaagtggtgtgcacagagtacagagagttcctgtaacagaatctaacggaagaattcagacttcaacagcttctgtagcagttatgccagaggcagaggaagttgatatacagatagatgacaaggatatccgtattgacgttatgcgtgcctcaggtaacggtggacagtgtgtcaacacaactgactcagcagtccgtcttactcactatcctacaggtatagttatctactcacagacagaaaagtcacagatacagaataaggaaaaggcttttgcacttttaagagcaaagttatatgaccttgaaactcagaaagcacacgatgcagaagctgatgcaagaagaagccagataggtactggtgacagagctgagaaaataagaacttacaacttcccacagggacgagttacagaccacagaattggtcttacactttataagcttgataagattatgaatggtgatattcaggaaatcattgatgcctgcatagcagctgaccaggcagcaaagctggctaagatgggtgaagaataaaaaacttgattttactgggcattgaataaaatcgtaattgaaacggtctttgacaaagtcaaaagaccgtttttttgattgaattaaagcgagaggatgcttgtagattaattcctgaaatgtcagacatacaaatgtggtatcatgtttttaatatgttattatgaataaaggatattgaaaaaggacataattatggtataattagaccataaataaggaggtgtgtgttatgccacaaataattccaatcaaagacttgaagaatacatcagagatatctgatatgtgccataagacagaggagccaatttatgttacgaaaaatggctatggtgatatggtaattatgagcatggagatttatgagtcaacaatgagacagattgccatgtacagagatattgagatatctgaaaagcagatagaggcaggactagtaaaggatgccagaacagcactgaaagaaacgagggcaaagtatggcttataaattaaatgttaccgagtatgccggtgaattgcttgataatattatgtatcatttgatttatcgtttaaggaataaacaggcagcgaagcatttgttagattgtattgatgtaatctatgatagattagaggtcaatccttttcaatttgcagaatgtagagattcatatcttgccaggaaagggtatagagaagcagttgtgccacagatgaattatattatcatttttgatgtgagagatgatgttgtaaatgtagttggtattttccaccaattagagaattatcaaaataaattgtaatatatttatgatgaatcagagtcagtcgaagggctggctctaattttttgcccttttttcatagtcaggcaaataactgtatagttcaaataacttttcaagaataatttcaagaatgagccgggaagtgtgtttaagcttaatggcaaagaatatgtgttaagcgagaaccatacattggatattccatacggagaagatttgtggtgtttggaatctacgtcaaattatagatatggagaaaagattgattaatttctgagagtttatctatttgtgttgtagctatcaacaaaaagggatatttacatcgtgttatagtacatggtgtaggtatcatttttgtatatcttctatatttgctacataaaaaagtgcaaatgcgcaaaaaatagtaatggccattgaagtaaaaataatttagtggtaaaataacattaccaaaaatagtgcaatgcacaaaaacaaggaaccatattatggagattaagagagattcataccttgaacagttaaagataagaaaagataacggaatgattaagattatcacaggaatcaggagatgcggcaaatcattcctgttatatgtgttgtttaagaagtatttacttgagagtggcatagataatgaccacatcattgagattgctttagatggcattgaaaatgaggaactgagagatccaaagaagtgttatcagcatattaaagagcgggtggaagatgaccggaagtattatctgctcttggacgaagtacagtttatgccacgatttgaggaagtgctgaacagtttgcttcgtatcagtaacattgatgtgtatgtaaccggcagtaattctaaatttttatctagtgacattgtaactgaatttagaggcagaggagatgagataagaatttatccgttgtcttttgcagagttctatgcggcttatgatggagattatgatgatgcttgggaagaatatatgatatacggtggtttaccacaagtggcacaattttctgtagaacgccagaaggctgagtatcttaaaaatatttttaccaatgtttatatcaaggatgtggtagagcgaaacaaaattcaaaatgttgatgagattggaactttggtggacattcttgcttctgccataggagcacctaccaatccaacaaaaatatcaaatactttcaaaagtgagagaggtatcaattacagcaataaaactatatccaatcacattgattatttggcagaggcatttttgatttctaaagcgtaccggtatgatattaaggggagaaaatatgtaggagccaatctgaaatactatttttcggatataggacttagaaatgccagactaaacttcagacagcaggagccgactcatattatggagaacattgtttataatgagttgcttgtgcgtggctacaatgtagatgttggtattgtggatgtatttgcaaagaatagtgacggaaagagagttcataagcagctagaggttgattttgtagtaaaccagggcagtcagagatattacattcaggtggcttatgatatgacttctgaggaaaagcaaacacaggaacttaattcactccgaaatattccggattcatttaagaagattgttatagtaaatggaacaaaaaagccttggagaaatgaggaaggctttgtgatcatgggcatgaaatattttctgctcaatgaggatagtttggagttttagtatggaagtagataatatattcccatatagaaatatggatataaagttaggaggcagagaaatggcaacgtgatagaagatatacgcatgaagaggtttttaataatcttaaaaggatgccaaaatagcacttgaaaaaatcatgataaagtatggattaaaatagtaatatgcttagagtgaatcagagtcagtcgaaagactggctctgattttctgtatatcccataaagcttacatgataattatatttgcacacgaaagatcattgctaagatcatacacgattccggatttgataccaacaacagttggacgtagtatgtaatgtgcattgttttttacaactctggcacgttcaccgttgcttagttcaacgatagaatcaacaggatataatattatactttcaaggaagcttttcatagcagtaatgtcaagttcctctgtcatagacataatcatttcaactgcatcacgttgtgaaaatgcagacttatatggtctttctgttacgagtgcatcatatatgtcggtgacggtaaggattttggcatagctggttattttatcacttggaaaaccaagcggatatccgtggctgttcattttctcatgatgctgaagtatagccaggcttatttcgttgctgaactcatttttatcatttatcatatgatatccaaatacaggatgctgcttcataacagcgaattcctcatctgtaagtttacccggtttgttaagaatctctagaggtattttggttttacctatgtcatgaagaagtccagcaactcctatttcatatatctgcttctgtgataagccctgttgttttgcaagtatcatagacatagtagcaacgtcaacgctatgcttaaaggtatattcgtcacttgtcttaagtgcgttaatatctatggcaatggcatcattattgttgatggctgtcataaggttagaagctatattgttagtggtatctgccagctggtctgatccagcattggcatagatatattgtattccctcagcaacacgcgttttaacactattggaaagctcaaccttggagcggtcatcagtacgaagacgttcaatctgctttctggcctgtggcgatatacttttttctatatcatcatcagattcttcacctgtctggatatataccatcataatgcccatcctaaggagcgattcaatgacgtaattatcaagaatggatcctttttgaacaaggtttcgtccagcacggtctactactgactggtcgattttcattccctcttttagttgtcttgttcttactaaacgtcttataatcatataataagttctccatgctggttcaattgttacagcttctataatgtattcataaataaagtttttctacatcatttgaataataattttcctagttaagatattatataccaattataagtaaaattctatatattttcattaaagcagctttacaaaaataagtacaaaaattgaaacaattaccagcttttcatattttagccacaaaataaccattgattctattaatgatataaagcgtgaggctgatactaacagtaatattggaaacaggcttacagagtatgtcagagtgtttaagcaattctagctttggatattattgaatttgattattgcctgacattttacagatatatgtttttagtttttagagcctggtatgtttttacatttttagagctttgacacttttacaagattatattatactattctgaatggaggaaatagtgtgatatgaagaagtcaaatgctttggcgttaatgccaatacttgtttttttaatattatatctggggtttggaattgtatttgagtatgttatgaaaattcctatgggtttttataatattcctattatagcagcatttcttgtggcaattcttgtagcctgtatgcagaacaaagatgtagcttttgataagaagcttgaaataatggcgtcaggattagctgataagaatataataacaatgattcttatatttcttacagcaggtgtattcgtaggagtggcaggaagaagcagtgcagagagcgtggcatattttatgcttgatataataccagccagattcgcagtagcagtactttttatagttgcctgttttgtatcaactgctatgggaacctcagttggaactataacacttattgttcctattgcagtagctgtatcagaggcttcaggtttttctgtacagctatgtatggcatctgttatgggtggagctatgtttggagataatctttcatttatttcagatacgacgattgctgcatgtaatggacagggatgtgctatgaaggataagttcagggagaatttctggattgcattcccagcagcagttgtgacactgattattattctgttattgtcatttggaacggatatatccggaagtgtgacacacgattataatcttatccagattattccatatgtgcttgtgcttattggaggcatagcaggagttaatgtgtttagtgtgcttcttattggaatagtatcaggaataattattgttctatcaactggtaatataggagcttatgaacttattggaaacataggctcaggtttatcagggatgtttgaaacaagcatggttgctatacttgtttctgctctatgtgcactcataagggaatatggaggcttcacagccctgcttaatggaatcaagaaaacctttaagggaaaaaaaggtggccagttaggagtaggtatacttgtaggagctatggatatagcaactgcaaacaatactgttgccatagtcgtggcgaatccgatagctaaggaaatgtcagaggaatatggaatatctaacaggaaaacggcttcgctgttagatacattttcatgtgtgttccagggcataataccgtatggtgcgcagatgctggttgcaatatcggcggctaacgagcttggatattcgatatcagcgtttcagataatacctgttttattttatccatttatgcttcttataagctcactaatctggatatgtgtaataccagcggataaataacagagactaatataattaagaatgtgaaaatgtgaacataccttaagaaactgcttatactaagctggcaggacctagggtgttatatacgacaacagggataaggaacgatatgaattcaataagtaatgatatggtaaaaagaaaaaatattattctaataggaatgccaggcagcggcaagagtacattaggagtagtgcttgcaaagaaaatgggctattccttcatagattcagatatagtcatacaggatacctatggctgtacacttgaggaactgatagacaagcatggtgatgcaggctttataaagattgaaaatgatgtaaactgttctatatcaccagagcatacgattatagctactggtggaagtgctgtttatggaaaagaggcaatggagcattttaaggaaataggaactgttatatatcttaaggtgtctgaaaaggagcttgagtcaagacttggaagccttaaagagcgtggagttgtatcgaacggtaaaacaactattgaggaaatatttgaggacaggaaaagactgtatgaaaagtatgctgatattgttattgcacaggagggcatggatataagaacgatagttgaggatatgtattcaagaattaaatttatgaattgaatttatgagttgagtttatgaataaatttattcaattaaatattgatttattgtggaaaaatctcgctttttgtattaatatatttatagttttgtatgatttttagcatttacattataatgtattaattacaaggagggagattttttaaaatggaagagattaaggctggaaataagtacaagtacacagaggaaacggaaagatttaaaaaaatgaacagattttatatagcagcgacatctgttttgggatgtatatttatattatatctgtggttaaagctgtcctgtaatgctatatcacctataactgtatatggtaatacagttcttattgctgtatttgcaatagccaatattatcgtgcatgtaaagaataatgaaacaagaaagttaaaagctatggctacatgggaggtatgtatagaatatctgcttattggtgttcagactagtgcaacctttataagctatgcaattataataatatttatattacagattccttattatgagaagaagtctttgaatagaactgcaataggcacattgattatatatattatagttatgagtgtacaggcatcaaagggaatatatggcaatgatgttaatgcagtatgtggaacatttattgttattcttacaggttttgtaatacttcaggttggaaagctatgtatactgtttaatgatgacgcagttggctcagcaagagaagaacatgataaggtaaagaaggttcttgatgatatgcttgaggtatcacagactgttaataaggaaactgatgaaagcagaaacattatggatcagcttgtaagtacaacagagaatgtaacaagcaatatgaaggaaattactgctgctacgaatatgactgctacaagcatagaagaacagaatactatgacaacatctatacagcaggctattgagcacacaggcgaagtatctaatgcgatggtagatattgcaatggattctaatgatagtattaaaaagaatatagaaatcatgacagagcttaagacacagtctgcgcagataaaggatactaataagtcggttactgattcaatgtcaaagcttcaggagaaaaccaaagaggttgagaatatagcggatatgattcttaatatatcaagccagactaatctgcttgcacttaacgcttcaatagagagtgcaagagcaggagaggcaggaagaggctttgcagttgtggctgagcagataagacagctcgctgagcagacaaagggctttacagaggatataacaaagataatatatgagcttaatgccaatgcagaggatgtggtggaatctgttaggatttctgtcaatgcggccgatacgcagagcgataatattaattcagcttcacagacgtttgaacagcttaatagtaatatgtcatcattagtagagcatgtggaggaggttaataaacagataacaggtctttcggcttccaataacagaattgttgagaatatatcacagctctctgcggtgacacaggaggttacagttaatgcagaacaggtgcataatctgagcgaacagaatcttgaatatgctgagcaggtaaaacaggcggttgaacatataagaagcacatctgaaaagatgaatatggcataaagatttataaataatatagagaatgtttataaataattctgtcttggttaaaataattaataaaatggttgtaaataatataaagttgttataaaattaacacaacatataatcagtaatatgatcggaggcgtgttaatatgttatttcaactttatggcgatggcactatctataagcttataggatgggtgcttgtattcgcagggcttgttatatgtaacgagcttgcaagacgttcaaagtttggtggattattattctttgtatttattcctattgctttgacagtttatttcgtggctatccagataggagctgcaaatggtgcttcatgggcacttaataaccagacatacaagtatatgaatggatggttccattatgccaagctttatgccgcaacagcaggctgtattggctttatgatgcttaagtataagtggagcataggtaaaacagagtggtttaaggtattcccattcttaattgtcgctattaatattcttattgctgtatgtagtgactttgaatctgcaatcaaaggcggaatgaatggtggctggtggttttctaacgaaggtgtatggctttacggtggctggtggaactggcttaacggtattgcaggtcttattaacatcttctgtatgactggctggtggggtatctattcttctaagaagaaggatgatatgttatggcctgatatgactatatggtttatagttgcatatgatatatggaactttacatatacatataacaacctgcctactcatacatggtactgtggtgttgcattacttcttgcaccaacatttgccaatgctttatggaacaagggtggatggatccagaaccgtgctaacacacttgcaacatggtgtatgtttgcacaggtattcccacttttccaggtagatggaatatttgctacacttcctgtgctttataagtatacaggagcagcaacaggcatggagctttcaaagcttacattagagcagatgaatgctgcaggtgcatatccggtagcacagggtgttatgtctatacttgcagttgtggctaatgtcatctgtatctcagttattataaagagagcggttgagcagaagaagaacccttacaagaatgagatatttgcgggaaccagagattatgaccaggctatggacagagcctgatggcgtgtattaaacagaattaaaagagttatatatttaggttaacttatgataaattaattgattatatgagacagaagaaactgttgactgttttctattatatatttagtatatatacatggaaatagttcgacagtttctttatttttatggtatactaataagagaaataagtggaacgcaaagtaattgcgtgatctgcagctattagctgatgcagttttataaaggagatgatattatgattaagaagattaaaggaattaagattgaactgataattatttctattgtattatttgctcttggactttttcttgttatatatccagagctttcgcagcttattatatgtaaggctgttggaatagctttatgtgtatggggtgtgttaagactcataacatattttagtatggctaaagaggaaatatttggttcgtttggattggtacagggtatttcattgttagcattcggattattctttgttatgaaaccagaggttatagctatgttttttggaacaatccttgcaatagttattattattgatggaatacttaagcttcagtatggaatagagttttaccatatgaaagctgataaatggtggatagaggctgttgtagcagcatttatggtagttatgggtgtgattgcattatttaatccatttgattcatcagtagcacttatgatattcataggaatagtacttatggtagaaggtgtatcagatctgatttctattataagaatatcagcttttgtaaagaagttaaaggatatgtaaagagcaatgtactgatataatgttaaaccgtatatcaaagtcgggggcttttgaccacgacatcatacaataagaatacagtcagataaagtgccaaagctaagcacgaacaatagtaagggagaataaacatgtcagaaaaggtaatatatgccgcaatacttggggcaggaacagtaggaatgggaacttataagctgtgtcaggcaatggaggatgagataaagcataaaacaggtgccagacttgttattaagaagattcttgtaagaaatatcggtaagaaaagagatggtattccagaagagcttcttacggatgactgggcagatatcataacggatgaccagataagcattatagtagaacttatgggtggtatccatccggcaaaggattatgtgcttgatgcacttaaggctggaaagcaggttgttacagctaataaggatcttatagccgaatatggtgaagaggttggcaatgcagccaatgaagctggtgcagaccttcagtttgaggctgcagtagctggtgctattcctattatcagaccattgaagcagagcatggcgggcaatcatattactgagattatgggtattgtcaacggcactacgaactacatccttactaagatgacagaaagcggtatggattatgcggaggcacttgccaaggcaacagagttaggatatgcagaagcagatccaacagcagatgttgaaggatatgatgccggcagaaagatagctattatggcatcaatagcatttaattcaagagtaacatttgcagatgtatatacagaaggtatcacgaagatatcagcagatgatataaagtatgctaaagaattcggatatgttattaaacttcttggagttgcaaagaatacagatgatggaatagaagttaaggtacatccaatgcttataccatctaatcatccacttgccacagttaatgatgcatttaatgcggtttttgtgcatggacttgccatggatgatgcgatgtttatgggacgcggtgcaggacagatgccgactgcaagtgcggttgttggtgatattatagatgtatgcaggaatatagtacatgattcatgtggaaagataggctgctgttgttataagcaccttaatgtcaagaatatagctgatacaagcagcaagttcttcttaagattagagatagctgacagatcaggtgtgcttgccaatatagcaagtgtgcttggtaatagtggagtaagtatagcccaggttgtccagaagaaaagcaaggatggtgtggcagagcttgtcattatcacagatgaagtaaaagaaaagcactttaatgatgccatggctgtatttaagggactgtcagctgttaagaatattgctggagttataagagtatactaatctggaaaggtgaataaaataatatggcatcgaaatattatgcggtcagaaaagggcgtaagccagggatatacaggacatgggatgactgtaagaaccaggtgtttaagtgtgagggagcagagtataaaagctttgccacagaggcagaagcatatgcttatatgggtgctgtcaaagatatagcacaagagggcgagagttatgcatatgttgatggttcgtttaacgcagccacgggtgtgtatggatttggtggttttcttatgtataaggataacaagtatattctaagtggttctggtgatgataaagagatggcatctatgagaaatgtggcaggtgagatacttggaagcatggcagcagtacagaaagctatagaacttggtatagaaagcatagatgtttattttgattatatgggcataagagcatgggcgcttggtgaatggaaaagaaacaagaagggaaccatagcatattatgactatatgcagtctgttaaaaacaaaataacagttaattttgttaaggttaaaggacattcaggtgtggaaggtaatgaagaagcagacagactggctaaaaaggccgtcggtattctttaaagcagattttattttgtaagaataaagtaaatatcatgtaaggttgtgtgaaattatcagataatgattgacatacacttttaatatatgatacaatccgttcgtgtgagtcagtaaatatataatcattatatatgatttcatacaaatatgaccacttatacatttgatgtatacaatatatacatattacgtctggtataagttaagcctaacggacaggcgggtcggttgccggtgtggtaaacccacattattgttattgattgggcggtaagccctgtttataagttgattactttataatctgtgccaagcacatcatcttgtgaaacggtcaataaagagtgacgcatatttgtatgtcatagatactaagtatgagtataattatctatgtatatattcgctgatttccttaaataattggtattaattccagatttatgtatagtttatgtacattacataaagggggttaaaccagattagaattatgatcagactatagagatggttgtgtaaaatgcacgactgtctcttttttgttttgctgcttaatgcggatattaagcttaatttctttaagtaatttctttaagtatatagcagtagttcacaggttataaagaaaatataatcatccagggataatgtattctggacctggaagctattattatatatgggaatggagataaaagaatgttagatgaccagacaagagctccgatatacgaggcattggaaagattaagaagacagagagttgttccgtttgatgttccgggacacaagagaggaagaggaaatccagagcttgttaatctgctgggagaaaagtgcgtaggaatagatgttaattccatgaaaccacttgataatctgtgccatcctgtgtctgttatacgggatgcagaagaactggcagctaaagcctttggtgcagagaatgcttttcttatggtaggtggtacgacatcagcagtccaggcgatgatactttccaactgtaaaaggggagataagataatacttccaagaaacgtacataagagtgctatcaatgcgctggtgctgtgtggcgcggttcctgtatatgttaaccctgaggttaattctgaacttggaatatcgttagggatgaatctggattctgtgaagaaagcaatagaggataaccctgatgcagtagctgtattagtaaataatcctacatattatggtatatgttcagatatatgttccatagtaagctttgcacatgaacatggcatgaaggtgcttgcagatgaagcacacggcacacatctttacttccagccagatcttccggcatcagctatgaaggctggcgctgatatggcagcggtctctatgcataagtcaggtggttcacttacacaaagttcgatacttcttaccaataaaggagtaaatgcagactatgtaaggcagataatcaatcttacacagacaacaagcggatcatatcttttgcttgcaagtcttgatatatcaagaagaaatctggcactaagaggcagggagtcgtttactaaggttatggaaatggctgaatatgcaagaaaagagattaatgacataggcggctactatgcatatggcaaggaactggttaatggtacaagtgtatatgattatgatgtaactaagttgtctgtgcacacacttggtcttggacttgctggaatagaggtatatgatcttctgcgtgatgagtatgatatacagatagagtttggcgatgtgagtaacatacttgcttatatatctattggagacaggcttcaggatattgaaagacttgtaggagcacttgcagatatagcaagaatctataaaaaagataaaactggtatgctgagtggggaattcataagtccgattgtggagaagtcccctcaggaagccttttatgctgataaggaatcacttcctattaaggatacaaagggaagaatatcaggcgaattcgtcatgtgttatccaccaggaatacctatacttgcaccaggtgaaatgataacagaggagattatagagtatatattatatgttaaagaaaaaggatgctctatgcagggtacagaggatcctatggtgaataatctcatggtgcttaagaatacattttagttaaatagtgcgctgaaaagcagcgcaagaatggaggcttattatggaaatgtggttttcagagctgcacacaaccaatgttaagctgtcaatgaggatagagaggcagctgtgttcagtagaaagtgactgtcagagaatagatgtacttgtatcagatgagtttggaaagtttttagcacttgatggagagattctgttttctgaaaaggatgagtttatatatgatgagatggttacacatgtacctatggctgttcatccagctgttaagaatgttcttataatcggtggtgcagatggtggcgttgcaaaagaacttattaactataagactatagaaagaatagacgtagttgagcctgatgaaacgctggcggaggtctgccgggagtattttccggagcttacatgtggactggatgataaaagagtaaatgtatatatacaggatgggctgcgattcttaagaagcaagacagatgaatacgatcttataatcaatgatgccacagaccctttcggatatactgaagggctgtttacaaaagagttttatggaagctgctataaggcgcttaaagaagatggaatcatggtataccagcatggaagtccgttttattcagaggacaaagaagagtgtgtgaaaatgcatagaaaggcatatcaggcgtttccagtaagccgtgtataccaggcacatataccgacatgttcatcaggttactggctctttggctttgcatcaaagaaatatcatccgttaactgattttaaaccggatgaatggaagaaattaggaataaagacaagatattatacaactaatttacatagaggagcctttatgcttcctaaatatgttgaggatatgcttgaggaagaggaacgttaattacatcattaaataaataattaaacaggtgttaaaggtaaacctggatagaatatcaggaggataaggattatgagcagattattaataataggatgtggcggtgtagctggtgtggctatacataagtgctgtcagaacagtgacgtatttacagaaatatgtatagcaagcagaactaaaagtaaatgtgatgcacttaaggaaaagctttcaggtaaaacaagtactgttataacaacagcacaggttgatgcagataacgtggatgagcttgtgtctcttatagagaactataagcctgaagcagttctcaatcttgcacttccatatcaggatcttactattatggatgcatgtctgaaaactggcgtgaattatatagatacagcgaattatgaggcagaggatacagaggataaagagtggagagctatatatgaaaaaagatgtaaggaagaaggcttctcagcctattttgattattcatggcagtggaattacaggaaaaagtttgaagatgcaggcataatggcacttcttggaacaggctttgacccaggtgttacaagtgtattcagtgcatatgcacttaagcattactttgatgaaatagaaactatagatatactagactgcaatggcggcgatcatggatatccatttgcaactaactttaatccagagataaacttaagagaagtatcagcaccgggctcatattgggaaaatggacactgggtagaggtgccagctatgtctattaagagggaatatgattttccagaggttggtatgaaggatatgtatcttcttcaccacgaagagatagaatctcttgctaagaacataccaggtgttaaaagaataagattctttatgacatttgggcaaagctatcttacacatatgaaatgccttgaaaatgtaggtatgttaagaactgatccagtaaaggtaggaaatgttgaagttgtacctatacagcttttaaaggaactgcttccagatcctgcaagtcttggtgagagaacagttggaaagactaatattggatgtatatttacaggtaaaaaggatggaaaggaaaagaaaatatacatatataatgtatgtgaccatcaggaatgttataaggaagtagaatcacaggctatatcatatacaacaggtgttcctgctatgataggtgctatgatggttgttactggaaagtggaataagcctggagtgtataatgttgaggagtttgatccagatccatatatggaagctcttaacaaatggggacttccatgggttgttgaggagaacccggtattagttaagtagtttaaaatacgagaggcttaaaagataagaaacttaaaatataagcagcttataatgtgagcagcttaaaaatgagaagataaaaatatgaattccaggagaaatgaattggatacagtagtatttaaagatataaaaacaccatcatatgttatagatgaaaacaaacttattcacaatctaaagattcttaatggagtggaaaaagaaactggttgtcatatacttcttgcacagaaagcgttttcagcttatgccatgtatccgcttataggtcagtatataagcgggacaacggcaagcggattgtacgaagcaaggcttggaaaagaagagatgaataaagagaatcatgtttttgcaccagcatataagcaggaggatatggatgaacttgttaagatatgcgaccatattatatttaactcagtaaaccagcttaaaaagtataagaaacagtgtctaaaagcaggagtaagcataggattaagaatcaacccggaagtatcaacgcagggtgagcatgctatatatgatccatgtgcagaaggttcaaggcttggagttacacttaaggcacttaacaaaggcatagatgaggatgagcagcttcttgaaggtgttgatggattgcattttcatacgctgtgtgaacagaattcagatgatcttaagacaacacttgatgcagtagaagaaaaattcgggaaatatatgcataactgcaggtggattaatatgggtggaggacatcatataacaagagaagattatgatgtcaggctgcttattgactgtgtgagacatgtgcaggatacatatcatgtaaaagtgtatcttgagccaggagaggcagttgcactcaacgcaggatatcttgtaacagaggtgcttgataaggtggataatggcatagaaactcttattttagatgcctcagcagcatgtcatatgcctgatgtgcttgagatgccatacacgccgcctttatatggagcacagatagtggcagatatattaaagacacaagaggcacataaggatgcacattttgtatacagactttcttcatatacatgccttgcgggtgatattataggtgattatgagttcgaccatgagataaatgtgggcgacagacttatatttatggatatggctatatattcaatggtgaaaaataatacatttaacggaatgccgcttccatctatagctgtgctaaaagatggaaaactaagtctgattaaaagcttcggatatgaagactttaagtgcaggctttaatatagcagatatggcatatatgccagctgtgggttatataagattataaggaataaaacagatgagtattataaattcaactccgtcacatgatggatattacatgccggctgaatatgaaaagcatgatggcactattatgatatggccggtaagaccaggttcatggcctggtgaggcagcagcggcaaaaagagtgtttaaggaaatagccgggcatatcgcccagtctgagaatatgtatatgcttacagacagtgagcatatgacagaagcagagcagatgttagacgataaagtcagggttgttaacatagagacagatgatgcgtgggcaagagatatgtgcccgacattcgtaaagaatgcatcaggagatatacgtggaataagctggaagttcaacgcatggggtggagaatatgatggcttgtatatggactgggaaaaggatgatatggcagcaggtctgttttgcgacatgatggggatagattattatgatgcagctccatttgtgcttgaaggcggttctatacatagcgacggtgagggcactgttatagtgactgaaagctgtcttttaagtaagggcagaaacccacagcttagtaaagctatgatagaggataagcttaaggaatatcttggggcaaagaaggttatatggctgccatatggaatatataatgatgaaaccaatgagcatgttgataatgtgtgtgcgtttacatcgcctgctaatgttgtgcttgcatggacagatgatgtgaatgatccacagtatgatatgtcatctgccgatcttaaagtgcttgaagctgaaacagatgcacttggtagaaaaataaaggtgcataagttatatataccagatgagcctgtgtgcataaaagaagaggatcttaagggttatgtgtttgcagaaggtgaagataacagggagcttggagaaagattagcagcaagctatgcgaatttctatatatctaatgcgaaagtacttgttccacagtttggtgataagaaggataaggatgcgatagaactgttatcaaagcttatgcctgacagaaaagtaaccggtatatatgccagggacataatagttggaggcggcaatatacattgcataacgcagcagattccagcaggcataaagaaaaacatataaaatgtggataaagaagaataaaaaaccatgtagaaatggagattgataatatgagcagaataactggagttgctgctatacagatgaagtgtggcagagatgttttggaaaatataaaaacagccgacagacttgtaagggatgcagttaaaaagggcgcagatataatacttcttccagagctttttgagaggcagtacttttgtcaggaaagaagatatgaatactatgaatacgcaaaaagtgtggacgaggatgcagctgtagtgcattttacagaggttgccagagaattaggcgtagttataatagtcagcttttatgaaaaggatgtaaaccagctgtataatacagttgccgttatagatgctgatggaacaaggcttggcatatatagaaagacacatattcctgatgatcattactatcaggaaaaattctactttgttccaggcaatacaggctttaaggtgtttaacacaagattcggctgcataggtgttggtatatgctgggatcaatggtttccagagacagcaagggctatggcagtagaaggtgcagaggtgcttttttatccaaccgctataggaagtgagccgatacttgactgtgacagcatgatgcactggagaaggtgtatgcagggacatgcagcatgcaatcttgttcctgttgttgcagctaacaggattggtgttgagactgttaagccatgtgaagagaacggtggacaatcaagttcacttaaattctatggttcttcctttatcactgacaacacaggtgatataatatatcaggcgggcagggatgaagaagaagttatcgtccataagtttgatcttgataagctggcatatgacagactttcatggggattattcagggacagaagaccagaagtctataataaagctataagtaaagaacttattcagccctagatatatagaaacgaggatgattatgaaaaaactggttattggcatgcttgcacatgtagatgctgggaaaactacactttctgaaagtatattatacacttccggagccataaggaagcttggaagagtagataataaagatgcatttcttgataataatgactatgagcgtcagagaggaataactatattttcaaagcaggcatgctttagttataaggaccttgatgttacattgcttgacacacctggccacgttgacttttcggcagagatggagcgtacgttatgggtgcttgattatgcggtgcttgttatcaatggaatcgatggggtacagggacatacagacacattgtggggattgttaaaaagactgcatgtgcctgtttttatatttgttaacaagatggaccagcagggaactgataaatatagacttcttgaacagcttaagaataagctgtcatcaggctgcatagattttaccggatatatgaagggcgttaaacctgactatgaggatatagcaacatgtagtgaaggggcgcttgaagaatatcttaaatattcagaggtatcagatgaaagcataagcaggatgttagatgaaagagagatatttcctgttatatttggttcggcattaaggcttgatggagttgatgagctgcttggtgtgatggacagattctgtagcagcagggaatatggtgaggatttttcagccagagtttataagatatcaagagatgaaagaggagaaagacttacacatattaaagtaacaggtggctgtataaagagcaaggatattataaatgatgagaaggtcaatcagataagagtatatagcgcggataaatatacagctgttcaggaagctgtagcaggaaacatatgcgcacttacaggactgtcagacacatacgcaggacaggctataggagatgagaaggaagacaattcgccagttcttactccggtgcttaactataagataaaccttccagcaggcgttgatcctatgcagatgcttccaaagctcagggctatagaggaagaagagccacagctgcatatagaatgggatgagaattttaaagaaatacatgtacaggttatgggacctgttatgatagaagtgcttcagaatataattaaggaaaggtttggcatagatgtaacttttggagagggcagtattgtgtataaagaaacaattgccaacaaagttgaaggaatcggacattttgaacctttaagacattatgctgaggtgcatcttatacttgaacctggtgagcctggaagtggtatgagatatgagcttgactgcagtgaggatgtgctggcaaagaactggcagagacttatatatacacatttgtgtgaaaaaacacataagggtgtactgacaggctcggcacttacagatgttaagataacagttgctgccggacgggcgcataacaagcatacagaaggtggagatttcaggcaggcgacatacagagctgtaagacaggggcttatgcaggctgaatccgttcttcttgaaccattttatgaattcgagatgaagcttgacagacaatatataggcagggctatgacagatcttgaacgtatgggagcagtatttacgattaacgatactggagaagaagtgcttgtaacaggctgtggtcctgtgtcaagccttgcgaattatcaggcagagcttacagcatacacaaggggaaccgggagcataaatcttaggatgtcaggttacagaccatgccataacccagaagaagttatagaaaaaataggctatgatgttacaagagatataaggaatacaccggattctgtattctgcgcacatggctcaggttttactgtcagctgggatgaggtatcggaatatgcacatgttgatagtgttcttaatccaccaaaaacgtcagatataaatgaacctatgacatcaaagcaggcagcaaggactgtatcagaagaatggataggaactgatgaggttgacaggatactggcagaaacttacttttctaacagcagaggcgataatgaaagaaggaagctgtcaaaaagaaaatcatcagatcagcttggacaatatgtggcgttaaagcagtctgacagacaaagaacagcaaaggctatgggagtaagctatcttttagtagatggttataacataatccatgcatggaaggaacttgatgggctggctaagatcaacatggacagcgcaagagacaggctgcttgatattatgtgtaactatcagggaatgaaaaagtgtgaactgatagttgtgtttgatgcgtacagacttgcaggacatgcacaggagtatattgattaccataatatacatgtagtatatactaaagaagcagaaacagcagatcattacatagaaaagtttgcacatgagaatggaagaaagtataatgtgactgttgcaacatccgatggacttgaacaggttatcataagaggtgccggatgtcttctttattctgcaagagaattcgaggaagaagttaaagccatggaagaatatataagaagagaatatctaaataaaagctattaataattaatgtgagtgcctgagctaaattctgccactcacttgtttatgaaagaagaggtttgattgttatgagtacattatgggttataggtgattcaacacttagtagtttcaaagacaggtattattatccaagatatggatatggaacaatgcttgataagtatcttaatgataatgtgagggttgttaatatagctctttctggaagaagctctaaaagctatacgacagagccacagtataaggaactgcttgatggcatgaaaaaaggtgattttcttatcataggatttggacataatgatgagaaaacagaggagtcacgctttactgatgcgaatggagattataagacagaaggctcatttgcacattccctctacgaaaattatatcaagaaggcagatgaggcaggctgtaaggtgattctttgtacacctatagtaaggagaactcctacaggagaatgggatgatactctgttacatataacgcaggatgtcggggagtttaaaggcggcgattatccagaagctgtaagaaagcttggaagtacacttgacataccagttatagatatgactgaaaagactcacaagatgtatgacaggctcggtgctgataatacaatatatcttcatgcatggccatccaataacaggcttagtgtagataacacacataccaatatatggggtgcaagagttaatgcttatatggttatgtcagctattaaagattcagatatagcaggactatctgaaaatatagtgaatttatctgaaaatcctttggaatataaagaaaagtatcttgtatcaaatgctgattataagcctgtaatatttagtgataagcttgaagagagcaggctttttgaagattatggtgaatataagggtactgtttttggtgatgttttaaatgatgtaagtaaggagaattttacacttgaagcagataaagatggcaacatgcatatagctgtcagaaacaattttggtaagatatcagttgttacagatggaatagctatgtattacagacaggtagatgttaataagaatttcacactaagagcgaaggtaagagttaataagatatttttaaacgaccaggtatcgtttggacttatggtaagggatgactgttatattgataagtgcatgcctgacattttaggcgattatgtggcagcagcacctctgtgtgttacaagaaaagagaatacggtaggaacttatgcaagaaaaagtggtgtgcttgtatatggaccagcaacaggtatcgcgatagaagaaggaaaagaatataatcttatacttgcttcatcacaggatggatatatggcaaagtttgcggatggacctgaagtaacaggagggtatgattttaagcttactgctattgatcctaagcatgtatatgttggtatgtttgcatcaagaaacgttgatgtgacattttcagatatacattttgaaatctgagcagtaaccaatatataaaaaataagtaaattattatataacaatgtgatttttatgaattatatgttatactaagcctacagatagaagtattcagacaataacgggatggatacgtaagcgtgtacaaaatatgaatctggagggagttgaagcatatgaaacttacttttttaggtgctgatcacgaagttacaggaagctgtcattacctatgtgttggtgataaaaatatactgatagattgcggaatggaacagggaaatgatgtatatgagaaccaggagctgcccataccggcatccgatgtagattatgttcttcttacacatgcacatatagaccattcggggcttataccacttttgtatgttaatggctttagaggcagtatatattgcactgaggcaactgtacagttgtgtgatattatgttaagagatagtgcacatatccagatgtttgaagctgaatggcgcaacagaaaggcgaagcgttcaaacggaacacttaaggagttcatacctttatatgatgcgaaggcggtatatgaggttatgaaacagtttgtcggagtaaagtacgatgagatcataaatatagatgataatgtaagtgtgaggtttaaagatgtagggcatctgcttggttcagcaagcatagaggtgtgggcaaaggaaaaaaataaagagtcagaagtgtctaagaagatagtattctctggtgacataggtaatattaacaagcctataacaaaagatcctgctatggttgatacagcagattatgttgttatggaatctacctatggtaacagaagccataatggtacaccagattatgttaaggaactcgttagcgtgtttaaaaggacatttgacagaggtggcaacgttgttataccatcatttgcagttggtagaacgcaggagcttttatatcatataagaaagataaaagcggagcatcttatcgaccgggattttgatgtgtatgttgatagtcctcttgcaatagaggctacagaaatctttagcaggaatgttgaacagtgctttgatgatgaggctatagagcttgtaagagagggcattaatccgctgtcttttccagggcttaaatatgctgtatcaagtgaagaatccaagatgattaattttgacccaaaacctaaggttattatatcggcatcaggcatgtgtgaggctggacgtatcagacaccaccttaagcataatctctggagggctgaatgtactgtgctttttgttggatatcaggcaaatggtacaactggacgaataataattgatggaatagatgagataaagctctttggtgagcctatacaggttaaggctgagattgcacagctgccaggttcaagtggtcatgcagataaagatggacttataagatgggtaagtgcttttaggaataagccacagaaagtgtttgttgtgcacggagaggacagtgtatgtgaagaattcacagaatgtcttaagaaggagcatggctttgatgcatatgcaccatatacaggcggcgcttttgatcttgtaacaggctgcatgattacagagggtaacaaagaaagaaagagcagaagaactaccattaataaacgcaacagaagtatatatgacaggcttgttgcagctggcagacgtcttatgactgttattatgcataatgagggcggagctaacaaagatcttgccaaatttacagatcagattaattcactttgcgataaatgggacagatgatttaatgagcttaaatgtaaggatttacatgtgcaggtttgataaagagtgaggtataagaatggaggaatatcatgaaaaatatgctttttgtatttaacccgaattcgggaaaagcacagcttaagaattcgcttatgaagattattcagatattctccaatgcagattacgaggttactgtgtatcctacgaaagcagcattagatggatatgaaaagattaaagcagctaaaggactgtatgacattatagtatgcagcggaggagatggcacattaaacgaagtcgtatctgcagtcataacatatggagatgaaaaagtacctattgggtacattccaagtggttcaacgaatgattttgctaagagtcttggcataccttcagataagataagggctgcatacaatgttgtaagtggagaaagcttttcttgtgatatcggaattataaatgacagacggtattttaactatgtggcagcatttggtgcatttacagatgttgcgtacgaaacaccgcaggatcttaagaatatgttcgggcatcaggcatatgtgatagagggggcaaagaggcttttaaaccttaaagcatataagatgaaagtaacttcaagcaggcttgatatagaggataactttatatatggcatggtgagcaattcaagttcagttggaggtatgaaaggacttataggtgataatgttgatttccaggatggggtgtttgaggttactcttataagagaaataagaaacgcacttgatttccagcagctgataaatgcttttatgacacagaggcttgaaagctgtgatatgatttattcatttaagactaacaatataacatttgaatcaccggataatataaaatggacactagatggtgaatttggaggagaacacaataaggttaatcttaaagtgtgtcctaaagcggtagattttataattaataaagaaaagcctaaagccaaaatgaattaataaaataaacatcaaagctggcatggttaattaagtaaagaattgcatcaaaaaaacatatgaattgctttaaataataaagtgataaaacctatcaacattgttgagcaggctttatcactttatttttttacgactttaaatatatcctggaaaatgatgttaaaaattagaaacaattcagaaacaatttatcatcacaaagaaaaaatatatattaacaagaagaataaatgttggaaacacaagtgaaattgtattaaatacacagcttttagagaaaaaatacaatgatataaagataaataatctgacaataatatatatattaaggcaaaattaaataatctgacaattcaaaataaaaattcatttacaacgatgaaaaataggagtatattatgagcagaaaaaaaatccactgcaaaataacctgctggaaattcgctggcagattgaaatatatcagggatttgataacagattatacatgaaaggatgataggactatggaaaatcagaaaaagcagcctggactttataacccacaattcgaacacgataactgtggtatcggtgcagttgtaagcatcaaaggaataaagactcatcagacagtatctgatgctcttagtatcgtagagaatctcgaacacagagcaggtaaggatgcggaaggtaagactggtgatggtgtaggtattctccttcagatatctcataagttttttgaaaaagcagttaagccacttggtattaagattggcaatgaaagagagtatggtataggtatgttcttctttccacaggatgaacttgcaagaaaccgtgccaaaaagatgtttgagataatagttgaaaaggaaggacttgagtttcttggctggagagaggttccaacttttcctaatgtcctaggtaaaaaggcagttgattgtatgccatacattatgcagggttttgtaaagaagcctaaggatgtgaataagggtatagagtttgacagaaagctgtatgttgcaagaagagtattcgagcagacagcagaggatacatatgtctgttcactttcaagcaggacaatagtatacaaaggaatgttccttgtaggacagttaagaacattttttaaggatcttacagatgagagctatgaatcagctatagcgcttgtacactcaagattctctactaacacaaaccctagctgggaacgtgcccatccaaacagatttattgttcacaacggtgagattaatacaatcaagggaaatgccgacagaatgctttcaagagaagaaacaatggtttctccatatcttgaagatgagatgtctaagatcacaccagttgttaacaccaatggttcggattcagctatgcttgataacacacttgaattctttgttatgaatggtatgcctcttccgctggctgttatgattacaatcccagagccatggagtaataataaagctatggagcaggagaagaaggatttctatcagtattattcaactatgatggagccttgggatggaccagcatctattcttttctctgatggagatatcatgggtgcagttcttgatagaaatggtcttcgtccttcaagatattatattacaaaggatggatatcttattctttcatcagaagtaggtgcacttcctattgatgaaagcagaatagaagtaaaagacaggcttcatccaggtaagatgcttcttgtagataccgttaagggtgagcttatagatgataataaacttaaggaaaaatatgctactaagcagccatatggtgagtggcttgataacaatcttataaagcttgaagatcttaagataccaaacaaaaaggtgccagcacatactaaggaagaaagagcaagattacagaaagcatttggttatacatatgaagatttcagaacatctattcttcctatggcacttaacggaagtgaatctatcggtgctatgggtatagatacaccacttgctgtactttctaacagacaccagcctctgtttaactattttaaacagctgtttgcacaggttacgaatccacctatagattccatcagagagaagatcgtaacatctacaactgtgtaccttggtaaagatggtaacatacttgaagaacagcctgaaaactgtaagaacttaaagattaacaatcctattcttactaacacagatcttttaaagataaagaatatgaaggttgaaggttttaaggttgaaactattcctattacatactataagaatacatcactcgaaaaggctattgaccatctttttgtagaggtagacagagcacatagagagggttctaacattgttatcctgtctgatagaggtgttgatgaaaatcatgtagctataccatcacttcttgctgtaggtgcagtacagcactatcttgtacagactaagaaaagaacaagtatggctgttatacttgaaagtggtgagccaagggatgtacatcattttgctacattgttaggatatggtgcatcagctatcaatccatatcttgcacaggaaagcatacaggagcttattgatcttaatatgcttgataaagattactatgcagcagttgatgattataataatgctatcataagtggtattgtaaagatagcagctaagatgggtatatcaactatacagtcatatcagggctctaagatatttgaggcgataggtattgattcagctgttattaataagtacttcacaggtactgtatcaagagttgagggtataagtcttaaagatatacaggatgatgttgaaacacttcattcaaaggcctttgatcctcttgggttatcaacagacacaactcttgatagtgagggtgcccataaaatgagaagtggaaaggaagaacatctttataatccacagacaattcatcttttacagcttgcaacacgtacaggtgattataatacatttaaggaatatacagctcttgtcaataaagaagagggcgttaagaacttaagaggacttatggatattaagttccctaagaagggaataaatatagaccaggtagaaagcgttgattctatcgttaagagattcaagactggtgctatgtcttatggttctatctctaaggaagcacatgaaactatggctattgcaatgaatatgcttcatggtaagtcaaactcaggtgaaggtggtgaggatgaagacagactcactgttggagctgatggacttaacagatgttcggctatcaagcaggttgcatcaggaagattcggtgttacaagcagatatcttgtaagtgcaaaggaaatccagattaagatggcacagggtgctaagcctggtgaaggtggacatcttccaggaaagaaggtatatccttggatagcaaagacacgtctttcaacaccgggtgtatcacttatatcacctccacctcatcacgacatttattctatcgaggatctggcagaactgatatatgaccttaagaatgctaacaaggatgcaagaatatcagttaagcttgtatcagaagctggcgttggtactattgcttctggtgtagcaaaggctggtgcgcaggttattcttatatcaggctatgatggtggtacaggtgcagcgccaagaagctctatacataatgcaggacttccttgggagttaggacttgctgaagcacatcagacacttacgatgaatggacttcgtaacaaggttataatcgaaacagatggtaagctgatgagtggacgtgacgttgccatagcagccatgcttggtgctgaggaattcggatttgcaacagcaccacttgtaactatgggctgtgttatgatgagagtatgtaatcttgatacatgccctgttggtattgcaacacagaatccagagcttagaaagaggttcgcaggaaagccagaatacgtagttaactttatgagattcatcgcagaagagcttcgtgagtatatggctaagcttggagtaaagacggtggatgagcttgtgggaagaacagatttccttgaagcaaaaactgacgtttatggaagtggaagagcatcaaaggttgatctttctaatatccttaataatccttatattaaggaagcagcttctatcaggtatgataagaagaatgtgtttgatttcgagcttggtaagacagtagatgaaagaatacttataaagaagttttcagatgctatggataagaagcagaagagaagtgttgaagttgatgttaagaatacagacagggcacttggtactcttcttggtgctgagataacaagaagattcggtgaaagccttgcagatgatacatatacagttaagtgtacgggcgctggtggacagagctttggagcatttattcctaagggacttacacttgaacttgtaggtgacagcaatgactactttggtaaaggcctttctggtggtaagcttatcgtgtatccaccaaccggagtatcttataaggaagatgagaatattatcataggtaatgtagcactttatggtgcaacaagtggtaaggcatatatcaatggtattgcaggtgagagattctgcgtacgtaattcaggtgcaacagcagttgttgagggaacaggtgaccatggctgtgaatatatgacaggtggaagagtggttgttcttggaagaactggtaagaactttgctgctggtatgagtggcggtgttgcatatgttctagatgaggatacaacactttacaagagagttaataagcagcttgtatcacttgaaccagttactaacaagtatgatgtacttgaacttaagcagatgatcactgaccatgtagctttcactaactctaagaagggtaaagaggttctggataactttggtgaatatcttcctaagttcaagaagattatgccacatgattataagaagatgctcaatatgattgttcagatggaagagaagggtcttagcagtgaacaggctcagattgaagcattttacgcagcaactaagtaagatggaaatgtacaaaaacagatatgtattggcagcttataagtctgctggtacatatttgtgaaaatgtgtatttgaaaggagataatcatgggaaaaccaaccggatttttagaatatgaacgtgtagaagctaaggcagttgcaccaaaggaaagaataaagaattttaatgagtttcatacaccactttcagaaacagagcagagatgccagagcgcacgctgcatggactgtggtgtgccattctgtcagtcgggcatgactataaagggtatgacaagtggctgtcctcttaataaccttataccggaatggaatgatcttgtatacacaggtaactgggaacaggcatataacaggctgcataagacaagtaattttccagagtttacaagccgcgtatgtccagctctttgcgaaaaagcatgtacatgcggacttaacggagatgctgtatgtactaaggaaaatgagatggctatcatagaacatgcttatgctaacggacttgcaggtcctaagccaccaaaggcaagaactggaaagagaatagctgtcataggttcaggtccttcaggacttgctgtagctgaccagcttaaccagaggggccatcttgtgactgtatatgaaagagctgatagaataggtggacttttaagatatggaatacctaatatgaagcttgaaaagcatattatagacagaaagcttaatgttatgaaggatgagggtgttgagtttgtaacggaagctaacatcggacagaatattaaggctaagaagataatggatgattatgacgcagttgtacttgcggtaggtgcctctaatccaagagatatcagtgctcctggaagagatgctgatggaatatattttgcagttgattttcttacagcaacaactaagagtcttcttgattcagatcttacagatggtaagtatataagcgcaaaggataaaaatgttattgtaatcggtggtggtgatacaggtaacgactgcgttggtacagctataagacatggctgtaagtcagtgacacagcttgaaatgatgccaaaggcaccagacgtaagaagtgaaactaatccatggccacaatggcctttagtctgcaagacagattatggccaggaggaagcaatagcagtattcggacatgacccaagaatatatacaactactgtaaaggaattcaagaaggataagaagggcaagctttgcaaggttgttactatccagcttgaatcaaaggtagatgaggcaacaggaagaagaatgatggttcctgttgaaggaacagaaaaagagcttccttgtgagcttgttcttatagcagcaggtttccttggaacacagaagtatcttacagatgcattcggcgtagaggtaaaccagagaactaacatcaagacagatgatggaagattcgcaactaatgttgctggagtgttcgctgccggcgactgtcacacaggccagtcacttgttgtaaaggctatacgtcagggcagggactgtgcaagagaagtggataagtatctgatgggatatactaatctgtaataagcgtaatagcttgattaacaagtggtagataataaataaaggtgttgtagctctattttgtgcgacaacacctttttgttattgttaaacaagagcgataccattacttaatgcttttaatcaaaagttctgttgctatataaaagtttttttcgtatacttaacatagtttaacttaagatatgcagtcgcataacatgattaaataattaaagtgcatgcgcttgaaacgtaagaaatgtgagaatgttgtagaaaggtcaggaaaatatatgaaaagcaaagtgaatggtatattcagaaaagtatgtaatatccttgaatggataatatcagcaatccttgtggtagttgtagtagttatgtgtgtgaggtttttgcttgaacttggtgggatgtttgatagtaccccgcttgatttcttcgagaaatttgtggcagatattatgacactggcagttggtgtggagcttatcaagatgttatcacagcatacaccggcaactgtcgtggaggtgcttatgtttgcaatagcaagagagatggtgacataccatgattcagcacttaacacagcgataggagtgctgtcgatatgtgcactttttgcgacaagaaagtttttcttctgcaaaaatgattatgatgagaatgatggaaaacattaaaacaatctgacgcatcaggtggagggcagcatatatcgaaatattaaaataaatataaattataaaaaatatattggcaaatcagcgccggatgtgatacaatccattagtatgtactttgtacgatagaaaaagagacttcatatatattttaaggaggatttataaacaatgagttttaaggttgaaaacatggaagagaagaatatggttaagctcgtgatcgaggctactgctgaagaattcgaagcaggtcttaatacagcttttaataagaataagaataaaatcagcgttcctggcttcagaaaaggtaaggctccaagaaagatggtagaaaagctttatggtgcagagattttctatgaagatgcagctaatgccatcattcctgatgcttatgctaaggcagcagatgaaagtgaattagaaatcgtttcacagcctaagatagatgtggttcagattgaagctggaaagccatttatctttgaagcaacagttgctgttaagccagaggttgaacttggacagtacaagggtgttgaggtagctaagtgcgatacagatgttactgatgcagatgttgaagaagaattaaagaaggctcaggataagaattcaagaatcgttactgtagaagacagagctgttaaagatggcgatatgacaacaattgattttgaaggctttgtagatggtgaagcatttgaaggtggaaagggtgaagattatccacttacaatcggttctcattcatttattgataactttgaagaacagattatcggtatgaatatcggtgatgagaaggaaatcaatgtaacattcccagaagaataccatgctgaggaattaaagggtaagccagctatgttcaaggttaaggttaaggagatcaaggaaaaggttcttccagagcttgatgatgatttcgctcaggacgtttctgattttgatacacttgctgaatataaggaagatcttaagaagaacataacagtgcgcaaggaaaatgaagctaaggctaagaaggaagatgaagcaatcgctaagattattgaaacttctaagatggacattccagaagctatgattaatacacaggttaacagaatgttagaagacttcgcacagagattacagtcacagggcttatcagttgagcagtacttccagtacacaggtgttacagctgaaaagattattgaagatatgaagccacaggctgttaagaatatccagtcaagacttgttcttgaagcaatcgtaaaggctgagaatatcgaagtttctgatgaagaattcgaagcagagcttaacaagatggctgaacagtacaagatggaaatcgaaaagattaaagagttcatgggtgaatatgaatctaagcagatcagagaagatattgctatccagaaggctgttgatgttattgtaaattcagtagttgagaagtaatagatattatataagacggggaggcaataatatgagttttgtaccttatgtcatagaacagaatagtcgtggagagagatcatatgatatctattcacgtcttcttaaagacagaattatatttttaggtgaagaggtaacagatgtttctgctaaccttgttgtagcacagatgttattccttgaggcagaagatccaggcaaggatatacatttttatatcaacagcccaggtggttcagtatcagctggtttcgcgatatatgatactatgcagtatattaagtgtgatgtttcaacaatatgtataggtatggcagccagcatgggagcatttcttctttctggcggtactaagggtaagagacttgcacttcctaatgctgagattatgattcatcagccttcaggcggagccagaggtcaggaaacagaaatcagaatagttgcagagaatatcttaaagacaagaaacaagttaaatgaaatactcgcagctaacacgggtaaatcagtagaagaaatctctcgggatacagaacgtgataactatatgacagctaaagaggctgtagcatatggtcttattgacagcgtggttgaaaagagatagttacttaaaggggactgttgcttttcgcacagtcccttgttgtttatgaatatataagctgaaagagcattacggatattcagagcgaagcaatatattattatgtattatttgttaatatgtagcagaccggaggaattatggcaggcaagattaaagatggagagttaagatgctcgttttgtggtaagacacaggataaggttaaaaaacttatccagggacagaatggagtatttatatgtgatgaatgtataggaatatgttcagatatacttgatgaggagtttgaggcggaagatgagcaggcagtagatggacttgatattaatcttttaaagcctaaggaaatcaaagagtttcttgatgattatgttataggacaggatgaagctaagaaggttttatcagtagctgtatataatcattataaaagaatattatcggcacaggatgttgatgttgagcttcagaagagtaatatacttatgttaggacctacaggttctggtaagacatttcttgcacagaatcttgcaagacttctgaatgtgccatttgcaatagctgatgcaacaactcttacagaagctggatatgtaggtgaggatgttgaaaatatacttcttaagcttattcaggcagctgattatgatatagaaaaagcacaatatggaattatatatattgatgagatagataagataactaagaagtcagaaaatgtttccataactagagatgtttcaggtgaaggcgtacagcaggcacttcttaagatacttgaaggaacggttgcatcagttccacctcagggtggcagaaagcatccacagcaggagcttattcctatagatacaactaatatactgtttatatgtggtggagcttttgatggacttgaaaagattatcgaatcaagaatggatcagagtacaatcggatttaattcgcagataaaggaaaagactgctacagaggacgttggagaaatgttccataaggcacttccacaggatcttattaagttcggacttatacctgaatttgtaggacgtgttccggttgttgtagcattagattcacttgatgaggaagcacttgtacgtattcttcgtgaacctaagaatgctatacttaagcagtataaagcacttttaagccttgatgaggttgaacttgagtttgaagatgatgcagttaaggaaatagcccataagagctttgaaagaaagacaggagcaagaggacttcgttctatacttgagtcagtcatgaatgaggttatgtatgaggtcccatctgatgaaactattgcaagatgtattataacaaaggatgctgttcttggaacaggaaagccggttattgaatacagaacgcagaaagtaggaaataataacgagggaagtatcgctatgaatagtgcatcaggcacacaaggcgatgaagttaagaaagcacaataattatgaatatgattacattaccagtaattgcgttaagaagtatgaccgtgttgcctgacatggtcatacattttgatataagcagaaaaaaatcaatacaggcggtagaggaggcacttgctttagatgagaaggtacttcttcttacacaaaaagatacacagatagaaaatcctgcgcctggggatatatataaaacaggaacagttgcagttataaagcaggttattaagctgcctaataagcttgtgcgtattcaggtggaaggccttaacaaagcacatgcagttgaaataactgattctggtaactgcttaatggcagctgcagatatagaagagatgtttataaaccagccggatgaggttacaaacagggctattattcttggcatgagagagcttataaggcagtatggtgcagctaattcaagaagcagcaaagaaatacttaagtactggcttgagcttgatgatgcaagagagctgcttcttaaaatatgcgcggattttcctatggattatacagacagacaggctcttcttgagatggatgatataatagaaatctatgaatatatagcgggaatgttcatagaactgactaatgcatataagataaaagaagagctcgctataaaggttaaagaaaaagtagataaaaaccagaaagagtatattatacgtgaacagcttaatgtgcttaaccaggagcttggtgaggatcaatattctgagtcggaagagcttgataagcagatagaagagcttgatgccggtgatgacataaaagcaaagctccataaagaagtaaagaggttaaagagcctttctaaaggttcatcagaggttaatgttgagagaacatacatagagaattgccttgcacttccatggaataagaaatcacaggataacaatgacattattaatgcaagagctgttctggatgcagaccactatgggatgaaggatgttaaggacaggattatagaatatcttgcagtcagaaatataacatcggtatcagatgcacctatactatgtcttgttggacctccgggaacaggtaagacgtcaatagcgcgttctgttgctgcggcacttaataaaaaatatatcagagtatgtcttggcggcgtaagagatgaagctgaaataagaggacatagaaaaacatatgtaggtgctatgccaggaagaatcatagaaggacttaagcaggcaaaaacctctaatccacttatgcttcttgatgagatagataaaataagcagcgattacaggtcggatacagcatctgcacttcttgaggtgcttgatggtgaacagaatcaacattttgttgaccattatatagaacttccagttgacctttcagatgtattatttatagcaactgccaatgacctttcaacagtaagcagaccattgcttgacagaatggaaataatagaagttcaaggatatacattgaatgaaaaaatgcatattgcaaaggaacatcttgtgaaaaagcagatagctaaaaacggacttatgacatctatgtttaaaatatcggacggcgctttaaaacgtattatatatgcatatacaaaggaagcgggagtccgtgaactggaaagacagatagcaaagatatgccgaaaggctgtaaccaggctttatgaggaaggtgtgtatacaccagatggaagcagaaatacagaagtaaagaaatgcataagggttacagataagaatctttttgaatatcttggaaaagaaaagtataggccagataaggctaataagcatcctgaggtgggtgttgtcagaggactggcatggacaagtgttggtggcgaaactcttgagatagaggttaatgtcatggcgggcagttcagagcttaagcttacaggaaatatgggagatgttatgaaggaatcagctatgattgcttattctcttgtcaggtcacttactatgaatggtaagtataaggttgacagcgaattctatgataagcataatattcatcttcatatacctgaaggtgcagttccaaaagatggaccatctgcaggtattacaatgacaactgcaatgctttcagctgttacacaaataccagttagggcagatgttgctatgactggtgaggtgacactgcgtggcagggtgcttccgataggaggacttaaggagaagcttttagctgcaaggatggcaggcatgaaggttgtgcttgtgccagaggaaaacaggtcagatgtggaagaacttgacgaagagataacacagggcgttactataaagtatgtagaaaatattaaacaggtgttaaaggaagcacttgttttacaggaaaactgatatattttacatagattaagcacttatcttaaaagaaagaaaggagaaaaagcagatggttataaaaaaggttaatcttgatatagttattggagttaccagtgctataccagatacacaatatccagaggtcgcatttgcaggcaagtcaaatgttggcaagtcgtcacttattaattcacttatgaatagaaaatcatatgcaagaacatcttcacagccaggtaagacacagacaattaatttttataatattaatgactgcatgtatcttgtggatcttcccggatatggatatgcgaatgcaagtccggctgttaaggctaaatggggaaagatgatagaaaaatacttaagaaaatcagctaaccttaagcaggtatttctgcttgttgatataagacatgatccatcagaaaatgataagatgatgtatgactggatagttgataatggattcagaccggttattatagcaacgaagcttgataaacttaaaagaagccaggttgccaagcatgtaaaagcagtaagaatggggcttggattaagagaagatgatattcttataccattttcttcagaaacaaaacagggccttgatgaattatgggaaacggttgagtcatatgttatgcctgaaaatgtataagcatagatatcatatcatatgaaatatattacccgaaatgtcgtattatgttgtttttagtaaggaaaagtagtatagttgttgatgttgtcgggctttattataaaaggattaggacttgatgggaggatatacatatgttaacagtttcaattttacttgattcagtagagaaagttcagaggtttgttagtaagataagcagatattcatgcagctttgatgtcgaaagcggcaatagctttgtggatggaaaatctcttgtaggattgtttagtcttgatatcagcagaccgcttcagcttactattaatggtggagaaagcgaaattgaggatgttttaagggatatcaatgaatttatgcaatattaatattgctgttctaagatagtttcctacagtgtgtgaatgttatgaaaagaatatcaataatactattagctgttgttatgacattttcactttatgcatgtggaagcagtaaaagtggcaatgcatcagatggacagcagaatgaccaggagaaccagctcacaggaaagcaccatgttgttatatcagttaagggttatggtgatataaagattgaacttgatgcagatgtggcacctgtaactgttactaatttcgtgaagcttgcaaaagatggtttttatgatggacttacatttcatagaataataagcggctttatgatacagggtggagatcctaaaggagatggaacaggcggttctgatacaaagataaaaggtgagtttgcagataatggtgtgacaaataatctgtcacatacaaggggtgctatatctatggcacgttcaagcagtaacaacagtgcaagttcacagttttttatagttcataaggatagtacatatcttgatggaaagtatgcttgctttggttatgtgacagaaggcatggatgtggttgataagatatgtaaagaagtcaagccggtagatgataacggaaaagttaataagaatgaacagccggttatagagaagatagctgttattgattagcggtagcagcggttgttgtaaaatatataaaataggcggatatatgttagtgcatatatctgcctattttatatctgcctgatttttgcagggaatataaaaaactggtgcaacaaaaagtaacaccagttcataaaatataatgcggaaaatgggacttgaacccacacgtggtaacccacacaagaatctgaatcttgctcgtctgccattccgacatttccgctaacttgttaaaaaagaagcttataaataagcttctttaatatagtgcagtcggcgggacttgaacccgcacccaagcaatatggactagatccttagtctagcgcgtatgccaattccgccacgactgcttatttagttgttgctgtttcccagcgacttgattatattatcatgtgatatattgtttgtcaacagaaaaaacaaaaaaattaaaatttttattagaaacaaaaaattaaaaatatgattaaaaaatgtgataaaaaatttggctaaaaattatgattataagactttacatttgaggggatgaatagtattatataaaaggtatgctactatggctcagtcggtagagcaactgattcgtaatcagtaggtcgccggttcgattccggctagtagcttgcaacgttagctttgccagttttaatggcatatctggatatcagatgagatatccagatatttttatgttcttttttgagtgcatatgtacataagattagaggcacaaacagccttaaggcgcatgttttagggggtaagatagaagttatacttcataattccggcataaaaataggaagctgggcattcttgacaagtaaacttagcgtacgtataatcaatcaagatacagttaatttaataaagaaaattgtattttgaagttatgagtaagaatttaaaaataggagaagaaatggaaactaatattagacaggataataatgaagaagtagaaattgatataatgcagatattaatgatgctgttatcaaaaatatggatattaatagtatctggtatcgcagtagcaattatagcattttctattacagagcttgcaatcacaccgttgtatcagtcatcaataaagttatacataatcaacagacagaatggctcaacaacaacacttagtgatattcagtcatctacacagcttgttcaggattacaaggtacttgtaacaagtcttccggtagtagagcaggttataagaaatcttgaccttgatatggaagcagatgaccttgtatccaagattaaatgtgaaatagagtcagattccagagtgcttcaggtaacagttacagatcctgaccctgaaagagcaaagcaaatcgtagatgcagttgcagatatatctgccaagcagataacatcggtaatgcagatagagggagttaatgttatagaatatggtagagttgcaacatctccatcaagccctaatgtaaagaaaaatacagtgcttggtgcagctgtcggagttgtactcgctatagccgtacttgtagttaagtttttacttgatgatactattaagtcatctgaggatgttgagagatatcttggaataactaacctttcacttattccacttacagaagaggaatataatggacattcaagcagtaagaagaaaaagaagagaaagtaattatagaaaggttggagggaattataatgcagaagatcaatttagagaatacccagcaggataattatcaggtaagagaaagctatagaaacttacgtactaatatattccttagtggaaaagatactaaagtagttatgtttacaagctgtggacctaatgaaggaaaatctacagttactatgaatcttgcttcatctatagcagatggtggaaaaagagtattgtttattgactgtgatttaagaaaatcagttcttgttggacgttataaggttaaaaaggggattaagggattaacacatttcttatcaggacagagtagtcttgaagaagttatatattcaacaaatgttgagaatctggatgttatacttgcaggtcctgtaccacctaatccagcagagcttcttgatagtccgttatataaggaaacagtcagggaaatgcgtgaaaaatatgattatgtgatcatagatacaccaccacttggttcagttatagatgcagctatcgtagctacagtaagtgatggagctgtgcttgtaatagcagctaatcaggtcagctataagtttgcacagaatgtcatggatcagttaagaaaaacaaaggtaaaaatcataggaagtgttcttaataaggttgatttgtcagaaaatggatactatggaaagtactatggtaaatattacggtaaatactacggaagctactatggaaactatcatagtgatgaatcaccagataagtcattcgaaaaagctaaggcagaaacagcaaaaaagaatacagcatcaaaatcagtaacaactgcttcagctaagaatacaagaaaacctgctgcgggaagtgttggttcagtggcttcaagaaagaatgcacattcacagaatcaggtcatggcagctaagaataaagcagcttcagctaataaagctggtagtgtaaatggtgttcctcttaagaagagaaacggcagaacagaagaatatgaaggagattttcttctggatatggattttgatgatgataacaaatagttgtttggcataacagtttatcagaatattggggaaatacattaagaaaataaacagcagaggatgtgacaatgttgaacgattcaaacagtacaagagatagtgtgcagaatataatgttgttttttgtggatgttatgggtgtacttatagcatattatgcttctggtataatatggctgatggtatacagacatatgaatgttaattctacagttgttcagttaagtactaatctggatacaattatagttgcggcacttataagtatgctgtttgttaacgaaaaaggtgactgcttaaaaagaggcagattcgaagaacttaggactgttatatgtaaagttgcagtttttgcagctatggcagctgtctatgaacttgtgacaagaagaagccagataccaagaggtgtatatatatgtactgtatttatcagccttgtttttatatatacagggcgtgaacttataaaaaggtatctaaagagtcttggcaagaacgaagaaaaggcggcaagagtgattgcaatcactatgaaggacagagcagcacatcttgttcataatcttgacagggaagaagactgggtgagaacgctcagtggtttcatcgtgatggatgaggacatggtttcacaggagatagatggcgtgaaggtagtggctaatgcacataccatgatgacttacataaagaatgaaatcgttgatgaagtgtatattgatgtcaatgaaaatataagaaaacaccttaagccattagtcatgaatcttgaagatatgggtataactgttcatatcagaatagaggttcttgatggctttgatggatattcaacatctcttggtactataggaaatatccctgtagtgacatttgcaaaccgtgagtttgattataaagagcttgcagtaaaaagacttatggatatagtaggttctctagttggtatgcttattatgcttgtggcaatgatatttgtcgttccagctattaagcttgagtctaagggaccggtgttctttaagcaaaagagagtaggaaaaaatggacgttatttctatatatataagttccgttcgatgtatctggatgctgaggaaagaaagaaggagcttatgtcgcagaatgaaatgagcggccttatgtttaagatgaaagatgacccacgtataacaaaggttggtaagttcataagaaaaacaagcatagatgagcttccacagtttattaatgttttcttaggtgatatgagccttgttgggacaagaccaccaacggttaacgagtttatgcaatacgaaggacatcataagagaagactttccatgaagccgggtattacaggaatgtggcaggcttatggaagaaaaacagttactgatttcgaggatattgtaaagatggatcttgaatatatagataactggagtataggacttgatataaaaatattattcaaaacaatcgcctcagtagtcacaacaggtgggcagtaacttgtaaggatactaggtgaaaatgcaagctgttacagagagtaacagcttttttttaaatctgcacgctgcaggtatgttataaaatgcattattattgcttggttatggtataattgttgcattattattgcttggttatagtattattattgcattattattgtttggttatggtattgttgttgcattattattgttcggttatagtataattgttgcattattattgcttcgttattgtagtattatgtattattgtgtctttattgtattattatcgtattattattaaataaaggtttgctaattactgtcaatatagagtataatgtattaaagaccatatgttatgtgatgcttgaatgtaaaaatgtaaaaacattataagcattgtatgattatggcatttacatttttgttaatggaggataatgttatgtcttatatggacgagtacaagcgttgggtagaaaacgttaaggatgaagaactttcagaagcattaaaaaaaatggacgagacacaggcagaggatgctttctatcgtgatcttgcgtttggtacaggtggtttaagagggactataggtgctggtactaacagaatgaatatatatactgtagctaaggcatcacagggactttcagattatcttgttaaatcatttactgaaccatcagtagctataggttatgattcacgtattaaatcagatgtatttgcaaagacagcagcatcagtatttgcagctaacggaattaaggttaatttatggcctagacttaaccctgttccaacagtatcatttgcaacaagatatctccatgcatcagcaggtgttatggtaacagcatcacataacccatctaagtataatggttataaggtatatggtgcggatggatgccagattacaacagaagcagcagcagcagttcttgctgaaatagaaaagcttgacatatttgctgatgttaagaagatggattttgatgaggctgttaaggaaggaaagattgaatacatatcagatgatgttcttactgcatttatagaaaaggttaagagtcagtcagtattgtttggtgaagaggttaataagaatgtatctattgtatacagtcctctgaatggtacaggctatattccagtcacaagaactcttgaagagatgggatatacgaacataactatagtagaagaacaaagactcccagatggaaacttcccaacatgcccatatccaaacccagagataaaagaggctatggcactcggtatggattatgcaaagcgtaacaacgcagatcttcttttagctactgatcctgactgtgaccgtgttggtatagctgttaaggacaagaacggagattatcagttgttaacaggtaaccagacaggaatgctgctttttgattacatctgttcacagagaacaaagcataacagaatgccagctgatccagttatggttaaaactattgtttctatggatatggcagagcagattgcaaagaattatggcgtaaaggttattaatgttcttacaggctttaagtttataggagagcagattggattccttgaaaagcagggtaaggaagattcatatatctttggttttgaggaatcatatggatatctttcaggaagctatgtaagagataaggatgctgttaatggtgcattccttatatgtgaaatgttcagctactatgctactcagggtatttctttacttgataagcttaatgagctttttgataagtatggatattgcctgaatacacttcattcttacgagtttgatggttcagctggatttgaaaagatgcagcagattatggaaacattccatgaagaagtaggcgagggtaagaagatagagagctttgcaggtaagaagattaatacagttcttgattacagcaagggtcttgatggacttccaaagtcagatgttcttaagtatcttcttgatggcaactgctcagtagtagtaagaccaagtggtacagaacctaagcttaagacttatataagtgtaagtgcaaagagcagggaagatgcagaagttatagaaaagaagattgcagatgaacttggtggattctttgcataatattgttgtttaacacacattcttaacgtacggacgacagcatatatgagaaaagcaggtgtgcatacatcaacgatgccagaagcttcaattggat

SEQ ID NO: 329 - DNA, 25880 bp, Unknown
  gut microbiota DNA sequence
tagcttcgtacatggatgtacgaagcaatgaggccgcgccacggacggcgcgtccgaatggtagcgtcacctataactacctatatgaaaagtcttagagtcagccgattgaagcttctggcattgaacatagtgtgcaggactgcctgtagcttatatttgtcgtccgttcgtcatcaactaatattcaattaaacaacaatatttcagaaaaatccccctacttttattgacatataccacataagaagtgatactataacctgacagataaatttacatgtataataatatatggttatgtacaatagcatatgataatgcgtaatagtatatggttatgtacaatagcatatgataatgcgtaatagtatatggcgatgtataataatatatgatgatgtataaagaatagattgtaaatacatattttgatggaggttagcatgtttaagtggctcatgttaatagtgtatattattcttggtacatatatgctgtggagaatgatacactggtttaagatagttataccactattcaagcataagcgtatccaggcattatggataggattatactgcatattcgcatcaactatatttttaggagtgtttcttccaagaagcagtatacaggtaacgattcacagaataagtaatgtgtggcttggttttttcatatatctgctgttttttatgataatcggggatattattgtttttgttcttaagcgtgtggataagaagaaaaatattccaattcttcataaactgtatggtgcatttataataggcatagcagtaatagctgcaagtacaggtttttccgtatatgggacaatacatgccagacagatgacaacaagaagctatgatataagtgtggataagcatgttgatgatattagcagtcttaacgtggtacttgttgcagatcttcacttaggttatagtattggctgtagcgatatggagaaaatggtagacaggataaatgcacttaatcccgacgtagtaatatatgccggtgatatttttgataatgattatgatgctcttgatgatcctgaaagacttgtggagattatgaggaatgtcagtgctgcatatggttcatacgctgtgtttggaaaccatgatgttacagaaacacttgtcggaggcttttctacagcttcacgtacaaaggcgttcagggatccacgtatggagacatttcttgagcaggctggtatcaatataatgcttgatgaagttaccacaatagcagacggtaagattaatcttataggaaggcttgatggtgagaaagcaggcgatggtacaagcaacaggaaagatttgtcagagcttgtgaagcggtgtgacatgtcaaagcctgtaattgtaatcaatcatgagccggataagctgcatgagaccgcagctatgggagttgatgttatgcttagtggtcatacacatgcgggacagttttttccattaactataatacagcctttagcatgggaaaactattggggaataaagaaaatagacaatatgtatagtgttgttacatcaggtgtaggtttatatggtccggcaatgagagttgcaactgacagcgaggtaatgagcgtaaggattaactttaattagaaaataagaggttttatgtaagctgtgtaatgttatggactattatggactattatatccagtatataaaatataatcagagtgaggaataattatattatgaaagatcttacaaaagggaagccatcagttcttatattatcatttgcattgcctgtatttcttgcaaatcttttacagcttacatatagtattgtagacacaagaatagttggaacatttcttggggaaaatatgctggcagcagttggttctacaactacactcagtaatctgattataggctttcttcttggcctgtccaacggctttgccatagttacagcacagaagttcggggccagggatataaaggcagtaaagaaatcttttgcagcagcgcttataatgggagtttcaattgctcttataattacagcagcaggacttatatttctttcgccaatacttaagtttcttaatataccacaggatttatctggtgaggccagtgcatatatatcagttattatagcaggacttattgcaacatttttatatgatatgtgtgctgcagttttacgtgcaataggtgatactataacgcctcttattattctggcagtatcagttatgcttaatgttgcaggggacatattctttgttgttatattaaaggaaggtgtaagaggagctgcgattgctacggtgcttgcacagttcattgcatttgttgtgtgtgcagtatatatgtttagaaagtatgatatattaagactgacaaagcaggactttaaaggcattaagggcggcatgtttaagaatatgcttggaggcggtctttccatgggttttatgagttcgcttgtcaacataggttcgttaacgcttcagacagctattaacaagcttggtcaggatattatagttgcccataccgcggcacgtaagatatcagagatatttatgattatgtttacagtatttggacagacgatggctacatattgcggtcagaatataggggctggtgaagtggaaagagtgaaaaagggcattaagctttctatattttatacatgtatatggtgtacgcttgccatgatagcaagctacacgataggagacaggcttgttcatcttgtgacaggaagcagtaactatgcagttattaaaaatgctacggattatcttaagtttgattcaatattttattatgttacggcagttatctgcatagtaagaaatgccatgcagggacttggagaacatattactcctcttgtatcaagttcactagagatgataggcaagataataatagcagcaactcttgtacctgttatgggatatacaggagttattctggcagagccaatagtatggtttataatggtaattccgcttttgataaaaatataccgtatgcctgtgcttaaggagaattattaagaagtgaaaaatattgatgagaactgttagttcataattagtgttcatatatgttttgactgttgcgtgaatacttttgcatgaataatgataaatagttgaagttttattttcggctgtgttattataaaatgagtttgaatattttaaacaatcagttaatccatgatttacatgataagagatgtcaggcttaatccagttagcttaagttaggtggattgcatagaaatacgaaaggaatatgcagaatatctgcacaggaaagttatgttatccacgatagaaagtataaacaatgtagtaaatgattttatatggggagttcctgccatgatatgtatcataggggtaggactttacttaagcataagaatgggtttcatacaagttcgcaagtttgcttatgccatgaaagtaacaataggaagaatattccgtaaaagagaggcatcggatggcgcgctcacaccattccaggcagtatgtacagcacttgcagcaactgtaggaactggtaatatagcgggagttgcgggagcgatagctataggtggtcctggagctgtattctggatgtgggtatcggctgtgcttggtatgtgtactaagttttcagaggttattcttgcagtacgctttagggaaactaatgataagggtgagcttgtgggcggtcctatgtactacataaagaatggacttaaaaagcattggcattggcttgcatacctttttagtgcatttggtgtgcttactgtgtttggaacaggtaatgctacacaggttaacactataacctcagcaatagatacggcactttacaatatgaatattattgaagatgggaatacaacagttatatctacagtaaatcttataataggtatagttcttgcaatagtgatagcacttattctcataggtggaatcaagagaatagggcaggttacggaaaagcttgtaccttttatggcacttatatatatagttcttgcaataggtgttgttcttcttaatattaagaatattccgtctgtatttgtttccatattcaagggtgcttttaaccctgcatcagttactggtggtgcaataggaagcttctttatgagtatgaagaagggggtatcaagaggtatcttttctaatgaagcaggtcttggtacaggttcaatagcacatgcctgtgcagatacaagaaagccggtaaagcagggcttcttcggaatatttgaagtattcgttgatactatagtcatatgtacacttacagcactggttatactttgcagtaatgttcctgttaactatggaagtgcggcaggagcagagcttaccataagtggttttacttcaacatatggtggctgggtatctgtatttacagcggtagctatgtgttgttttgcattttcaactattatcggctgggggttatatggaacaagatgtattgagtttctttttggctctagagccaataagccttttatgctgttatacgcacttgttgcaatagttggtgcaactatggatttaggtcttatgtggggcatagctgaaacatttaacggacttatggctatacctaaccttatagcggtattcctgttatcaggtgttgttgtcgggcttgttaaggaatactttgcaggtgagggagcagagagtgttaaaagataagtaaaatataaaaatattgagcaataggttgatgaaatatcgtacctattgctctttttgttatcaggctgttattatttgtatcagacgtatctttctgtaaaatgcagcatataggagaataattcatatagagaacaggcggttagtgcgttaagataataatagtttagaaggtgattaatatacggaatggagattacatatatgaaagatattgctaaaaagtatgaaaaaaaacacgttatagagtgccataatgttcctgatattgatatgaacaaacaggatggcggattgccgcatatggcaggtgtgtatacatatcaggtacgaagaagctgcagggcagatggagattatacatataatcatgcacctatgctgactgggtttaacaacagactgctgttatcatatatcagtggtaaaaaggatgagcatggggcaccggatgaggttgtatatacaacatcaaaggatggcatgatatgggagaaagaaagagttatgtttccatatatgcttgcggattcttcttcatatataggaccagacaaggagctgctgcctgaacatgctaagatgatagtacattcaagaatgtgtttttatcaggcatctgacggaaggatgcttgcaacgacattttatggtttttcaccagatttccatcgtgctcctaacaacggttttggtatggcaaggcttgtacgtgaagtatacagggattttaccctgtcagatatgtttgttataaaatataatacagcgggtggattcacaaaggaaaatgcacatttttataaaccagaggatgacagtgaagtaaatattccatattatgatgagtcagaggatagtggctttataaaagcatgcagggaactgctgtctgataaacttgtacttgagcagtggtatgaagaggaaatgtatgataagcagcattatattcatggcagggcattatcattttatacagcaaaagatggaagtgtagttggactctgcaagaagggcgagggctatatatttgataaagaaggaaatataatactggacgaaaagatacctacgcttgttacgaatactgccaaggtatggggacagaaaacaccagatggggattatattatatgttataatccgactacagacagctcacaccggtggccgttagcagccatgagaagcagcgatggaagagagttttttgatatgaaagcagttattccagagattccaccatacagatatgaggggcatattaagaatcttggtgcacaatatatgagaggaatctgtgattacaatgatgctttcgataaaaatgtgtggataacatacagctgcaacaaagaagatatatggataagtaagatagccgggataacatcagataatatagataaaaagtattctgttatgtctccgctctggggcagcgttaaaagagatggagattttttatggaaggttgttgacagggatgcatgtgagcgtgcaattatagaatattttccagatgcatgtgaaaatgtatctgtaaagcttgatgtgaaaaaaatatctgatgataatggtgtcaaggttgtgttttataatgcagctggcgatatcataaaagaaacagtatgcaggaaaggcatgtgtatagcagcatgcagtcaggaagaaattcagcaggaaaatgtggagattcatcgagttgctgtatattctaaagagaagcttgcacttaatacgctgtcagatgatggaagacttgggaccctttctgatatggaatatgcagatagaaaagattattatacagagttttgtgtaaggtttataagtgaataatattgattataaaacaaatatagagtacactattataaatagtttgcgtggaatatatggcgattatatgacagcggccagtaagaaaaagcaggagatatgttatgttaaagatagatgcaagaaatccaaaggaatcggcaaaggattatgtggttagacagcttgtatacaatataattcatataaatcttattccaggacaaagaatagatgcagatgagctgagcagtcagctaaatgtaagtaagaatcctgtcagagaagctgaattagagctttcacagacacgtcttatagagattaaacctaaaataggtgtttttgtgtcatatatagacactaagatagttgatgaggtgcgggaattaaggagtgttcttgaatcagagcttgcaaggcaggcgtgtgatattctcacaaaggaacagatagatatattgtgggagaatgttgcactctggcagatgtatatgaagcgcaatgatgaagaaaaaatattccagcttgataaggaattccacaagaagatgtatgaaatgtgtggtaaagattactggtatgaactggttaataatatatcaccacattttgacagaacaacaatattaagcttcagatgcagggaggttggccgtatattaacagaccatgaagaacttgtatcagcactagaaaataaagataaggaaaaggcatatgagatatcaagacgtcatctcacacgttatacagaaaatatagcttctataagagaaagttataaagaatatttcacgggagtatagcatcataatatatatggttatcatatgcagaaacggaggttaacatggcacatttaacgataaactttagatcaaaggcacttgggatgccagttatgctggatgttcttatgccacagggcaggggaggatataaaacactgtatcttctgcatggagctggcggagatcatacaagctgggttcttaatacaaggatagcagattatgttaataacaggaatatagcggttgttatgccatctggtaagaatagattttatgttaataatgagtatggaaagaacttttatacatacataactgaggagcttgtgaatcagtgtgagcaatggtttgatataagtcgtaaagcagaggacagatatatagctggtatgtcaatgggcggatatggagcagtatatgcaggacttaagaaaccatctatgtataataccgtattttcatattcaggacttcttaatatacttgagcgttacgataagccgcaaggtatagatatgtttccagtgtttggaacaaggcagcagcttatagataataattatgatctatatacacttattaatcaggcagagaatgtgcagacaaaatatgtaatagcttgtggaacacaggatccaagaatacatatgagcagacagcttagtgaagcacttactaatggcggaataccaaatgtatatagggaaagtcctggagcacatgattttgcatactgggattattgtatagaacagacagttaagtacatatgtggggaggaatcattatggcagtaatggatataaatgtattttcagttatgttaaggcatggcatggatgtgacagttgttcttcctgatgatattgatgatgaagagcagcttaaatgtgtatggctgtatcatggtggaagcggtgataacacagaatggctgtatcatacagcacttgttgatacagttgagaaaagacattttgcagcagttcttccgaatgttgatgagtcctgctttgttaatatgaatataggaaacagatatgaaagctatgttgcaaaggagcttccatcaataatatggaatatgtttaagtgtatatctgacaaaagagaggataactatgtgtcaggatattcaaatggtggatatggctgccttcatacagttcttaagtacccacagattttttcaaaggtgggagcgttttcggcaggtgataaggctgattcagcatatgtaaatgatggaagtacaaaggctaaaggaagaatcaatctttttggagatggagatatacataatacagattattgtcttacatatcttgcagacaagctgactgcggctgatacagatattataccagacgtatatcacgcatgcggaggcagagatccatggcttgatatgaatcatattgtaagagattattttcttgaacataaggatgtgtataagaattatgtgtatgatgagatagaggaacttgggcatgagtggcgtttctgggatatagagcttaacaggttcctggattatgccggtcttaaagaagtaagaccagcaaaggtctagataatcttattttatgatgtgcgtaagcggtaagtgaaagaagatgtaaaatgaaaaaatacatagttaaagatattgaagagccggactttggatgtgaaggtcttttggatggacaggttataactgataaagttatacttgaggctaagaacggagatattattagcattgatgtagcagatgcatatctgtacgagaaagatataaatgttggtgatagtgtctatatagataaatcagcggaaaatgttataacaaagtgttaatgacattcaataaaaaattaattggtataaaatagctacaaatagtaaagagaatattatttggaaacggaggagtattatggttaaagtgacacttggaagcacaggaataacagttaacaaaaatggtttcggagcgcttccaatacaaagaataagtcatgaaagttcgacagatatattaaggagagcttatgaggctggcatagatttctacgatacagcgagattttatactgacagcgaatgcaagttaggggaggcactttctgatgtgagggagcatatatacatagctacaaaaactgcagcaaaaaatgcggacgaattctggaaagacctaactacaagtcttgataatttaaagacagattatattgatatatatcagttccataatccggcagtttgtccaaagccgggtgatggcagcggattgtatgaagctatgtgtgaggctaaagaacagggcaggataagacatattggaataactaaccacagacttaatgttgccaatgaagcaatagagtctggactatatgaaacattacagtttccttttaattatcttgcaacagaaaaagagcataagctggttgatgactgcagaaagcataatatgggatttatagctatgaaagcactttctggaggacttataactgattcaaaggtggcatatgcatatcaggctgaatataataatgtgcttccaatatggggaatacagagaatgtcagagcttgaggagtttataagctatatagataatccaccagttatggatgatgagataaagtcagtcatagaaaaagataagaaagagctggcaggcaacttctgccgtggctgcggttattgtatgcctacatgtccggcacatatagagattaacaactgtgcaagaatgtcccttcttcttagaagatcgccatcagagcttcagcttacagaggctgtacaggcaaagatgaagaaaatagaagattgtatcgactgtggacaatgtaaggcacactgcccatatggacttgatacgccaaagcttcttcgtgataactataaggattatatcgaggtgcttgctggcaaaccactgtaatattaaaaaggtatatgattataaaaatcagcacataatacatatgcatcatgaagcatttttaatgcatcaatggatggcaggatttatttctggtattcatatctgaagtaagcatgttaggaaaagaggtatatgtatgttgttgacagaaaaagaaatgacagtattaaaggaccttcagacacaggagaaaagctgtgttgataagtatgaaaggtatacaggtcttgcaaaggatgaagagttaaagcagctttttggtgaactgaagaaaaaggagcaggagcactataagacaataagtggaatgttaaatggtgatgtgccatcttgtgattgtaacgatacggcaggaaaggactataagccggaaggtcattattcaaagagtgaagactcagaggataaaattaatgactgttttcttgctacagattgtataggaacagaaaaactggtatctggcgagtataatactaacgtatttgcatgttgtgcatcagatataagaaaggtactcgctgatattcagatagaagaacagaatcatgccgaaatgctttataagtataagatggcaaatggtatgcagtagttgaaagagtgaatattcagataatttaacacaataatcaaaatatataaggtgtcatgaacaattattgcaatttcatggcactttatttttattttataaatttatattttctttcgaagcattttattgacaaatcagtttggcattagtatacttaaaatagtttcctaacgaactaattgatatatgcatgtaaatagcagataaaataagcattaagttatattaaagttagaaatgaaaggataattatggatgcatatgatcttataacatcaggcgcacagattagaaaacttattacaaagtatgttgaacctattatgcaggagtatggtttaagaccggttgaactagatatattggagtttataaaaagagaaaacttaacaacatccaaagagattatgttaagaagccatatatccaagtcacatatatccaagtcattagaccatcttttagaaaaggggtacattaacatgacagaggatgaaaatgaccatagaattatgcgtattacgttaacgcaggattcatacaaggttatcagccgggtgaatgatgtatatgaacaatgtaagaatgtactgctaagggggatatcagacgaagaaatgcatatattcaggaagattattcataagatgaataacaatgtagatgaagaattgctgatgtaatcagacagaaaggaagtatgtatgatggaaaagtggaatcagacgatggagaatatgaacggctatgttaagaaacaatcagatatgtgtatagagaatgatagtataccaaaggctttatatgctgattatggagttaaaaagggcttgcgtgatgagaacggacagggagttcttacaggacttacaaacatatcaagtgtaagagcttttgatgtaattgatggtgaaaaggtgccttgcgatggtgagcttctttacaggggatatgatgtaacacagcttgtaaaaggtgctggtgataaaagatttatattcgaggaagcagcgtatcttttgttgtttggcgaacttccagatgcagcacagcttgaagaattcagacatattatagctgactgtatggtactcccaactaactttaccagagatgttattatgaaagcctctacatcagatatcatgaattctatgacaagaagtatacttacacttgcctcatatgatcctaaaaaagatgacctgagtatagaaaatgtattaagacaaagtatacagcttataagtacattccctatgctggcagtttatggatatcatgcttacaatcattatgaaagagatgacagtatgtatattcacagaccagataaggagctttctgttgcagagaactttcttagaatgttaagaccagatatgaaatatacagcacttgaaacacatgtgcttgatatagcacttcttttacatatggagcatggtggtggtaataattcatcatttacaacaagagttgtcacatcatcaggctcagatacttattcagccatagcggcagctatgtcatcgcttaagggaagaaaacatggtggagctaaccttatggttatgaatatgatggatgatataagggcgcatgttaaggattatcatgatgaggaagaaatagaacattatcttgacaaaatattaaacaaacaagcatttgataaaaagggacttatatatggtatgggccatgctgtatattcactctcagatccaagagagaaagtgtttaagggctttgttgaacagcttgcaaaagctaagggtaagacagatgatatgacactttataataatatagaaaagattgcacctatgctcatagcgaaggaaagaaagatatttaagggagtaagccctaatgtcgatttctatagtggattcgtatatgatatgcttgacatcccaagagagttatatactcctctttttgccatagcaagaatagtaggctggagtgcccataggatagaagaacttgttactactgataagataatacgtcctgcatataagagccttgttaccaagagagaatacgtagacagacttcatagagattagtgtgaaaaagaaagggatatatatggaaagagaagaaagagtttttccgtcatcgagtggaatgtgcaatatacatactgtaatatggtatccggataacagcatatatagctatcctgtaggggttatccagattgcacatggaatgatagaccatattgaaagatttgaggaaatggcagaattctttgctggcaaaggctttgtagttgctggtaatgatcatcttggacatggtgattcaataaatgatgaagaagattatggatattttgcaaagggatgccatggagcagattatcttatcaaggatatgcacaggcttacacgcattatgaaaaaaatgtatagagatattccatatattcttatcgggcatagcatgggttcatttatggctagaaagtatgcatgcatatatggtgatgaactggatggtgtcatattccttggaacaggtaaccagccaaagtcggttgttaatgccgggttaaagcttgcacatatggctaagcttgtacatggagacagatatagaagcaggcttattaataaattgatgtttggaacatacaataagcgtatcaaggataacagaaccgatagtgactggcttacaaaggacacagcaatagtagatgaatataccgcagatccaaagtgctcttatatgtttactaccaatggatatataggcttccttaatgttatcagatttgatataaatgaaaaaaatatagcaagaacaccagctgcacttccagtactctttgcatcaggagaagatgatccagttggagattatggaaaggcagtaaaaaaggtgtttaaactttatacaaaatatgttgataacgtggaactcagattatatgaggatgacagacatgagcttcatagtgaaactaacaggcaggaagtgtttgaggatctgttagaatggattgagtcagatgttctggcatatgatatagactgatgtatgattcaatataaggaagcaatacttgaattaaatacttgaattaaaaataatgtggttttaaaaactacttgttaaaacataaaggctacattttgtaatattaataccatgaagtgttgacaaataattaacacaggggtacaatactacaaaattgtagcttttcttatatgtcaggagtgtgatgatgtcaggaagtaaaaaacataattccaataaaaaaatatattatagtacatatacagatgatgttgtagaaagcagcaaccagaattacagacttaagtcagggtacagatggataaataacaatgtatttcataaggctggttcacatattatatatggtattgctgttatagccgggttagctggctgtaagcttgtctggggaataagttataagaacaaaaaaatacttagggaatgtatagataaaggctattttatatatgcgaatcatacacagcctgtcggagatgtagttattccagctatttcatgtataagaaaaagggtgtatgtcatagttagtcaggcaaactatggaatacctgttattggtaagcttcttcctatgttaggagcacttcccattccggattccataagtgaatataaaaaattcacaaaagcatataagaaacgtatatcagaaggacatccggttgttatatatcctgaagcacacgtgtggccatattataataaaataagaccttttgaaaagacatcattcagatttccagcagagcttggtgcaccggtttatgctatgactacaacctatacaagacgaaagctttttggaagagctatgaaaagaccaaagattaatgtatatgtagatggcccatattatgttgatgataatctttctgtaaaggataatcagcagctgcttcacgataaagtatatgaagttatgaacatgagaagtaaacaaagtgattatgaatatatacaatatatacattgcagccataatagtgccgtagataaagacaaaagccattaaaagcatggcagaggagactactaaccatatgaatatattattttgcggagacagaaatgttcaggatggtctgctgatagcagttctttctcttttagagaatacagaggagcattttgatatatatgttttaaccttgaatatgactatgaatgaaaaaatatatagtccaattgaagcatcatttatagattatcttaacaatgaggtttcagcacaatatgatgacaggttatatattaagcttatagatacaacaagtctttttaaaggcgaaacacctgatgctaatctgtcaacaagatttacaccttgttgtatgttaaggctttttgctgataagattgatgagattcctgacaggatattatatcttgacacagatattatatgcagaaaagattttggggatttttactaccagaatatggaaggtgttgagcttgcaggtgtgcttgattactatgggagctggttctttagaaaaaatattttaaaaagggattatcttaactcaggtgtacttcttatgaacatgtcagaactaagaaaaacaggtcttcttagtaaatgccgtcatatgtgtacaacaaaaaagatgtttatgccagatcagtctgcgcttaacaagctttcagtgtcaaaacgtatatgtgaaagaaaatataatgaccagagaaggcttcatatagatacagtattccagcattttacaacgcattttaagttctttccatatgttaggacggaaactgtaaaaccatggcagacagaggaagtgacaacagtattacgtataccggagacagaatataaagcattgtttgacaggtattatgatgttaagaaaagtatcaggttgtctgatgcagataaacagggaaagggagaattgtatgtataataaagatgaattaataccaatattttttacaatagatgatggatatgcaccatatcttcacgttgcacttatatcacttatagagaatgcttcagaggatagaaagtataagattatagttgtatatcaggagcttaacgaagaaaacagaaataatcttgcagctttggtaaagaatcatccaaactttgagattgagtttaagtatatgaaacagagccttgatatgataacagacagaattgagaacaggcttcgttcagattactttacaatgactatatattttagaatattcataccggatatgtatacggaatatgataaggctatatatatagacagtgatatagtagtgcctggtgatatatcagagttatatgatacagatatgcataataatcttattggtgttgttaaggatggctcggttaatgacgttgcggagcttcaaagatacatgacagagtcacttggacttaagcttggcgattattttaattctggtatgcttcttatgaatatgaaggaactgcgcaatgtaaagcttgcagagcatttcctttatcttcttaataagtaccactttgattgtgttgcaccagatcaggattatcttaattctatgtgttatggaaagatagagtatcttgattcgtgctgggatgcaatgcctaacaggaataaaccggagattaagaatcctaagattattcactataacctgtttgataagccttggtgctatgatgatatacagtatcaggattatttctggaaatatgccagacagtctgtatattatgaccagataaaagcatttaaggctgcttatacagataagcagaaggaggatgaccatacacatcttctggatcttttcagaagagcaggcactaacgctgatacagaggttacatttagaaaagtgcttgaaagtggagaaaagataagattatgattctgggtggcagtaaaaaagaggttattaagaatataaaagaagcagcagatactggaagattcaacgataaagtggaaacgggagatcctgaattaagtactgcacaacgcaaaagattacttggaaagtatgtaaaacaacgtaatgagcttccgtatcattatcgtaacgggatggcaagacgtatagtagatatcgtgacgtttggtgttaatataagaacaaaggttgttggagctgaaaagataaagaacataaaaacaggagctataataacaagtaatcattttaatccagtagatacaactattgtccgttatggcataaagaaagtcagaaaatacagaatgttcatcataagtcaggatactaactttgctatgaagggactggttggcttccttatgagatatgctgatgagatacctataagtaaagataaggaatatatgaacagacatttttaccggacactgaataatctgcttgtaaacaagcacgaatatatccttatatatcctgagcaggaaatgtggcttaattatcgtaaaccaaggccaccaaagcgtggtgcgtatctgtatgctgctaagtttaatgttcctataatatcatgttttgttgagatggttgatacagataaggacgacacaaaggagtttaagaaggttaaatatgtacttcatatattagatccgatatatccggatcctgagaaaaatgaacgggataacagctttgatatgatgagaagggactatatgcagaaaaaggaagcatatgaaaaagcatatggaaagccacttgaatatgcctttgaaccgtctgatatcgcaggctggaagggcgaagagcttgaataacacataaatattcagtaacataatattatttatgacatatctatgacacatctgtcaggcaatatacctgatggatgtgttttttaatgaaaaaatatatcagcagctgtccgaaaaaatacttgcaatatacccggtaggggtatatattgtatgtggaaatattaatagctgttaagattaaggacaaggagaacggtatggcagaggataaaaaatgttgttgtaaaaaaaagaaagaacgtaccgattcagaaaaaaagctgcttttgaacagattaaaaagaatagaaggccagataaggggaatatatggtatggttgaggatgatgcatattgtatagatattcttaatcagtcgttagcagctaatgctgcattgacagcatttgataaagcattgttgtctaatcatataaagacatgtgtggttgaagatattaaaaatggtgatgatgaagtcgtagatgaacttgtcatgacactgcagaagtttatgaagtaagttttttgttttatcaatgaaaagaagaaacttatgagcttacaaatatataggatacccgggtcaaaaggtctaagctcatgggtgtgtgagtgcgtagcacgaaacaatctgtaggtatcaaagtcgtgggattttgccccagacatcatatataatgcaatgtcaggagaagtataaaaggaataaagaaaagaggtatgaatatgggaacggcggttatattagtagtacttgttattatagttgtatttgcagtaagaagtggtattaaacatggtaaaggtgaaggcggctgctgcggtggtggtagttcggtaaaagaagagaaaaaagtgcttactggtgatattattgctactaaaatagtaagtattgaaggaatgcattgtgaaaactgcaaaaatagtatcgaacatcagataaacagaatagatggagcatcatgcgaggttaatctaaaaaagaaaacagctgtcataaagctggataagcctgttgatgatgataccataagaagatctatagaaagacttgattttaaggttttggatataaagaatgcataatatatttaatccatgtttataaatcaggtaagaaggtcagaaaggataataaatatgcaacagtataatgtaacaggaatgacatgtgcagcctgccaggcaagggttgaaaaggctgtggcaaaggtagatggtgtcacaagctgttcagtaagtcttcttacgaattctatgggagtagaaggaacggctatggcacaggatataataaaagcagtagaggatgcaggatatggagcatctgaaaggaatgaaggagcaaagtcttttgacggacatagcaaaaattcagttatatcaggtcttgaagagtctcttaaggatacaacaactccgttattagctaaaagacttgtagcatctttagtatttctgctgatacttatgtattttagcatgggacatatgatgtggggatggccgcttcctaaagtgcttgaagataatcatgtggctatgggacttatccagatgttacttacgattattattatggtaatcaatcagcatttttttataagtggtataaaaagtgctcttcatggttcgccaaacatggatacgcttgttgcactaggttctggcgcagcatttttatacagtacatatgcgctttttgccatgacggatgcacagctgcatatggatatggatcaggtcatgcactatatgcatgagttttattttgaatcagcagctatgattcttacgctgattactataggcaagatgcttgaggcacattcaaagggaaagacaacggatgcacttaagagccttatgaagcttgctgcaacaacagcaactataattatagatggagaagaaaaacaggttcctgtggaacaggtatcaaagggtgatatatttgtagttaaaccgggtgagaatataccagtagatggagaaatcatagaaggaagcagtgcggttaatgaatcagcacttacaggtgagagtataccagtagataaaaacattggagatacaatatctgcagcaacgcttaacacatcaggatatcttaagtgtaaggcaacaagagttggggaggatacaactctttcacagataatccagatggtcagtgatgcagcagcaacaaaggcacctatagcaaagatagccgataaggtttcaggagtattcgtgcctgctgttatagctattgcatttgtaactataattatctggcttatagcaggacaaagcataggatttgcgcttgcaaggggaatatcagtgcttgtaataagctgtccttgtgcactcggacttgcaacaccagtagctattatggtaggaaatggtgtaggtgcaaagaatggaattatgtttaagactgctatatcgcttgaacagacaggaaagatgcagatagctgcacttgataagactggtactataacagctggtgaaccggttgttacagatgtaataccggattcaggaataagtacacataagcttttatctatagctaaaatgcttgaagcaagaagtgagcatccactcgcaaaggcaatagtcagttatgatatgaagcagacggaaaacgacaataatacagttgattatgattcaatactcacgataactgaatcaaaggcagttgccggaaatgggctttctggacaggcagtctgcaatgctgatatacctgaagataatgttaaggcatcagacagacttaaactatatggcggtaatgccagatacgtaagccagataattgatataccatcagacatgataaagatatctgagcagttatcagatgatggaaagactccgatgttttttgcaacggataaagaattcttaggaataatcgctgttgctgatacgataaaggaagatagtccggaagctataaagcagcttaaggatatgggactttatgttgtcatgataacaggagataacgaaaaaagtgccaatgccattggaaaaatagcaggagttgatgaggtcgttgcaggagttcttccagatggaaaggaaaaggagatacgaagacttaaaaagtatggccgggttataatggtaggtgatggtatcaatgatgcgccggctttaacaacagctgatataggaatagctattggtgccggtacagatgttgctattgatgcagcagatgtagtgcttatgaagagcagattaagtgatgtagcagcagctatcaggcttagccatagaacgataagaaatatacatgagaatctgttctgggcatttatatataatattataggaatcccccttgcagcaggagcgtggatacatcttcttggatggcagatgaatcctatgtttggtgcagcggccatgagtctttcaagcttctgtgtagtaacgaatgcgctaaggcttaatcttgttaaggtatatgatacttcaagagattcaaggtataaaaaaactgcacatagaaaaggacttatagttaataacaccggtgtaaaaaacacaggtgtttatgccggagacggcaataaagataatatatcttataaaaatgatgaagaaaagaaagaggtaactagtgtgaaaaataagatttttcacacgcaagatttgtgcttacgcacaaacttgagatgcgcaaaagacagcgcaagaaaggagattattatgacaaagacaatgaatattgaaggaatgatgtgtggacattgcgaggcaagagtaaaaaaggcgttagaagcagtaagtggagtaagcgaagcagtagtaagccatgaaaatggtacagcagttgttacacttacacaagatgtttcagatgatgtgcttaagaaggcagtagaagaccaggattataaggttacgggaattacagcctgaaataatattgttgtttagcacagttgattcatagtatttatgttgacgtattatattgctgcatttatattgacgaacggacgctataaggcttgtgaggtattttaagaataatgctacagtcaccagaaagctgattggatatttctaagatattctatgtaggtattgtttacgaacgcaaacgctcatacgaaacatccatgtttcgttttcgctcgattatacatccatgtataatcgttgctggatattgaaggaatatctaagaactatcacaatcagctttcaagtgttccttacgcgttattcttaaaatacctcacaagccttatggctgtctttggcataatataatattaaaacctactctgctgtgttgatacaatgaaaagtcagaaaaaggtgggattgagtacattgtgtccaatcccacctatgtattttatattgaagtggtggaaattgactctatatgagaaaaagctaatctgggtcatattttaatgattgataagccaggaaattatgacccaatatgagaaaaagctaatctgggtcatattttaatgattgataagccggaaaattatgacccaatatgagaaaaagctaatctgggtcatattttaatgattgataagccggaaaattatgacccaatatgcgaaaatgacaatctgggtcacatttcacagcatgattagcaaaaatattatgaccctatttgcaaaattgctaatctgggtcatattcgctgtaagaaaaaggaagaaaaatttgacccagattagctttttcgtatattgggtcacttttccatttcctacttcaatagagaatacatattaggatttagcgctttacgcacaattccgccctgtttcgtcaccttgatttaattgaagcttctggcattgaacatagtgtgcaggactgcctgtagcttatatttgtcgtccgttcgtcaactaatgaaatttaattaaactggaaaattaattaaatcgttaattaaacaacaataactacttacatcttttgacaaatatgttatactatgtacgaatatgctgatgatacaataagtataattagtaaagagataccaatggtaaaaagataccaatggtaaagagataccaatggtaaaaataccattagaaaagacatacaatcaggaggaatgtaaacatgttatctacagatgctaacatattaaagataaagcacgaaatattatatcaagttgctaagcttgcttacgcaggagagcttgaggaaaagaaggaagaacttccatacgaacttcttcctggaccacaggctaagtatagatgctgcgtatataaggaaagagaagttgtaagacaaagaatcagacttgttgagggtaaatgtccatcagaaacacctaagacaggaaaggataatgtggtacaagttatagaggcagcttgtgcagactgtccactttcacattatatcgtaacagataactgcagaaagtgcatggctaaggcatgtcagcaggcatgtaagtttggcgctgtatctatgggaagagacagggcttatatagatcctgataagtgtaaggagtgtggtcagtgtgcaaaggcctgtccatataatgctatagcagaccttataagaccatgtaaaaagatatgtcctgttggagcgattaccatggatgagaatggtatttgtgaaatagatgacagcaaatgtataaagtgcggacagtgtatacatgcctgcccatttggtgctataggctctaagacagatatagtagatgttataaaggaaatgagagctggtaagagagttgtggctatggttgctcctgcaatcgaaggctcattcggtgctgatattactatggacagcataagaacagcatgtaagaagattgggtttgaagatatgtatgaggttgccattggtggcgatcttactgctggttcagaagctaaggaatggcttgaagctaacagggaaggcaaaaagatgactacatcatgttgtcctgcatttgttaatatgattaagaagcattttccagaacttacagataatatatcaacaacagtttcacctatgtgtgcagtttcaagaatgttaaaggcaaaggatccagagattgttacagtattcataggaccatgtattgcaaaaaaggatgaaagaagagatacatctataaaaggtaatgcagattacgtactcacagtaggagagttcagagcaatgctaagggcaaagaatgtaaagatagagcctgaggctaatgcaaatcagcaggcaagtgtatatggtaaaagatttggtaatggtggtggagtaacagctgctgttatagaatgtatgaaagagcttggagaagatccatcaaagtttactatagaaaaatgtgccggaggtatggagtgtaaaaaagcacttacattacttaagatgggcagactcccagctgattttgtagagggtatggcatgtgaaggcggatgtgttggtggaccaagccatcatcgttccaataagaatgaggcactggtagctaaggacagggataagcttttatctgaggcagattcaaggggtgtttatgagaaccttaagaattatgaaacagatagcttttctatgcataaatgttagaattacttttcagacagtaaaggaaatagtgaatatgagatatgatggaataaaaaagatccttgatggaaagtttataagcagatatgatattacatacacaactgaggaaaataaaacaaaggtatatgaaataataagccgtaataagaatataacatccatagcagatcttaagaatccatcacctgatggtgtagttatagttgtgactgatacaaagggtgagaagcttcttcttaacaaagaatacagaatggcagtaggagattatgtttataatttccctgccggacttattgatgctggtgaaacagctgaggttgcagcagcaagggagctgaaggaagaaacaggacttcagcttgtaagcataaaggatacacttttcgacagttatagtgctataggtttttctaatgagactaacagggttgttattggtatggctgatggaacgttttcaaagagtacatctgctgtagaagagatatcagctgcgtggtatacaaaggcagagataagggagcttcttaagaataacaggtttgcagcaagaacgcaggcgttttgttatatgtgggcgaagaatggagattaaaccatatgaaaaaagtaaaaaagacagcgctgataagtattttgtttacaacatttgccagcatgtttcttatgatatcgggatgtggtaaaaagtatcaggagatagcactgtacaagtatatagaaaatactgatggaacattgacgattactgagcttacagataaaggcagatcagaatatgagcttactgtaccggctatgcttgatggtaaaaaggttttagctataggagatggagcctttagggatgatacatttataaagaaagttgttatagaagacggaatagagagcataggttctaatgcttttttatcatgctataatcttgcagatatagatatacctgagtcagttacagatataggaatgcatgcatttacacagacagcatggcatgaaacacagctggaatcttcaaaggatattgtcataaacaatatattatgtgaggcggattctcagcaggagagctatactataagagatggagttgtaacaatatcgccaggagtgttttataataatactgtattaaaaaaagtggattttccatcatctttaaagaaaatcggagccaatgcatttgcaggctgtaagaatcttacagaggcagtgcttccggatggacttgaaactataggttatggagtttttgctgacagcggtattaaagagataaatgttccaaaaagtgtcaaaagtataggacaggatgcatttttaggaatagataaagtgaatatgaacagataagctgcattattgtttaaagtatctgaaaaaatgtaacaaaaagtcataaagctgataaaaagatgccgggggtttgtgcccaatggcattaagttaagggcgatgaagagaagttagtatcgttttttgatattaacttctcttttcttttttatgtttcagttagaattcatacgtgc

SEQ ID NO: 330 - DNA, 267947 bp, Unknown
  gut microbiota DNA sequence
ggatgtcccgtatcgaacggtagcggcagtagtcacaacctataagaaaagtcttagaaatatccaattgaaacttctggcatcgatgatgtatgtgcagcaccgattttcacttatattatgtcgtcagttcgtcaaccgaatgtttgctaaacaacaatatttcaatgtgaccgcctattaatatactctgtcttatacttagaataaattatcttctggctgttatataagctgtaatatccagaaagcatataactaattgcaatgcatattataacatatttaatagaagcagctccaaacatttctatagatataataaaagatgtaagagggcagttggtaacaccgcagaatacacttaccattccgcaggcagcgcataagcctataggaagaccgaatataggagcaaggaagcttccaagtgttgcgcctacaaagagagttggtactatttcgccgcccttaaatccaccgccaagcgttgcagctgtgaatatcatcttcaggataaacacataccatgcacaacttgataaaaagctcgatgctataactggtgcaccagctcctagataatcagttgttccggttatgtatcttagaaggataactaatataccggcagtcacaatccttatatatggattttctaagtatgtcgaataaattctggaagatgtatgcagcatatagcagaaggcaatacttacaagagcaaaaagtattgacatgataattaagcgtaaacatgttgatacgttaaaactgcatatatcaccgatagtaaaagttgtaggtgtgacacctaaaagtccagctatgccttgtgctgtaagtgaggatattatacatggaactaatgccgcatagtacatcacaccaacacttataacttccatggaaaatacagctgcagctattggcgttccgaacaaagctgaaaaacaggcactcatgccacacatgatcatgattctggtatctttatcatcaaaattaaaaagcttggcaaagaaatcacctaaagaaccgccaacctgtagtgcagcaccttcacgtccagcagaaccgccacatagatgtgtcagtaatgttgatataataataagaggagttacttttacgggaacctcaacattagactgtatggcagttatgacaagattggtaccagtattgtcagcttcgtttgtcagtctatatataaaaacgataatgattccagcaagtggaagaaaaaaaagcgtaaagctgtaagttgtccggatgtttgttacatattgtaagcatttgtaaaaaagagcacctataagtccgataacagaaccagaaagtacagaacataacagccatttgacgagcgtaaatgctgccatacgggctctttggagtgtttcaagagctatatctggatgaacatctaatatatctattagtcttttcgtttctagtaatcttttcattggtcaaacctctttttactcatattactgttatggtattctgaatcgttagtaacatcttttataaagaaatccggagcaatatagttatcagcttcttctacagttgaaaattccacttcagcaagaacagtaccttcaaatacaccttcaaatatatcaagctctatagtgtgtcctgaattgtcaggaagctcgtatctttttttgcttatgatattgccatctgcctttttaataagatgttcataggcttccctggttaatggaagattatattcttcacgtaccatcatacctttacctttatatgtcagataatatttatcattgtcacgtcttactctgacaacagggttggttgaaagatacccctgttctatatgccggcagtggaattcatcaagattatccggtatatgtgaaacaagatattttttttctatttccatatctgtttatatcctttcagctttttattaacaatcaggccttcatctgatatggataactgcctgcatatcaaaaaagactgccacctaagtgacagtcgtaatgttatcagaaaaatcacttttcctaaattacttattaacagtatcctttaaagctctaccagccttgaacttaggtgccttagatgcagggatctgaatttcctcttttgtctgagggttcttacctgttcttgcagctctttcagcaacttcaaatgtaccgaaaccgattaactgaaccttatcaccattctgtaatgtttcagcaactgtttctgtgaatgcctttaaagccttttcagcgtccttcttagaaagttcagccttctctgcgattgcagcaactaactctgtcttattcataataaactacatcctccttaaatgaaataagtaataataagtataaattatttatactccataagagtacttttgtcaataaaaaccacttaagaattgccttttttcggcatttttcgtgagttttgaggtggaaaatctgcctactaaagtgattacatgtctgtaagttcaccccatctgtcatacagtttatcaagttccttacttaactcttctttttcagtatggatttccataagctttgctgtatcactgcttatagcaggatctgcatacatattatcaagcttatctatacgttcttcaatatttgctatacgttcttctgtgcgctttagttcattttttattttcttaagctgagcctgttttactttctcttcctgccagcttgctttagaatcagcagcttttttagcatgctctatatcagcagaggatactgtattaacaggttttgcactaagtatatcccttttttcaagataataatcatagtttccaatataatttacaacagttttgttagaaagctcgattattcttgttgcagcagcatttataaaataacggtcatgtgatacaaaaagaacagtgcctgtatagttgttaagtgcattttcaagtatttccttggatacaatatcaagatggtttgtcggctcatcaagaataaggaagttagcattggacagcataagcttggcaagggaaacacgtcccttttctccaccgcttaagtcacgtatgtacttgaatacatcttcgttggtgaataaaaatgcagcaagtgtgttacgtatctgggtgttgttcaggtcaggatatgcatccctgatttcatcaaaaatagttttatcagggtcaagaacatgatgctcctggtcataatatccaatattaactttagcgccaagatatatagaaccagaatcaggttctataataccgtttataagcttaaggatagtggtttttcctgttccgttattaccaataagggcaacacgttcgccacgtttgatttcaatatcaatattgtcaaaaagagtaacatcatcaaagcttttagaaagaccagatattgtaagaacatcattaccgctgactacgttaggttcaagctttatgttcattttgtcgtttaattcctgaggtttatcgacaatttctattttatcaagcattttttcacggctttcagctcttttgattgatttttcgcgattgaattgcttgagctttgttataacgtcttcctgatgttttatttctctttgttggtttaagtactccttaagcttcatgtttctaaggattgcttttttggcagcataatcagtatagtttccagagaatacagtagccactccattatcaagctctatgattttgcttactattttatcaaggaagtagcggtcatgggctacaataagaacagcaccattatagttaagaagataattctcaagccagcggatagactccatatcaagatgattggtaggctcgtcaagaagaataatatcaggctttgcaagaagcagcctgccaagggcaactcttgttttctggccacctgaaagtgtatttacattaagtgtgaaatcttcctcagagaaaccaagtcctttaaggactcctgttatttcacttttatatgcatatccgttttccatttcaaacctgtgattcaggtcggaatattttttcatgaggttttcaagttcatcaccgtcagctgtattcatgcgtttttcgatggaacggagttccttctccatatcaagaatatattgttttacggataataattcgtcatatatagtattatcacttccaaggttttgctgctgtgcaagatatcctagggttttgtctttagctaaagtgacaagaccggtatcagcaggctctatacctgtgattattttaagaagagttgatttgccagctccgttgatacctacaatggcggctttttcgtggtcttcaatattaaacgaacatgattttattattacatcagttccaaatgatttacttatattattacaagataatatcatagatgaaatcctttccatatctgttctttttctgatttgtataaatatcactgtgtcttaagtaaaaagtctttttgcagaaataaataactttctatgttttgacacatacatcataatatactgttttttatattaaaatgcaaaggctttaatatatatcaggggataatctgaggaatatcaggggaatatcaggggaaaacaccatttgtccaggcagcataataaaaaagtggtaagaaaaagatttaataattttgacttatttacatctgtaatgtattattagatattagggtcaaaaggtctaaactcacataaagccgccccaatatgaacataaaagagggatgataatcccacgatgatatgcgctgaaaagcagcgcaagaatggagggtattatgtgccagaggcttttgactaagacatttttataagtcagacataaataaaagaaatgaggaaatgaatgaaattcgaagagttaaatattgatgaaagaatattaagggcaattgaggatatgggttttgaagaaacctcacctatacagacacaggctattccagcagtatgtgaggggatagatgtagtgggacaggcgcagacaggtacaggtaagacagcagcttacactatcccaatgcttatgaagatagatccacagataaagaagccacaggcgattgtattatgtcctacaagagagcttgcagtacaggttgcggaagagattcgaaagcttgccaaatatatgagtgacataaaggttttacctgtatatggaggccaggagatagtaagacagattaagtctttaaagacaggcgtgcagattatagttggtacacctggaagagttatggatcatatgagaagaaaaacagttaagtttgataatatcaatatggttattcttgatgaggctgatgagatgcttgatatgggattcagggaagatatggaaactattcttactgaaactccgcaggacagacagacggttatgttttcagcaactatgccaaaggctatcatggatatagcaagaaatttccagaaggatgccagggttataaaggtagtaagaaaagaacttactgtatctaatatagagcagttctactatgaagtaagacctaagaataaaacagaggtgttatgcaggcttatagatatatataacccaagactttccgtagtattctgtaatacgaaaagacaggttgatgagcttatatctgaacttaagggcagaggatattttgcagatggaatacatggagatatgaagcagcagcaaagagacagagttatggatgatttcagaagtggaaatgtagatattcttatagctactgatgttgcagcaagaggtattgatgttgatgatgttgacatggtgtttaactatgacataccacaggatgaagaatattatgtacacaggataggacgtacaggacgtgctggaaggtcaggcatggcactgtctttcataagtggtaaggaagtatataagcttaaggatatagaaagatactgtaagactaagatacttgccaagccagttccatcacttgatgatgttaagaatacaaagcttgataatatgtttgataagattaagcagactattgaagagggcggccttacagatatggttaatcttgtggaggaacatgtcaaccaggaagaatatacatctatggacatggcagcagcacttcttaaaatgcttatcggggatactcttgacagagtagatgaggtagaggatttccacttcgatatggacagagatgattcaagaatggtaagactcttcataaatataggaaagaaagataagataaagccatctaatattcttggtgctattgctggagagtcaggaatgccaggaaagcttgttggtgccatagatatgatggataactatacatttgttgatgtaccagctattcatgctgaaaaggtgcttaaggccatgaatgataacgttcttataaagggacgtcgtgttaatatggaaaaagccaatcagacgcgtggcaagagccatggaaagtcaaagcataagggtaaggacagagctaagaaaaacagagacagataaataaagaaaggagcattctgatgaaaaagcagattatgcttgagcgcataaaccgtaaggaagtcttaagatatctggggtataagggaatcagtgctgatgatacagtaaacatgcttatagatgagtgtgaggcagaggttatcaaggcagcagttccaagatatacctatagagttacaggagtgacacagactgctgatggcgtagagcttgatggtacaggacttatactgagaggtaattcgataaaagaacatcttaaaggatgtgacagggcagcacttatagcagttacattatctgagggaatagacagaatgctccgtattatgcagactttggatcttgcaaaggccgttgtttcagacagtctcgcaagtgccgcaatagagcaggtatgcgataagttagaagccatcataaaagaagaactcccggaatataaccagacctttcgttttggcataggatatggggatcttccattatcacagcagggggagttcttaaaggtgcttaacgcaccaaagcttatagggcttaatgtaggaaaaacggatatgatggtgccaacaaagtcagttacggcggttataggacttactacgggagaagtaagtgcaaagaataagggatgcatgtcatgtaatctcaaaggtacatgcagcttcagggaatcaggaggacattgcaatggataataagcttaaagaacttttaaagaaggattatgtgatccttgatggcggtatgggaacgatgctgcaggctgcaggcatgaagatgggtgaaacaccagagatgttaaatattacgcagccagagcttcttatatctatacatgaaaagtatcttaatgctggttcagatatcatatatgccaatacatttggaggaaacagatataagcttgaggaatgtgggcattcagttcatgagcttgttactgctggtattaagaatgcaagaacagcatgttataatgtcaagccagaggcacttgtagctcttgatgttggacctataggacagttgcttgaacctacaggaacactcagttttgaggaagcatatgagatgtatgctgaaatagtgaaggcaggcgaagaagcaggtgccgatcttgttgtgtttgaaactatgacagatctgcttgatgttaaggcagcagtgcttgcagctaaagaaaacagctcacttccagtcatgactaccatgacatttgaagaaaatatgcgtacatttacaggatgccagatatcagcatttgcacttacagcagcaggacttggagtagatgctcttggtgtaaactgttcacttggacctaaggagcttgaacctgttatagcagagcttacacaatggactaaccttccggttatagttaagcctaacgcaggacttccagatccggttacgaatctttacaatgttaatgcagcacagtttgcagagtttatgaaggacctaagaaaatatggaataaaggtgtttggtggctgctgtggaacaacacctgaattcataagcgcattggcagatatgcttaaaaaagagggcaatcctataaaggctccgattgttattccatcagctgtatgttctgctacgaataccgttatagtagaccagccaagagtagtaggagaaagaatcaaccctactggcaagaaggtgtttaagcaggcgcttattgataatgatatggattatatattaggacaggcacttgaacagacatcagcaggagcagatatacttgatgttaatgtaggactgcctggaatagatgaaagacagatgatgatagatacagttaagtccctgcagtctgttgttgatgtgcctttacagcttgactcaactattccagaggtgcttgattcagcattgaggatatataacggcaagcctatagttaactctgtgaatggtgaagaggaatctcttaataacattcttccgatagtaaagaagtatggagcggcagtaataggtcttgcacttgataagaatggtatacctaaaaaagcacaggacagagttgccatagctaagaagattatggacagggctgtggctataggtattcctaagcaggacatatatatagactgtcttacactgactgcctctgcagagcaggagggagttatggagacacttaatgcacttcatacagttaagcatgagctgggattaagaacagtgcttggagtatctaatatatccttcggacttcctaacagagtgcttgtcaatcatatattccttactatggccatgcagagcggacttgatcttgcaatcattaaccctaacgtatatgagatgatgggtgcagtaagagcatataagcttcttgccaacatagataagaattcagttgattatataagggcatatgcatctatgcctgatgtaagtaaaatcaatcctatgaatatgagccatggtaatgcaggaaatatatcagcaggagaaaagaaccagaattctggagcagcaggcaatatcaatcttaaagataaaaagggaagctacacatgtgatgatctgttttatgctgtggagaagggcttaaagaatgaaggctccaccataacagaggagctgctttcaactatggattcaatggatattgtaaataatgctcttattccggcacttgataagataggtgaagaatttgaaaagggcacactattccttccacagcttattatggcagcaggagtagcacagggtgcctttgaggttataagaaagcatatggttatgagcaataatgctcctgtaagcaagggtaagatagttatagcaacagttaagggtgatgtccatgatataggcaagaatatagtaaaggttctgcttgaaaactatggctatgaggttatagatcttggtaaagatgtagagtatcaggcagttgtagatgcaataagagagaatgatgcaaagctttgtgggctgtcagctcttatgacaacaacacttgtatctatgaagaaaactatagagcttatccatgagaataatcttgactgcaaggttatggttggtggagcagtgctcacaccagagtacgcagaggagatacatgctgatttttattcaaaggatgccaaggagtcggtagatattgcaaagagggttcttggataaaaaagttttgtaaaatatgatgatggttttttgcattttgacataatccgggaattgttatataattaacagagcgtttgttatccacttaagaagcaggataatatataatgaatgcccatgcagggtatttaccggattataaaatgtaatttaatagaaacagaggatagttatggaagacagtaagaaaatatcatcagccgttataaggagattgccaagatattacagatatctgggcgaattgatagagagcggcgtgcagagaatatcatctaaggatttaagtaccaagatgaaggttacagcatcacagataagacaggatcttaacaattttggtggttttggccagcagggttacggctacaatgttaaatatctatatgatgagataggaaagatccttggaataaacagaaaacattatatgattattattggcgctggtaatcttggcagggcaatcattaactatgctgactttgaaaaaagaggattcgtagtgcgtggtgtgtttgacagcaatccagagcttgaaggccaggtcatacgtgatgatataagtataatgatgatggataagctggaggattttataaagaataataacatagagatagctgcactcacgattcctaaagaagcagcaagaaaaataggccgtcgtgtagcagatgcaggaataaaggctatatggaattttgcacacacagatcttaatcttgctgatgatgttattgttgaaaatgttcatctgtcagaaagtcttatgaggctttcatataatattgccaataaaaattagttgataatttcagaataaaaagctagaatattctcgtgtttttatgaacgttgaattactaagggggattgttaatgtctgagattacgtatgattcattaaaaaataatggggtatttacgaatattcctattctaacactggatgaaagatggtatcatcttgttaatgataagataaaaactgatgaaatagcctattgggaaaagcaggttaatgaactgttaaaaaaacaaggcaggcttaatactgatatcaaggatattaagaagttaaaaaaacagctgattaaggatgttgttgagaatatggagagtgatggtgataacagagaacatgttatgaaccagaaccagagacttatacaggagtcaaaggacaagatagctaatcttgaggatgaactgatggaactaccaagagaattggcaagggctaatgaaagacttttaacagagacacttaaggtatgctatagtaagatgaattctaatcatgaggatatagaggtgcttaacaagtggatagatgctacaagagttaagcttaagaagaatattcttataaagcaggataaggaaactaacaatgagaatatgtattccttgatccatgatatcattggaccggaaaactgcagtgctgttgacagaatcaacgagggaacgcaggaaacagaataacatgactgaaaggcttggtgcatgtgcttatgaagtatatattaaatgcagatgagatgaagaaggttgatgaatattccatatctggtgttggaattccatctgttgttcttatggaaagggcagcgctgtcagttacaggacacatattggagcagattgataaaacagcaggggtacgtattatatgtatatgtggaagtggaaacaatggtgctgatggtctggctatagcaagacagctttttctaaaaggttataaggttgacgtttttttgaatgaaggaagacattcaacacaggaatatagaatacaattgaacataataagaaatctgggcatacaatgtattgatgacccggatttttctggttatggagttatagtagatgctctttttggaaacgggttatcagggagtcttaaggaaaaagctgcctgtatagtggataatattaataaagcacatagtaaaggtgcttatgttacagctgttgatattccctcaggcataagtgcaacgagcggcatggttttaggatgtgcggttaaggcagatacaacggtgacatttggttatagaaaggtgggacagctgctttatccaggagcagcttattgtgggaatcttataacggctgatataggttttgctgaatataaagatatgccaaggaataaatatatatatgaagagtcagatgcagcaaaaaatattattaaaagaaagcctgacagtaacaaaggcagctgtggaaaagcactgattattgctggctcaaagcagtatggtggggcggcagtcctggcatcacaggcagcatacaggatgggtgcagggcttgtgaagctgataacacacagtgataacagaaatatcgttcttaataataatgttgaatgtcttcttgatatatatagtgatggggagtttttagaacctgaggcatcagtcatatggtcagatgcaatatgtataggtcccggactttctaaatgtgatatggcattaaagtatgtcagatatatagcagaaagaactgataagaaaagactttttgatgcagatgcacttaacatatcagtggagaagcagataacatttcatggaaataatgttgttgttacgccacatataggagaaatgtcaagactgacaggaaaaagcatagcggatataaaagcagatataacagggacggcagtcagctatgcacgtgaacataactgtatatgtgtgttaaaggatgcaagaacggtggttacagacggaaaagatatttatattaatatatcaggtaatgacggaatggcaacaggtggttcaggagatgtgctttcaggaatgataacctcacttatggcacaggggatggattgctttgaagcggcaaagcttggtgtatatatacatggtcttgcaggagataaggcagcagatgaaaaaaccagatattccatggttgcaggagatattataaaaaacataccagtattattatcacatttactttaagaaaaacacgtgtgaataaacaacagaaacctggcaatactttaagtataatcgattaagtaaatgctttgggagtgtgatataatggtaatcaaacgtggagatatattttatgctgatttaagaccggttgtaggctcagaacagggaggaatacggccggtgcttattatacagaacgataccggtaacaagcatagtccgacagttatatgtgcggcgataacatccaggatgaataaggcaaagcttccaacacatgttgaaatagatgcatgccattataatatagtgaaggattcagttatacttttagaacagcttcgtacgatagataaaaaaagattaaaggataaagtatgtcaccttgataatgatatcataggtcaggtggataaagcgttaagtgtaagccttgaaatgaatcacagatgatgtgcgtgcaggttttggtgataaaattaatggctaaaatacatatgattattgactgctgtgataagtatgtgatatcctagtggcgattgtagtactaatatttatttaataatagtgtgaaaaataagatttttcacacgcaagatttgtgcttacgcacaaacttaagatgcgcaaaagacagcgcaagaatagagattaagatgaaaggattttacagattatgaacgagggtcatcccgcggaaggaaatgaaggattattttccggactgcttaagaagtttggaaaatcaaaaaaagatgaagatgtaacagaagaaataatggatatggtgaatgaaagccatgagcagggggtcatagcagagaatgaagccgagatgataggtaatatttttgaatttgccgaaaaacaggctgaagatgttatgacacatagaaagaatatagttgcacttgatgcagcacttactgttggtgaagcttttggcattgttatggaggagagcttttcaagatatccagtgtatgatggggatatagacaatataattggtatattacatatcagggatcttcttaaggtatatgttaaagaggaagatagaaacaagaagctttatcaggttaagaaccaggttatgtttgaacctttctgtatacctgagacaagaagcgtaagtgtgttgtttaaggaaatgcagtcaaagaagaatcattttgcagttgttgtagatgagtatggacagactacaggtattgtaactatggaagatattcttgaagaaatagtcggcaatatacttgatgaatatgatgaagaggaagtgcagataaaacagatttctgagggcagatatgagatggatggtcagacaccacttgaagatatagaagaaaagcttggtataaagtttaactgtgaggatatagatacgattaacggatatatgatatataagcttggcaagattccatcagagaatgaaaagtttgaaacagagtgtggaggatatacattcaggatattatcagtatcaggaaagatgattcagaaggtgcttgtttttaagaacaataaaacaggagatgacaatgaagcacattagaaggattgttatagttcttatatggcttttaatatggcagtttgccagtatgatgacaggacttgagctattgcttgcaagtcctgttgctgtattaaaaactattatgaatatgcttgtatcacaacagttttatgttacgcttatgcacagcatgataaatataggaacaggtcttatggcaggcattgtttttggagttattcttggaatatgtgctgcaaaatataagcttatagctgaatttatagaaataccactccagcttatgaaagcacttccagtagcagcatttatcatacttttacttatgtggtttggttctaagaatgtgtcacgcataatatcggcaatggttgttattcccatggtggttacgggagttacagatggaataaaaaatacagatataaagcttatacagatggcaagagtctataatatgagcacatttaaccggttcagatatatatatatgacaggtgtgtatccatatctttcttcacagcttaagattgctcttggaatgtgctttaaggcaggtatatcagcagaaataataggacttgtatcgaatactataggaacgagcatgtactatgcaaagatgtatctgttgtcctcagagctttttgcatggagtatagttattattttagtgagcctgctggttgaaaaaataatacttaaaatatttaatgtaatatacagatgccttcagggaaatttataaatatgaaaaaacttgaattaaaaaacataaaaaaaacatacaatgaaaccatcgttcttgatggctttagtgcaatatgtgattcatcaaagccaagctgcattatgggagaatcaggagcaggaaagacaacactgctaaatattattttgggacttgtcagtgcagacagtggaatggctggatatagttttcaatcaggagctgtcatgactgatggtggatacaggacatcagcggtgtttcaggagacaagccttgtgccacatctgaatcctgttataaatgttgctatggtgcttgggcgcaatagtgataaaaaaaggataaagcaggaactgggatatcttatagatgaagagtttcttgacaagccatgcgcacagtatagtggtggaatgaaaaggcgcgttgagatagtgcgtgcaataatggcagattcagatattgttgtcatggatgaaccatttgcaggacttgatgatacaacgaagaataaggtgataggctatattatggataatataggcgaccggatactgattatatcaacacatgatttatcggatgcagaaaaacttggcgctaatgtatttttggtggatgcgtagaaaaaactacatacaattatagtgtgaatcttgtagtgtaaagtgtaactcttgcagtgtaaagtgtaactcttgtagttgacaacaaggttggtagttgctaaaataatgtgtgattttatatggtaatacgctaaagtgcatttatatgggcggataatatattatcgtatataatgatttggaggaaaaatatatgagaagagcagtattttcaattctagtagataattcatcaggtgttcttagccgtgtagctggattattcagccgcaggggttacaatatagacagccttactgttggtgaaacacttgatccaaagctatcaagaatgacaataacagtaactggtgatgatgatgtacttgaacagattgaaaagcagcttggtaagcttatagatgttaaggaaatcgtagaacttccacatgatgagtctgtatgcagggagctggtgcttatcaaagtattatgtacaagagaagaaagacagcagattactactatggcagatatatatagagctaatatcgttgatgttgcaaagaattcacttattattgcacttacaggcagtcagagtaagatagactcgtttattgaattgcttgatggttttaaaattacagaactcgcaagaactggtattactggtcttgccagaggagctgcaagtttaaaataaatattttttatcactttcggaggtatattaaaaatggcagaagctaagatttattatcagtcagattgtaacttatctttacttgatggcaagacaattgctattattggttacggcagccagggacatgcacatgcattaaaccttaaagattcaggttgtcatgtaatcattggcctttatgaaggatcaagatcatggaagagagctgaagagcagggctttgaagtatttacagcagcagaggcagctaagaaggctgatattattatgattcttatcaacgatgagaagcaggctaagttatataaggatgatattgaaccaaaccttgaaccaggtaacatgcttatgttcgctcatggtttcaacattcactttggtttgatcaaggcacctaagggcgttgatgttactatgatcgctcctaaggcacctggacatacagtacgttctgaataccaggctggtaagggaactccttgtcttgtagctgttgagcaggatgagacaggcaaggctcttgatatggcacttgcttatggtcttggtatcggtggtgcaagagctggtcttcttgaaacaacattcagaacagaaacagaaacagacctctttggtgagcaggcagttctttgtggtggtgtttgtgcacttatgcaggctggtttcgaaacactttgcgaagctggttatgatccacgtaacgcatactttgaatgtatccatgagatgaagcttatcgtagatcttatctaccagtcaggctttgcaggtatgagatactctatctctaacacagctgaatatggtgattacataacaggtcctaagatcatcacagaggatacaaagaaggctatgaagaagattctttcagatatccaggatggtacatttgctaaggaattcttacttgatatgagcgaagctggcggacaggttcacttcaaggctatgagaaagcttgcatcagagcatccatcagagcaggttggtgcagagataagaaagctttatagctggaacaacgaatcagacaagcttatcaacaactaataaaaaattaataaaaactaatattcagcatgtctgatatttagaacttattaaaaatgcccagaccttacggcctgggctgtttttatgatcagaatttatgctcaagtttttataatcagaatttatgatcagattttttgagtgggtttttatttgttagatttgttaaaattttctttgttttcctcatattttttcttgtaaagatatctcgtcctgtatgcctggctgcatatgacaacaccgattataagtattgctattagagttatggcagtctgtttaatatcaggtgaactgtgagcttcgttagagcttgtatcgttggcttcattgttgctgttatcagagcctgtgttgtctggggcatcttctttttcctttgctgcctgaagccttgcagcttcctttttagcttcacgctctgtgtgaagagctgttacatgctccatcatatcatttcctgtatcatatccgacagttgtacgatagagaccgaaagcacggctgtcaaagttaccccagtatgttttagcgtatccattgtccatgacgttgaacgaatacgatatctgtgatacatgttttgtgaatgctgtttttagtatatcaacagacgttctttggttgaaccggctaagaggtgtatcaacatcaagagtgatagtgttttcgttatataagtggtaataagtttttggcgtatcccatattccatattctgaagctgaatcgggattaaatgaagcctccgctgaactgttaacggcctctgaaacagcttttgcatatatacagtgacctccatggccatattcgccgttgaaatcctgtgatacacagacaagaggcttgaaacgtcttacgcaggctgtggcataagataagatatcgtcataattatactgtgtcatggctgtacctaagtcaagggaataaagatccataaaatccccttttacaggatagttctttattccacattcccacagaccgtcaagttcttcgtgttgtcttactggttctgtcagaaaaaagtcacacatatacgcaacctgcacgttgagtccctgttcaccaccgtagtttgtaagaacaccacctagaaaaagtatttcgtcatctgcatgtgttgaaaacacgagaatatcagtgtcatcgttgcatggaggctgccatatctgtacagtttcaggaagcctgccttctgagtaggcatatatgtcggatatagacatatcagctgaggtttctatagttatggatgtagctgcagtgttaaatgggatatagtcgtgaagatatccatatgaaccacattgtatacttgttttattgttatccttatcgttatagcttatagtgtagcctgatacctcgctgctccatattatgtaaagaccatatatggcttcatcagactcgattatgagctgttcaccacttgcgatatcagctgttgaatcataagaagcatcagtcatatcagcagttatattgctgtgggtggaagcactgtctttatacacggatatatcaataatgtctgcttctttttcacttatattttgtccgctggcagccagagcggatgtgacagctccacagggggatatgtgtaaacaggataaaccgaaagcagttattgctataaaagaatatgataataattttttgaatgaatttttgaataaatatttaaataaagttttattatgcataccaatctttctctccatttcatttgttttcttatggtaatctaacatattatggttatagattcaagtgaaagggggacttttcagctttgatagtgaaagggggatttttaagctttgacataagctatgtatgcagtgtatcatatgtcagaaaagattagtaaatataaaagaggattgccatgcagataagagttggtataaaagaagatgacaaggatgtgatatgcagggcacaaacagagcttatcatgagccagttaaaaagaaagaatacggatataacatttaaaaaatatagtataaagcagaaggaacaatgtaatcagagtgattcgtggcttgatgctgtttcatgtgccatagcagatggtgttatagatatgggcataacagatatgaaaagacttatggagtcagatacagcatatatatggaataaaggagttaacctttcagcaataactaaaaggagagatgcaagaatagttcttataacaaggaagcaccggacaaaaaacagtatgataacagggaaacaaaaaaataataaaaagaaagctgttttgtatacatcttctgaggatcttaaaagacactgttcagatatatatgctgatactgaatgtgtatatgtcagtgatttaaaggaatgtatggagggactgtcacatgacttctgtgatggagttatagcacatgctgatatagtaagattacacagatataatcatataagaggatatgcgtatgattatattccttctgatatatatattccaaaaacaggagaagcagtgtcggcagtgcttacgtcctcatctttagacatagttaatgcagtaagctgtatatcagataataactctttaaaatgcatagatatagaaagcagcgtaatacatgaacttatgatgtatggctatatccaggaagcacgtgcgatggcttcgatagaaaaggactgccttactataaatgcatgtatatatagtcatgataaaagcctgcgcatgagcagaagcgggaagttaagtgattcagaagaaattatgaaaaaactggtatctggcataactggaaaaatataataattatgtgattgataaataggatataatcatgtaattaataaactggattttgacacctgtgtgatatatgtgttaatataaataagtctgtagacatatattgcataagtgtgaaacgcatataatgcagagatatctgtcaggactaagatattttttgatactgacattatcactatatagaatagaggaatgatatatggaatttaaaaagatagatgaaaacagatttcagtgtcttcttatggaagaggatcttgaagataacaatataactcttgatgatttttttagaaatgatacagataagatacataatctgcttgaggttgttatggaagaagcagcaagaaacatagatgtacagatggacggcggggttatgtcgcttcagctggcacctcagccagatcattctatattgcttacagtatcttctggaaaagatgattttggcaatatgttaagacaggtaggagaaagagcagctaaggcatttacatctaatcaggatgatacaaagggcaatgtcataaagaatccaggggaagaagcaaaggcagcagaattcacagcatttgataagataaaggatatattcgaggatatgaaaagtaaggggcaggatatggaagcagttaatccggacaccctttataaaaataaagctaaacatgtaagtgatgtagttactgtcgggtatgcggtatatagctttaacaactttgatgatttcgaggatatgtgtgttgtgtgccctaagatatggggagtatcaaacagtctctataaaaagaaagatgtatattatcttgtccttgaaaaaggaagatgctctaaagacagatatattactatatgtaatgttataagtgaatatggaaggcttgattctgataaagaagcaagagtgctgtggattaaagagaattgtgaagtggttatagaaactaatgcaataggaaagataaagaagttgtaaatatgatattttgatgagcaggaagaaaaggagaatatatatgttgtatccggattttcttgtgccaggtggtaccataggcttcgttgcaccttcgtttggatgtgcaacggagccttatattacaggattcaaaagggcacaggagagattaaagaatatgggacttaatataaataatggtcctaatgtgtatgaagccaagggaataggaataagtaacacaccgcagctatgcggaaaggaactaagtgatatgtatgcagatgatagcaatgatgtacttatatcatgtggtggcggagaacttatgtgtgaaatccttgagtatgttgactggaataagataaaatcggcagaaccaaaatggtttatgggatattcagataatactaattttacatttttacttaatacgatagcagatacagcaagcatatatggaccatgtgctgcggcgtttggtgcagataagctgcatgcttcactaaaagatgcactggatgttcttatgggtaagaagctgtctgtaagtggctatgacatgtgggaaaaagaatctttgaaaaatgaagacaatccgacacctgagtacaatcttactgagaaaaaaatcctcagatgcttttatggtgataaagaatatgaaacacctgttgatgagatggacagtgatacaggcatacatgtaagtggaaggctgattggtggatgcatggactgccttgttaatcttactggcacagagtacgattatgtaagtgagtttaatgataagtataaggatgatggcatgatatggttccttgaaagctgtgaccttaacgtgtttgccataaggagagctatgtggcagatggaaaaagcaggatggtttaaacatgttaaagcatttataataggaagacctcttgtgtttggtcaggatatgatgggacttgaccagtatagtgcagtgctggcagctgcaggaaaatacaaagtacctgttatcatggatgtggatttaggacatcttccaccagctatgccggttataagtggtgcgtatgcagatgtatcagttgaaaaaggaaatattacattaaattatgtgctaagataaaaagttaatgaatagaccctatgtgtcaatgtgtttaaaatgcagatgcatcagttgatatacagatggaagatggtatcagagtgcttgcaatatataaagatatactgtaaaatattggcattatagtcttataagacttaagcgtaataaaggaggaaaagtataatgggaatgactatgacacagaagatacttgcagcacatgcaggactttctgaagttaaagcaggacagctgattgaggcagatttagatcttgtacttggtaatgatatcacatctccagtagctattcatgagatggataaaatgactgttaagacagtatttgataaggataagattgctcttgtaccagatcattttgttcctaataaggatatcaagtcagcagagcattgcaaatgtgtaagagaatttgcagctaagcatgacattactaattattttgaagtgggacagatgggtatagaacatgctcttttaccagaacagggtcttacagtagctggtgatgttattataggtgctgattcacatacatgtacatatggagcacttggagcattttctacaggtgttggttctacagatatggcagctggtatggctacaggcaaggcatggtttaaggttccttctgctattaagtttaatcttacaggaaaactgaacaagtgggtaagtggtaaggatgttattcttcatattataggtatgataggcgtggacggcgcactttacaagtctatggagtttacaggtccaggtgtgtcaacacttactatggatgacagattcactattgctaacatggctatagaagctggtggaaagaatggtatattcccagtagacgatcttgcaagagaatatatgaaagaacattctaagagaccatttgttgaatatacagctgatgatgatgcagaatatgataaggtttatgatatagatctttctactatcagatcaacagtagcatttccacatcttcctgagaatacacatacagttgattctatagacgatattaagatagaccaggtagttatcggttcatgtactaatggacgtatagatgacttaagatgtgctgctaagatattggaaggaagaaaagtggctaaggggttaagagttatagttatcccagctactcagaagatatatatgcaggctatagaagaaggccttgtgcagacatttattaaggcaggagctgttgtcagcactccaacatgtggtccatgtcttggtggatatatgggtatccttgcagaaggcgagagatgtgtatcaacaactaacagaaactttgtaggacgtatgggtcatgttgattcagaaatctatcttgcaagtcctgctgttgcagcggcaagtgctgttacaggaaagatcagccagccatctgagcttggtttataatgataaaataatattagtgcagtatagtgcacagaaatcgaggataatatgaaagcagaaggaagagtttttaaattcggcgacaatgtagatacagatgtaattattcctgcaagatatcttaattcttctgatccagctgagcttgctactcactgtatggaggatatagataaggatttcgttaagaatgttaaaaagggagatataatcgttgctaataagaattttggctgtggttcttcaagagagcatgctcctatcgctataaaggcagcaggtgtaagctgtgttattgcggaaacatttgcaagaatattctacagaaattcaataaatatcggacttcctattatagagtgtaaagaagcggctgaggctattaatgcaggtgatgatgtagccatagattttgacagtggtattataacagataagacaacaggccagacattccagggtcaggcatttcctgagtttatgcagaagattataaaagccgaagggttagttaactacatcaataataaaaacagctaattgattattattattcaattgtatttgaaaaaataatgaaaaatttgtcaaaaaagttgacgtatgaaactgtatgatgtattctataaaccgtaaacaatatgatgtgaactggtttaaaccagtttacaaggcatataggggatagttcctattctttatatgtttatacaaaaaaaagaaaaggagaaaaaagatgaaaaaaatcacaacattagtactttcattagtactcgtacttgctatgtctatcacagcatttgcagcaacacctaacgatgaagttaaggctgctcttacagaagctggagttacaggtgagtattatgatcaggcagtaaagttccttgctaacaatgaacttacagctgagcaggcaactgctgtaaagaatgaaatcaaggcagctaaggcaactgctggtgatgctaagagcgtagctgatctttcagctgatcagattagcaagattaaggctaacattgaaacagctgctcatgcagtaggtgctaaggtttcttttgctgacaagactatttcagttacagatgcaaagggtacacagtacacagtatcatctaatccagttaaggctacaggagctactacaacagctactgttgctggtatcgctgtattagctatgggcttagttgcttgtggcgttgcagtaagcaagaagagatttgcttaatattattcaatatgaataaaacattcaaaagagtaatggcatacgtatgtgtgccattatttctttctatagtgggaattgttatagtgtatttctgcctttccccatatatcaaatcagcaggttctacaatatcacttcttaccacagatggtgagacagttgtaggtgatgagaacaccgatcttgtaccggaggactataacacagaggaaactaaagagacacagccagagtctataccatactctcctgatatgcagcctaagttaggagatggatacgcaagacttatctgtgaaagacttaacatgaacgaaagagtcggatatggtgacagaagcgatgaacttgatataggtgtaggccaatatattggctcatccatatttgggtttggtaagcctatacttatagctggacatcacgaaacatctttttatcctttccagtatatagaaattggcgatgtgtttaaggttataacatcgtatggtgaatatacatatactgtatatgataccaaggttgcagatgctaatgataagtcagcaacattgcttgatgctggtcgagaagttcttgttatgtatacatgttatcctttcacaccattaacatcatattcacagagattgtttgtgtatgcaaataaaacatcaggtccagatctgatttattaaggagattatatggctaaaagtaaacaaagaaagttttatgttgtaagtattatagtctcttttatattatcagttctgctttctataggtggttaccttgttggcgctgatatgggtatatttaacaaggatacaatatataaaagtatgtcagctgcaggttattataatggaatatatgaagatgtagtgtcaacaagcaaacagcttggaagacctatgatgcttcatgctgaggtttttgaaaatgtattttattataatgaagtaaaggatgatatacagaataatctggaagcacagcttgcaggtactatgtatacaccagatacgtcacagataagagaaagacttaattctaatatagaagattatgccagaaagaataatatagaaataggaacccagcagcagactgctatagatggcttccttacacagatagaagataattataaatcttcacttgggattacatttattaactattatgtttccatgaggaaaatgtttgataatatatattttaaggttcttgcagcaatccttgttcttataatgattgcggtatttataataattaaggatcatagatatgtgcatagagcaataagatatataacatattcaacacttgcagcagcatacatgacaggaatcattccaatgtatctgtatattaagggcatatatagaaggctggctatatcgccggcatattattataatatgcttattaaaacagcagataagagtctgctgatgtttgtgtatatttctatatttttccttgttttatcggcagggcttatagcacttacaataatattaaaaaataacttaaagaaaaaagcatcgcatagtcatactcatcattcgcatcattcacaccatgaagcagaagagtaggcgaagctgcagcataataaaagatcagaatcacataatacattcaatgatggataatgttatgattctggtcttttttgctttaatccttcaatatattcggttagtttttttgaaattttgatgctgttataaatagaagcgtatgtaatgtatgacatatcttcaatatagttttttatgtatgatacagattgtatgttttcaagaatatcgacaactttattatatgctatggcagcttcattttctgacttatatattcctattatataattgccgttgatgtgtatacggctttgaaaaaaagttcttccgtttttttctatcttgtttactccgttatatttatttattacgcatacgttttcataccggtagtcatgctcatctccgttgcggaatatatagtctctgcccttaacagaatgatttcttataccaaaacgtgaaagtatgcttgtctgcatgccatagtcgttcacaaaataatatccaccacggcacagaattgtatgatgtgaataataaaataaatcatcagttgagaatgtaagtatgttttcaggattaagaaaatacaggaaagatttatcacaaaggtaaataggcgtttttatatatattccattatcacgaaagttaatgagacttatgaatttcgcatatgggaaaaaagtaaaaaaatcaacagaagtgacatcagatatgttgctgcttttgagtgaagcattgtttgataattctgctgctatgtggttatatgaggttgtatgcatatctttgtcaatatagtaggtgccgggtttgtacaagatatcattggctatagcatatgccgcagatgccaaaaattcatcatcataactacctatacttatatgcttattcttatatgttattgaaactctgtaatatacagaaccatcttttttagttgttttataaacacctgtagccaatattatattctcccattagtagtatttttaatattcgtaacattcataacattaataatatgtaaatatgtactttaaacatattgtttaatatttatcaatcctatatattttattataaaattgcgaataattcaatatgcctattgtttttactgtgcgcattgttgtataatgatttctgtttaaagcattttagcaggaatcttattattaaaatgttatatgttttatggacaaggcttacattatataaatatgcaggtaaatagaacaacaaaatatgacatcagaataattaagattcacctcaataaaataaaaaaggtggaatacaagatgagtttattttacagaagtacaagggatgataatgtaagagtaacagcttcacaggctatattaaagggacttgctccagatggcggattattcgtaccagaatctattccttcattagataagagcttagaagaactttcaaagatgtcttacaaggaagttgcttacgaagttatgaagcttatgcttgacgattttacagaggaagagttaaaaaactgtattgacaaggcttatgattctaagtttgatactgaagagatagcaccattagttaaagcagaaggagcttattatctggaattattccatggcgcaactattgcgtttaaagatatggctttatctatattaccacacttgcttacaacatcagctaagaagaatgatgtcaagaacgaaatagtaatccttacagcaacatcaggagatacaggaaaggctgcacttgcaggctttgcagatgttccgggaacaagaatagtagtgttctaccctaagaatggtgtaagtcctatacaggaaaagcagatggttacacagaagggcgcaaacactcacgttatcggaatcaagggtaactttgatgatgcgcagacaggtgttaagaatatatttggcgataaagaacttgaaaaggttatgaataatgcaggcttccagttctcatcagctaactctatcaatataggacgacttgtacctcagattgtatattatgtatatgcgtatgcaagactccttgccaatggcgagataaaagaaggcgagaagattaatgcagtagttcctactggtaactttggaaatattcttgctgcattttatgctaagaatatgggacttcctattaataagcttatatgtgcttctaacgagaataaagtattatacgatttctttacaacaggtgaatatgatagaaacagagaattcgttcttacaacttctccatctatggatattcttatttcaagcaaccttgaaagacttatatatagaatagctggaaataatgctggaaaaaataaagaacttatggattctcttaagacaacaggtaagtatgagataacagaagatatgaaagcacagctttcagacttctatggcaactatgctacagaggcagaggatgctgctactataaaagaactttatgaaacatgtggatatgttattgatactcatacagcagtagctgcagcagtttataacaagtacaaggcagatactaatgatgacactaagacagtcatagcatctacagcaagtccatataagttcacaagaagcgtaatggaggctatagatcctaagtatgccgctatgggtgatttcgagcttgtagataagttaagtgaacttgcaaaggtaaaagttcctaatgctattgaagaaatcagaacagctccagtacttcataatacagtatgtgaagtaaatgaaatgacagatgaagtaaagaagtttcttggtatctaatatataaaaatatcaaaaataaacaaaacctgagcctggcagtaaaatgccaggttcttttatgtaaatagttttatgtaaatagctttatgtaaatagtcctatgcaaacgattttatataaacggtttttatatagatatttttaatgaatagcgaatcggcagcaaaagcaggtgtaaagatagcttgcatatagttcattaataaagtttataatttatttatagaaaaaattaaattagttgttgacataccacttgcaaagtgataccttaattatgttgatattagcactccagataaatgagtgctaacaacaagaaaaaggaggttatgtcatggcacttgatgaacagcttgatgagcgtaaagtaaagatacttaaggcagtcattaagaattatctggaaactggcgagccggtaggttcaagaacaatctctaagtttacagacatgaagcttagctcagctactatcaggaatgagatggcagaccttgaagaacttggatatatagtacagccacatacttcagcaggtagaatacctacagataaaggttatcgtttctatgttgatgatatgatgtcagaaaaggaaaagaatatcacagacagggaaactgaggtggcatcaagggaaagtgagatggcttctaaggaggcagagctttcaaccatgaaggatgctcttggtgaaaaggttgagagagttgaagagttacttcagaatgttgccaaggtgttagccaaggatacgaattatgcgactatggtaacatcgcctaaggtaacaggcaacaagttaaagttcgtacagctgtcacagcttgagtctgataagatattagctgtaatagtcatggagggtaaccttataagaaataaggttataacagttagtgaggatttgtcgcaggagaatctgttaaagcttaacattcttcttaacacaacacttacaggacttacccttgagcagatgaacttaagtattgtttccaagatggagaatcaggcaggtgaacatattaaacttgtcaaagaggttcttgatgcaatagtagaaaccataaacagtgcagatgatcttaagatatacacaagtggtgctactaatatatttaagtatccagaacttagtgattcaactaaagcaagtgagcttatatatgccctggaagaaaaacagagcttatcagacctggtagttgatgatgatgcaacaggtcaggaaagcgatggcagttctaaccatgggattcaggtatatataggaaatgaaacaccggttgagtctatgaaagactgtagcgttgttacagcaacatatgagctgcaggatggcatgaaaggaacaatcggaatcatcggacctaagcgtatggattatgaaaaggttgtagaaaccttgaagaatatgagaacgcagttagatgatgtattcaagaaatcatagaaaggtgaggagttaagtgtctaagaaggaaaaaaacatgaataatgttgaagaaaaagatataaagaaagcagacaatgaagcagctgatacaacaacagatgccaatgctgctaacacagataataaagacgctgatactgtagaaactcagggcttatccgacgcagatgtgaaggaggacgcacagtctttcaacgcaagtgatgcgaagggagcggaggaaacagttgatataaataataataaaaaggaccagaaggacgctgttatagaagatctgaatgacagattaaagcgtcagatggctgagtttgacaactacagaaagcgtactgacaaagaaaagtcagcaatgtttgagatgggagcatcggatgttataaagaagttacttccgatagttgataattttgaacgaggctttaagtcagtaacagaggaagagttacagacaccatttgccaaaggcatggatatggtttataagcagactatgaaaatgcttgaagacttacaggttaagccgatagaggcacttggttctgagtttgacccggatttccataatgcagtaatgcatgtggaggatgattcacagggtgagaatatcatcgtggaagagttcgagaagggttacacatatagagatgtggttattcgccacagcatggtaaaggttgctaactaatacatcagaatatgtagttgatgtatatgtggtttgagcttttaccataaacaagatatgtaatagttattgtgaagtcagctgttaatctggtttgacagaaagacttacaaataacacatacatttaatattttgacagtgtgctgtataaggcacagaaaggaagataattatgggcaagattattggtatagatttaggtacaacaaattcatgcgtagctgttatggaaggtggtaagccagttgttattacaaacacagagggtatcagaacaactccatcagtagtcgcatttacaaagaatggtgaaagattagtaggtgatcctgcaaagcgtcaggcagttactaatgcagacaagacaatctcttcaatcaagagacatatgggtacagattataaagtagatattgatggtaagaagtatacaccacaggaaatctcagctatgattcttcagaagttaaaggctgatgctgagagctatcttggtgagacagtttcagaagctgttatcacagttccagcttacttcaacgatgcacagagacaggcaactaaggatgcaggtaagattgcaggacttgatgttaagagaattatcaacgagcctacagcagctgcattagcttatggtcttgataacgaacatgaacagaagattatggtgtatgaccttggtggtggtacattcgatgtatctatcattgaaatcggtgatggtgtaatcgaagttcttgctacagctggtaacaacagacttggtggtgatgactttgataatgctgttacacagtatatgttagaggacttcaaggctaaggaaggcgttgatctttctaaggatacaatggcactccagagattaaaggttgctgctgagcaggctaagaaggaattatcaagtgctatgcagacaaatatcaaccttccatacatcacagcaacagctgagggtccaaagcattttgatatgacacttacaagagctaagttcgatgaacttacacatgacttagtagaaaagacagctgaaccagttaagaatgcactttcagatgcaggtcttacagcttcagaactttcaaaggtattattagttggtggttctacaagaatcccagctgtacaggataaagtaaagcagttaacaggtcatgagcctaacaagtcacttaacccagatgaatgtgttgctataggtgcttctatccagggtggtaagcttgctggcgatgctggtgctggtgatatccttcttcttgatgtaacaccactttcactttctatcgaaactatgggtggtattgctacaagacttatcgagagaaatacaactattcctacaaagaagagccagatattctctacagctgctgataaccagacagccgttgatatcaacgtagtacagggtgaaagacagtttgccaaggataacaagtcacttggacagttcagacttgatggtatacctccagcaagaagaggtgttcctcagattgaagttacattcgatatcgatgctaatggtatcgtaaatgtatcagctaaggatcttggtacaggtaaggaacagcatatcacaataacagctggttctaacatgtctgatgaagatatcgataaggctgttaaggaagctgctgagtttgaagctcaggataagaaacgtaaggaagctatcgaagttcgtaacgaagctgactctatggtattccagacacagaaggctcttgatgaagcaggtgataagcttgatgctaacgataaggcaaatgttgaggcagatcttaacgcacttaagtcacttgttgaatcaacagatgctgagaacatgacagatgcccaggttgatgaaataaaggcagctaaggaaaagcttatgacatcagcacagaatctttttgctaagatgtatgaggctaaccaggcagcaggtggtgcagcaggtgctggtcctgatatgggagcaggtgcaggttctgatgcaggtgcacagggcggcagcacaccttatggtgatgatgttgtagatggtgactacaaggaagtataattaagtaataaatatgatggggtctatgattattgaaggttataatatcagggttaatgtaattaacaatgattggtatggagttatataaagacttcttaagacttgacaattatagatgaaatcagaaaggaagtcaggactcatatcagggtacctgactcctttcgggtatagaaaggcggaacctatatggcagaaaaaagagattattatgaagtccttggagtatctaaggatgcagatgatgcagccattaaaagagcgtatagacagttagctaaaaagtatcatccggatatgaaccctggtgataaagaggcagaagcaaagtttaaggaagcatcagaggcttatgctgtgcttagtgacccggataagagaagacagtatgatcagtttggtcatgcagcctttgatggtggtgcaggaggtgctggcggagctggtggctttggtggctttgactttggcgatatgggagatatatttggagatatcttcggcggaatgtttggcggcggtggaagccgtggacgtaacagtaacggaccaagacgaggcgctgacttaagagtaaatgtcagaatcacatttgcagaatctgtaacaggaactaagaagaagatagatgtaacacttaaggatgagtgtacaaagtgccacggaacaggtgcgaagcctggtacaagtccagaaacatgtaagaagtgtggcggacgtggccaggtaactatgacacagcagtcattccttggcatgatgcagagcgtacagccttgtccagactgtcacggaacaggaaagataatcaaggaaaaatgtccagactgttatggtacaggatatataagcagcaaaaagactatcgaagttaatataccagctggtatagataacggccagtgtgttcgtatacagggtaaaggtgagccaggaactaacggtggtccaagaggagatcttttagtagctgttatgatatcgtctgatccggcatttgaaagagatggatacaatatcttctcagatgttgttatagattaccctacagctgtacttggtggagaagtgaaggttaagactgtagatggtgaagtactgtacgaggttaaaccaggtactgcatctggtactagagtaagactcagaggtaaaggtatgccaacacttagaaacaaggatacaaggggagaccattatatcacacttatagttgatatacctactaagcttacagcagagcagaaagatgcacttgtggaatatgaaaagacacttacaggtgaagaaagaaaacgtcctaagaaaaaaggattttttaagtaaaaggtttctataaaaatacaagcgaaatacatcattttattgtcgtttttaaagaatcgtgatataatcatagacactgagaagtttcagtcgaatatttaaagaaaggggctattattataatgagtaatatagcagataagtttgaagaacttggagtaattccagtagtagtattgaatgattcaaaggatgcacttcctttagcaaaggctttagtagaaggtggacttccttgtgcagaggttacattccgtacagcagcagctgaggaatctatccgtcttatgcatgaagcatatccagatatggtacttgcagcaggtacagtacttacaacagagcaggttgacagagctgttgcagcaggtgcatcagttatcgtaagcccaggctttgatccagaaatcgtagattactgtatctctaagaacattcctgttatgccaggtatcgtaactccttcagaacttgctcaggcagttaagagaggacttacaagagttaagttcttcccagctacagcagcaggcggaatcaagatgattaaggctatgtgcgcagcttacactaatgtaagaattatgcctacaggtggtatcaacacaggtaaccttgaagaattcttatcatgcgataagatcttctgctgtggtggttcttggatggttaagggcgacttagttaaggctggagaattcgataagattaaggatatgacagcagaagctgttgctttagttaaggaaatccgttctaagtaattagttcagactacataatttcagattatcgctaagatgacaattgaatagtgttattttaaaaggacttcatatatctgttttggcaggtatgtggagtccttttttgttctaaatttgtttttttgggttctttgtcaagagtgggggtaaaatggttctttgtcaagggggggggtaaaatctgttctttgtcaggaatgggggattttacaaaatatacctatttggctgcataatgtacccggcacggtaattatggaattggtggattataatacagatatgtattagatttgtttagatggttgtcagagttatgtagtgtagcagaaactaaagactattataatatacatcggagaggagattagagggaaaataagtttaatataaattaataaaataaaggagattaatgtatgtttaaaaatattttaacaaagttaatggcaggtgctatggggattatgattatggcatcggcaggttcgatggtgtatgcttcaaattatcatgatacatcagctgtgttatcacttgatgaaacagttggcataggagaagcatatactaatggaagggctaaagaggatgcaacatcgggatatataaaaggagtatcatcaacaggtaatttatcatatacagcagctcttgtagcatgtgatagtaatggtggcgataattattttgagaattttaagttgttttataaaactgttcgaaatggtaattcatattacctcactaattatgtaaaggaaagtggatataattatgctgcaattaaaactttaagtgaacatgaagttgcatatacaataagatttttgtggagtcctgatagtatataatcatatattataatgggagattatattgttatgcagatgaaaataaacacctatatagcataaaatattatgattttgttatagaggttgacaatatattataataattgtcaacctttatataatatatgttgaggagtaagtgcatgaagacattgttgaaaatagaattagaaagagctcttaagaacaaatggttttatataacattacttatagaattgatattggtaatagtggatgtagttacagttgcacttccagctagaagagcatatgaagatatatatatacaatttagagattatcagattccaggagcatattgtttatggatggttgctaattgtagctctgtatataagttgtttcatctaatatttccgttattaataagtattccatatacatatactatatataatgatgtaaaaagtaattatatatataatatagcatgcagaataagtaaaaagaaatattatatgagtaaattaataacacaatttgttgtgggaacggttgtagttgctttttgtctgttaggttcatttatattaacagcggcaatactcccgttagaacatccaactttagcttcagcagaatataagttttctaatatcagaatattttcaactatttattataaccatacatttattgctgttattctgtttattatattagagtcatttgtgtttggaataataggctgtataggatttgtatttgcttatcttttaaataacgtaattatggtaatgctatcaacttttataatatattatatggattttattgtatcgaatctttttggaagatatgggagtcttatggcagcttcgaagatagctatattatataaagactgggcagccggctttgtaatagaattgatgattattgttgtggctgaagttgtgatgtgcatagtgcagatgaataaaaaagatattatataagcatggagaagggtgaatggagagagtattaaaaaggataggtattgcaattgttgcttttatatcagtatgtcttattatagcaataataattgtcaatattaaatataataagtattttaaaataatagaattagatatgactgagcaatatataactgattggggaactgttagcataaatggagcaaaaatattaaataaggatgattttattactgagtatacaggtgttgagccatatatatttgacgctgatatttatgaagaagcaggatatatggtaatagatacaattttcaatgttacagatattgataagtatgatgacgaatggcttaaattatgggctattgaggctgataatggttggagtaatggtgaagatatgttgcttagtgcttttttgaacaataatattaaaattgtggagaatggcatatatgaattgtattgtgtatataatatgggaattaatagtatgtcaataggtacatttgatgaattatataaacttaattacaaggtgctgattaatcagaatcctatagtgtactataagcttgatattaatatatgaaactgagattaatgaaaagaggagagtattatatatgaaagcaaagagttacattatttcgttaattttaattatatgtcttatattatctgctgtagttggatataaaaagggttatcttggagatgtatttaactttaaaacaaaaaactatgttgataatacaataggtaataatggaaatataacaagaacaagagaaagtatatatgaaaatgaatcatctattttagatataggggatgagtatgtagtggagtatgaggcaaaggactatagaggaaatatagattacgttaatagttataaaataaaagaaaaatatcttgatagttatataacaaggacacttccggacggaatggaagtaacatattatgatggtgatgagaagaattatgttaatgatgacgaaaaaagtctttctgaaaaatattcatatgtgattgtttcaatagagatgactaatgaaagtaataatgaatcaaatctaatagaaatatatcctactaatataaaaattggttattttgatgaggatggaacatttaagatgtatgattatacgaggggaagtatgtcagatgatgaacaggctaaaggacatgtaagtttgccaataggcagtaatagtattattacaatgtactacgtagtgccagatgaactgttggataagcaattggtgattgcgggagaaataacagaatatgataaaggtgtacctaaagtaccatattttaaagtaaagatataaactgcgtatgaaattatagctaagttactataaatatttatttgtaacatagacaaatatggaataagtatgggggatgcatatgaaagagttcctgacattttggaagtatcagaataaagccggaaggctgtataaatggatgctgcttgttgtgcttacatcattttcatttgtatgtagttatataagagttttttttaatgactattatgccggattgtgtgccaaggatatgctgctgtttttttcaagggatggcttggtgcttgtactggcaggtggaataagtacgataagaggtcttatatttacatatgtagatgataatccgaatattattgtgagatataattccaagctgaaagtattcgcatatcaaagcctgtcgttacttataattgctcttatagatatggtagttttatatgcagtcggtataatatcatcatatgttatattgggagtatatgataactggcaggttgacggaagttatttttttaacaaagtgacaagaaaaggactttctactgatatatgtgtgaatgatgttgttatatgcagtatgtttatagtaagaaagactgttattgtatgggttgtcggtatggtaagtcttattattgaatatattacagactggataagagtggctgtatttggtgcggtatttatatatggagtcagtttagtatcacatatcagtatatgcaggttggatttaaatatactggacttatataatatgctgcataccgttatgaatacagtactgattattcttgtgaatttaatacttttagctgtgggacttgtgctgtcaagaagaagacagtattacaggtaataacaagtgttttaatgattgtatgaattgaaatgtgagttgtaaaatatacattggatgattttattagtgtatatatcatataatgacaggttgggtgaagattatgaatgtcagcagatttataaaagacgatataaaaaggtctttaatacataacagataccgtataattttatgtgtttttatagtatttggtcttatggcagcattttataagcatataggggtaatcaattctgtaagagataataagatacagccatccgtatgtgactatatattatatatgacaagaggtatatgcagggtaactgaggagaatataacaaggcttgagataccatatgtgtggatatctttatgcattatgtgtggtcttatggtgcttgattatatgtatagtgatatgagaggtatgggaaaaaatgtgcttgtatacagtaaaaaaaagagtctgtggtggataagcaagtgcattacatcagttgcagcggttactttagtatatgtaattatatggcttatgtcagttatgtttatatttgtatccaagggaagtatggaaggcatacatacggatatgtttataacgatgtataatataaatacttcacttctgccatcgaatatgttagagtacagtcagacagcaatatgtttttatatagtgttatatccatggattatatcggtgtgtatcggtttgtttcaggttggattaagtatatatacagggcctgtggtaagctttgttattataataatacttgatgtgctggcagtgttttccaataatatactgttatgtggcaactggattatggcagagcgttgtagtatattagcagaggacggattaaatatatatgttatgcttgcaatggcggctgttcttgcgatagtgtctgtgattgtggggtggcatagatttaagaagaaagatattttataacaagtgcgatagtgaagatttgtgagtgtaggaaaaacagagaattataatgcactaagcagaggaagatatggcatacagaataggtatatgtgatgatgaacagaatatagtgttaaatattataggatatgtggaacattattttcagttacagggtgaggatgtagagatacatacatggaattccggtgaggagctgattagtgataaagtatttgagagtggtaatgaatttgatatattgtttctggatattgagctgcccgacatgaatggtgtgtcgataggccagtatataagaaatactatggctgattcgatagttcagatagtgtatatatcacataaaacaagctatgcaatgcagctttttaatgtacacccatatgatttccttgtaaaaccggttgatgagaacatgatagcaaatgtgataagcggcatacttcatatgaatggacgtgacagaagattttatacatataaagttaataaggccgtacataaggtggcgtatggagatatatgttatctggcaagtgacagaaagcatataagaattgtgatgtctgatggaagtgtcaaagaattcgtaggcaagctgaaggatgagataagtggtcttccagattattatatacagataggacagtcatatgtagtgaattatagccatataagccagtttaatcctgaaagtgttgttatggataacggtgatacacttattataagcagaggttacagagcacaggtaagcgaagaacttcttagcagaagtgcttcacttccagtataagataagaggtaatgttgtatgtatttattagaatatgtgttcattatgcttgtaataaggcttataaagatacttattgatgttgattactgtaatatattttttaaggttgatagtaagagagccagatggattgtgtgtataattgtatatgtggcagcagcatttacagatattatatttgattcaatatttataagcataatagaagcatttatagttatatacgtaattatgcaggtgtattcaggtacacttgataaaaaaatattatttgcttctatgaatgtggcattggaatgtatagctgatatgggaacatcatacatactgccgggcagtagcagcatacaggacgtagctggcaattacgatatagagcttgggtattatctgccaagacagttcataacaattatgttattttactttcttgttatagtagttaaaaatatatacagaacgagagaatacagcgatatgtcatataactggctgttttttatgcttcttgccattgtcagtataggtgtatggtatataatcgtgagaggacttatatcaactgaaggaggcatgatatgcgtaggagcttcacttcttattatgaatatggtttcttataagctgtatgagtctgttgttgatgcatacagatatgagaaagagaatgagaagttaaaagaacagatggatatatatgaatgtcagataagcaccaatattgagaatgacagggttgtaagaagtctgcgccacgatatgaagttgcatcttgaggaattacaaatgcttgcagcaggtaagaggtatgatgaacttgagagttatttatcggctatgacagaagctgcgaagcctttgtataatatggttggaacaggtaatccgtcagttgacgggatacttgattatatgtgtgctaaggcacaggacaaaggtgttacggttaaaagaaagttaagaataccggaagatgtcagtcttagtgcctatgatatgaacattattcttggcaatctcttagaaaatgcgatagagaatactttaaagacggacaatccctatatagaacttacgcttaagtatcagagtggcacaatatatatgaatgttacgaatacgtgtatttcagaccagaaagtagagaatggaaagtaccttacaactaagacgtatgatgaaaaaaatatgcataacgaagaaactgtgtctgaaggcttttcaatatctggcaggcataagtcaggaaagcacggatatggacttgataatgtaaaaagatgtgttgacaagtatagtggaactatgaagttaaactgtaaagatgatgtatttacagcggaagtgcttatatatgttcctgttcagagctgtaagtagcattttcaagaagggttcagaacagcaattaattcttaaatttttaaaaagagattacaatattgaatatatatgttaaaatgtggtaagagtgtattaaaaagggaactcttaccttttttagtgcaataaagaatgattagttaatagtagtataagttagtgaggtcattagatgagttttgatgtattaaagaaaatagaagaattgaagaaatcggacatgatatgtgcggaaggcaaatatgagcttgttaaggcagaagtacttaaggatatgaattcagccggtcttatattaagacataaaaagtcaggcgcaagagttgttgttatatccaatgatgataataacaaagtattttccataggttttaagacacctccttatgatgatacaggtatgcagcatattatagaacactcgactctgtgtggttcaagaaaatatcctgttaaagacccattcgtagaattgtgcaaaggttcacttaacacatttcttaatgctatgacttatccggataagacagtatatcctgtggcaagctgtaatgatacggattttaagaatattatggatgtttatatggatgctgtattttatcctgatatgtataatagggaagagatattcaagcaggagggatggcactatgaacttgaagatgtagatgatgatgtcaagtataatggtgttgtgtttaatgagatgaagggtgcattttcatcagcagatgatgtgctttcaagatatacttttaattcattattccctgatactgtatactgccacgagtcaggtggtgatcctgcggttatcccaacacttaagtatgaggattttttaaagtatcataaagaatattatcatccatctaacagttatatatatatgtatggtgatatggatgtggatgaaagacttaagtatcttgatgaagaatatctgtcagactttgatgcagctgatgctgatatacatgcagatattccacttcagaaagcatttgacaagcctgtatatgaaactaagccatacgctataacagacgatgaaccattagaggacaacacctatctttcatataatgtggtaactggtacttctgttgatgcaaagctataccttgctatgcagatacttgattatgcacttgtcatgacaccaggtgcacctcttaagcaggcacttatagatgctggtataagcacagatgtgtattcaagttttgaaacctctctttatcagccggtttattctatagttgccaagaatgcgaatgaaaaggataaagatgcatttgttaagataatagaggatgtgcttaaagaactggtaaaaaacggcataaacgaaagaacaatagctgctgggattaactactatgagtttaagtacagggaagctgattatggtccatatcctaagggacttatgtattatcttactatgatggacagctggttgtatgatgaatcaaagccatttatccacatagaagccggtgatacatttaaagagctgaaagaggatgctaagaagggatactttgaaaaacttatagaggagtatattcttaataataaccacaagtcagttataggtcttgtacctgaatatggacttgaaaagaagaaggaagaagaggaagcaaggaagctttcagaatataaaaagactttgtcagagggtgagcttaaggctttagtaaaggatacaaaggcacttaaggagtatcaggacacaccatcaagcaaagaaaatcttgagaaaattcctatgcttgagctgtcggatatatcaagagagccggcagagcagtatatagatgaaaaggatgttgcaggaatgaaggtggtacatcataacctcttcactaataagatagcttatatacttctttcgtttaatacacagggtgtcagtgatgaagatattccttatctggggcttcttggcagtgtattaggtcttatggatactaagaactttacttatccagagcttatgaatgagattaacataaactgtggcggaatatcttctagtgctgctgtgtatacagacaaggcagactttagtaaaaacagcattatgtatgagtttaagggtaaggcgttatatgataaaattccttttgttctagatatgatgaaagagattatgtataacactaagttcacagactataagagattaaaagaaattatagcaagaataaggtcaagatttgaggctactatgtcaggttcaggtcattccatagctatgcttgagggctgtgcacagttttcagcttcagcttattattcagatatgttaaaggggtataaggcatatcagtttatcagagaacttgatgaaacatttgataataataaggaaaatatagcagacaggctttcagagcttgtaaggattatatttaacaaggcaaatgttattgtaagtcttacagcagatgatgaaggttacagcctttttgcagaggcttacagtaagttagcagacgatatgaacgatgaaaagactgatgtggcacaaagaaattatacaccggttaatgtaaagactgcatatacagcagcctcacaggtccagtatgttgcaagatgtggtaactttgttaaggcaggatatgaatatacaggtgcgcttaaggtacttaagattatattctcatatgaatatctgtggcttaatgtaagagtcaagggtggtgcttatgggtgcatgagtggctctacaagagagggagatttctatatggtatcgtacagggatcctaatcttgcaaagactaatgagatatatgaaggtgcggcagagtacgttaagaatttcaatgtaagccgcagggatatggttaagtttattataggaactatcggcgagatggattctccacttacaccttctgccaagggtatgagatcatttacacattatatgactcatacaactatagatatgttaagaaaagatagagcacaggtgcttgatgcaacagttgagagcataagagcacttgcaccgcttatagatgctgcagttaagcaggattatctgtgtgttgtaggtggacagaaggctataagtgaagctaaggatatgtttgatgttattaagccacttatttaattatatgatgataccagggtcaaaagtataaaataagatgatgtatctttaaaggtgctgctaaaaagcagttgtataaagaaaataatatgattggagtaacgtatgaatttagatgaaatgcttaaagccagtggaataagcggcggtgctgcttctggtaacgacaacgtaaagtcaggttttgtaacatttataggaagacctaatgtgggtaagtcaacacttatgaactatattataggtcagaagatagctataacatctaacaagccacagactacaagaaacagaatacagactgtgtatacagataagagaggacagatagtgttcgtagatacaccaggtatacacaaggcaaagaacaagcttggcgaatatatggtgggagcagcagaaaagactattaatgaagttgatgttgtatgctttatagtagagccttcaacttatattggtgctggtgagcagcacattatagaaaaacttaaaaaagtatcatctcctaagattcttgttatcaataaggttgatactgttaagaaagaggagctgcttcctgttatagactgttacagtaaggagctcgaattcgatgagattattcctgtttcagcaagaaatggaaacaatgtagatgatcttgttgatactatatttaagtatcttacatatggacctatgttctatgatgaagatactgtaacagaccagcctatgagacagatagttgcagagcttatcagggaaaaagcgcttcatgctcttaacgaagaaatccctcatggtatagcagtagttattgacacatttaaggacagaaagtcgccaaaaggtattataactgatatagatgctactattatatgtgagagggattcacataagggtattatcatcggtaagggtggtgaaatgcttaaaaagatcggaacgaacgcacgttacgagatagaaaaacagcttggaaataaagttaatcttaagctatgggttaaggttaagaaggaatggcgtgacagtgatattcttatcaaaaactacggatatgataagaaggatttaaaggataacagatgatatgttaccagttggaaatatcagattatgatatagcagtgtgattgtgaaaggagacagataaggtggctgatattgtacaggtaacaggttttatattgtccagtatgcctgtgggtgagtatgacagaagaatagtgatacttagcaaagaacttggtaagatatcagcatttgccaaaggcgctagaagaccaaacagtcatcttatcggtgttacaagaccatttatattcggaacctttgaatgttaccgtggcagggattcttatactatattcaaagcagaggttaagaattactttgaggaactcgtaagtgaccttgacagtgtgtggtatggatattactttgcagagatagcagaatattatggaaaagagaatctggatgccgcacagatgctgaatcttttatatgtgtcttttaaagcacttacgaataagtctataccaaacgaacttataaggtttatatatgaaattcgcatgatatctgtcaacggtgagtgtcctgatttttttacatgccggggctgcggctcgcatgataagctggatacatattcgtatacatataatggcatgttctgcagtgattgtcattcaaaggtgaaggatggtattaagctgcagccatctacattatatacattgcagtatatagttacagcggcacttaataagctgtatacatttgttgtgactgatgaggttatggcagaattaagaatggtgacatcaagaatagctgcagttacgtttgataagaagtttaaatcaaaagaaatgctgacattataaaaagaaaagaggcttgatatgggacataacaaccagaaaaagatagcggcaatcaatgattatacaggattcggaagatgttccatagcggtggagctgcctgttatatcagcacttaaagtacagtgctgtccgctcccgacttctgttttgtcgaatcatactggatttgacagcttttattttgaagattttacagatagtatgccagcgtatattgctgaatggaaaaaacttaatcttaagtttgatggaatatgttcgggatttcttggttcacacagacagataaagatagttgaagatttttttaaaacatttaagactgatgaaaatattatacttgtcgatccggttatgggtgattatggcaagctgtattcaacatacacaacgcagacatgtacagagatgaagaaacttgtaaagtacgcagatatacttacacctaatcttacagaggcatgtatacttacagatgaggaatatgatgaaaaatgtcctggcagggagctttttcgtatagcaaagaagttatcagatatgggaccatcaaagatagttataactggaatagtaagaggtaagtatatagctaactactgttatgaaaagggaagcgaaggctatgagataaagactatgaaggttggaacacaaaggtcaggaacgggagatatatttgcatcaatactggcggctgatgcagtgaatggtgtggattttcatacatcagtaaagaaagcttcacagtttataaaaaaatgtatattaaagtcaatagagctggatataccagttactgacggagtatgctttgaagagcttcttactacattaagatagtaagagcttttttatggataagattgtgcaatgttaagatgtgcatttttcatggcttataagaaaagaggataaaataattatggaaatattatataaggtacacaataatctatatgtcaatatgactaacaaatgtccttttgcatgtacattctgtttaagacagactatggacagaataggtgaatcagacaggctgtggcttgaaagggaacctgatgtaaatgaggttattgcagagtttgataagtggaatatggatgatttcggagaggttgtattctgcggctttggtgaacctacagaagtgtgggataaaataagagaagtggcagcatatgttaaaaaaacatataacaagcctataagaataaacactaacggagcaggtaatcttatcaatgcaagagatatagcagcagaaatgccgggacttattgataccgtatcaataagccttaatgatccggataaggatgagtaccataagcttgtaagaagcagatttggtgataagactttcgatgctatgataagctttgcaaatgagtgcgtaaaaaacggactccatgtggttatgactacggttgatacgactatatcacatgaaaaggaagaagagtgcaggaaaatatgtgataagataggtgcggaatatagaatcagaccatgggagtcatagatatttatgaagccttatgtgtggactaagatgtttttagtttgcgggctataaggttttttaattttatagactataaggttttttattttgctggttgaaatatatataagaatggtatagaattaaaaagattattgtgaggatagcaacaccacccaggtgtatgacagtccgcaactttaggaggaatctagaatatggaaaagacaatggaaaagatagttgccttagctaaggcgagaggttttgtatacccaggttcagagatatatggtggtcttgcgaatacatgggattacggcaatcttggcgtagagcttaagaacaatgttaaaaaggcgtggtggcagaagtttgtacaggaaagcccatataatgtaggtgtagactgtgctattcttatgaatccacagacatgggttgcttcaggacatcttggcggtttctcagatccacttatggattgcaaggattgccatgaaagattcagagctgataagcttattgaagactgggcagatgagaataattatgatcttggcggttcagtagatggatggactcaggagcagatgaagaacttcattgatgagaagaatatatgctgtcctacttgtggaaagcataactttacagatataagacagtttaaccttatgtttaagacatttcagggtgttacagaggatgctaagaatacagtatacttaagacctgaaacagcacagggtatatttgtcaactttaagaatgtacaaagaacatcaagaaagaaagtaccttttggtatcggacagataggtaagtcattccgtaacgagattacacctggtaactttacattcagaacaagagaattcgagcagatggaacttgaattcttctgtaagcctggaacagaccttgaatggtttacttactggagacagtattgtatagactggcttaaggcacttggtatcaaggaagatgagatgagagcaagagatcattcaccagaagaactctgcttctattctaaaggtactacagatatcgaattcttattcccatttggatggggtgagttatggggtatcgcagacagaacagactacgaccttacacagcatcagacagtatcaggcgaagatatgtcatactttgatgacgaagctaaggagaagtatattccatatgttatcgagccatcactcggtgcagacagagttacacttgcattcctttgctcagcttatgatgaagaagagcttgaaggtggagatgtaagaacagttcttcacttccatccagcacttgcacctgttaagataggtatattaccactttctaagaagcttaacgaaggcgcagaaaaggtatatgcagagctttctaagtactataactgtgagtttgatgacagaggaaatataggtaagagatacagaagacaggatgagataggtactccattctgtataacatatgactttgattctgaagaggataatgctgtaacagtaagagatagagatactatgcagcaggaaagagttaagatagaagatcttaaggcatactttgaagataagttcagattctaatatcagtaaaataaaagttttagaatatactgacatatgattagaaagagtcagtggttggttaataatatacgcagggtttgtgcatgagtcatgaatcctgcgtaatatatatgataccagggtcaaaaggtctaaacccacatgagcttgctcataggtgggggagagttgtgtgagtgcttagcacggaacaattcgcaggtattaaagtcggggacatttgccccggcatcatatatgttgttaaggaaaaagcagcattatcagatgatgtataagacagatataaaggcagaaaatatatgatatgtgctaaatgtggaacggaatatgaaggcagtcagtgtcctaagtgcgatggacctgtaataaagattaataacagtgattatctggcaagaagaaaggcttatgaagaaaaacaggctaagattaatgaaaaagaagcactaggaaaagatagaacagatagaattgataaaactgaaaaaaaagataagaaaacacatgctcctaagtctaagaactatgatgaaggggtatttgatataactaaagtggatatgaatcaggtggctgataagctaaaaaaaggcagggacgtctttgctgacagcaaagacagatttgccaaatcacttgagaaaaatgctaaaaaaaacaataaacaggcagatgaaaatacagggattaagataagaaaagctgatagttcaggtattccttataagaaagctggaatagcagcagctgtaattcttatacttatagctgtagttgtgtttactgttgatataattacaaagaaaaactataacatatatatgagcgatggaagtaaaatatatgatgtttcatcacttgacagcagatatgtatgtgataaatcaggtgctatatttgctctggatgatgatacattttttactcctgaatggcctgagggcattgataaggataattcagtgttaaatgtttcaagtcctaagggaagttattttgcaacagatgtgtatgattcagcagctggtatgtatacattatatatatggtcagatgatgtatgtcttaaagcagcagagaatatatatgagcacaatgtttattttatatctgataagggaactgttatatatgaagagactgaaactatcaatgataatggaaaaacaggggtcagaatgttatccatggcagaagtaaaaaaagataagtcaaaggatgacggatatgtatgtgaagtgaatactatagaaagaagtcttaatcaggcatatgtatatagcagtaaagatataatagttattcttaataccgatggacgtctgtatcaatatgattatgacagaaagataactacagaggttgacttatatgttgatagtgtgagtgcgcttggaagttcaactggtatgtatatgtcaggggcagaacatcttaatgcaaaggatgatgcggattcatatatatacactgtatcagaaaacacctattatgtagaaactaagactgcaaaagcaactctgcttaaaggagtaagtgggacaggcaatatgtatgtatatgataaaaagaatgattatgtgtactggcttagtaataaaaaattatcatgtgcaagatttaaggatggagaaatatcagatatattgtttcttgaaaatactggaaataatatgaatatgatatatcttgcagatacgcaggaactcatatacataaacgatgccgcgcagcttataaaggctgaaaaaggtaaaaaaacttttataacagaagctgtgaaagatggaagtctttcacttgtgaaaaatacagacgaagcactgacatatatatcagatggaaagcaatattatattaaggatgtaacggcctcaccagttgtgatatgtgaagcaggggagcttactaatacatctaatacaggcatttataagaaaaagatatattattatggtgctgatggacagttgtatacatgtaaccttaaaggagaatcacagaatgttataggaaatgttgaaaggttctttgtaggaagctatataaagtgataaaataatagaatataagcttttgcatatacatatataagtagtaaatgtattaagaggcagtttgtatgaagcatatgtatatgaatacaagatgtggatacatgcgtataatagcgggattgatggttatggtcatgattattgtggctataatcattaatcctgctttttatagttatgtatgggctgaagatgaagaattgaaagaatcggacatagtgacagctggcacagcaggtcctgatatagatactccatcagctatacttatggagtctaaaactggccagataatatacgaaaaagatgcatcaaagcagcttgcacctgcaagcataactaagataatgacactgatacttatatttgatgcattggaaagcggacagataaagatggaagaccctgttactgtttctgaacatgcagcctctatgggcggcagccaggtgttcttagaagaaggagagatacagagcgtaaggacgatgattaagtgtatagcggtggcaagtgctaatgatgcgtgtgtagccatgtccgaatatatatgtggttcagaagatgttttcgttgataagatgaatgagaaagctgggcagcttggcatggagcagacacactttgtcaactgctgcggccttgatgctgacggacatacatcaagtgcaagagatgttgcgcttatgagcagggagcttataaacagccacccggaggtcaaagagttcagtaatatatggatggaagatataacacatgttactggaaagggtgaaaaagattttacattgtcaaatactaataagcttataaaacagtatacttatgcgacaggacttaaaacgggttcgacaagcaaagctggctgctgtctttcgggaacagccatgaaggatggaatagagcttatagcagtagttatggcagcaccaacaagtaagataagattcaaggatgcggttacacttcttaactatggatttagtgtatgcagcatatatcaggatgcagaggagcctgatattaaacatgccagtgttgaggcaggcgtaaaggacgaggtaagcattaaaaaaagtgaagatttctcatacatgtttcttgaaagctttggcgactcagatataagaaaagaatacacggttgacacaatgatggcacctgtacatgagggcgataaggcaggaactattaattattattataaggacagactgataggcagtgttgaccttatggcagcagaaacagttgaggtgatggattattcagattcacttagaaaagtattgggggttattacttttaaaaaatgctgatatatgctatattatgatgtaagcgtcaaaagtataaaaaggtaaaatgtatagaaaggacagcttatggatttgtttgattatatgcgtgaaagtaataaagagaatgaatcacctcttgccatgaggctaagaccaaggacacttgatgaggtggttgggcaacagcatattgtaggtaaggataagcttttatatcgtgctataaaggcagataagctgagctcgattatattctatggaccgccaggaactggtaaaacaacacttgccagagttatagcgaatacaacaagtgcggatttttgtcagataaatgctacagtagcaggcaaaaaggatatggaagatgtagtcgaaaaggcgaaaaataatcttggcatgtatgcaagaaagactattcttttcgtagatgagatacacagatttaacaaagggcagcaggattatcttctgccatatgttgaggatggaacagtcatacttatcggagcaacaactgagaatccatactttgaggtaaatggggctttgatatcaagatccattatatttgaacttaagcctttaacaaaggatgatatcaaggaaatactaaagagagctgtctatgataaagaaaggggaatgggcagttataaggcccaaatagatgatgatgcccttgaatttcttgcagacatatctaacggtgatgcaagaaatgcgctaaatgccatagaacttgggatacttacaactgacaggtcacaggatggtattatacatattgacattaagacagcagaacagtgtatacagaaacgtgctataagatatgacaaaacaggtgataatcattatgatacaatctcagcatttataaagagcatgaggggttcagacccggatgcggtaagttattatcttgccaagatgttatatgcgggtgaagatattaagtttatagcaagaagaataatgatatgtgcaagtgaggatgttggaaatgcagatcctaacgcacttgttgtagcagtgagtgcagcacaggcagttgagcgtataggcatgccagaggcaagaataatactttcgcaggctgcactgtatgtagcctgtgcacctaagagcaatgcgtgctatatggcggtggataaggcacttgatatagtaaagacaacaaagacacagcctgttcctgcccatcttcaggatgctcactataagggctccgcaaagcttggacatggtgttggatataagtatgcacatgattatcctaatcattatgtcagtcagcagtatcttccagacgcacttgttgatgaaagcttttattcacctactgataacggatatgagaaacatataaaggaacatcttgacaggataaggtcagaagcacaaaaataataatactaggatgtaatatcagacgtaatataaagaaaagtacctaaaagtatattgtacacatgaatggagagtaaaggatgaaagagtatattaaccggctttcattaggaaagttcaggtatgacataccagacataataaagcccgatgatgttgtaagggctgatgtattatgtggaacatacagcgaagaacaactgcatattcaggcaagtgatgtcatcaaaggcgtagtgtactcttctgacagccgggttgttataaagaatggggcattcataggcagagaatgcaacataacgtatatagctgatgcaagagaacttcaggataaagagagcattgaaggaagattcacaatagtaagtgatgctggtgaaaaagatatagcatatattataacaggttatagcatgaaagctaagacaagtcttggtatgggagatgatctgtttcattttacgaatattgtccagaagtcaagggaagaagcagctgttttatacaggtcagaaagctttaagagtatatttttaaaaaatgatgagaatctcattaacctatatgaaagtctgtatgacagtgaaaatgtatacgaatccatggaagaattcttaatagcaattaagaaaaaatcaccacttacatttaagatggacacacagacaagaacgtacagtctttcgcaagaaggagaaaaggacagtctgattatagaaaaaagcggatggggatatatagagcttgaagtggaatgtgatgcggactatatcaagatgaagcgtggaacacttaactcagatgattttgttggtgatatatatgagcttgaatatcttatagattatagccggcttcacaacggaaacaactatacttcgatatgtgtacattcatatggccatgaggagcagattgaccttataatatataaagaaaacaaagaaaatgatatagataagaagaatgatggctttgatatccgtatggaacagagaagtgccagaatagcacttacgcaggcttatatggcattcagaatgaaaagaatagaccgtgaacagtggatatcagatacaggaaaaatgcttacaagagtacgcggattgaaagaatcggacatgattttcgatgtatttcaggcagggcttgattttatagctggcaatgtgtttgatggaaaacagatacttgaaaacattaaagataagatattaacagatgtaagcagtcatgttgagttatactgtctttatctgtatgtgagcacacttgaaagaaaggatgcactatatacatctgatgtgttacagatagtcagcagatattatgacaatggttatgatacatgggttcttttatggatattgttttatatagatggacagatagagcacaataagagcataaagcttataagaatcaaggattcctttaataacggatgtacaagtcctgttatgtatattgaagcattaaatatatataacgaacagcctgatttgttaagggttatgaacagatttgaaatacaggtaatatctgagggcataaaatatggtgttatatcagaaagacttgcaagacagtcagcagaggttattggaaatgaaaaaaatgctggaatgtctgacatagagctgttaaaaagactatatgaaagctatgaggaggataacatccttgaggcgcttatagtacatatgataaggacaggtattgcagatgaagaaagctttacatattatgagaaggcagtgcttcgtggtatcagaataacaaggctttacgagttctatatggcaagcataaagaaagatataaagttaagacttcctaagatagtgcttatgtactttacatatgattcaggagttaattattcctggaaatcatatctatatgctaatatagtatataataaggagctgtataaggagatatatgattcatataaacatataatagagttatatgtttatgaacagttaaagcaggggaacattgacagcaatcttgtgtatctttataagaagttcataaaaccacagcttgttaaaaatgatactgcagcatttttagcaaaacttaagtttatgtatcatataacatgttttgacgaagatgttaaagcagttatggtaaagtatagccagatacaggagcctgtaatatatgagcttacagggaaagatacttatattccgctatatactaaagactgttcgcttgtatttatatgcaatgatgggcgtaaaagaaaaaagacagttgattatgagatagagaaaatatttgaagagccgggtgatatgtctgagtatgaccaatacgatatagatgataaatatattactatatataaggtggagtactacagaagaaaacatatatataaaatgcatacactcgaattatataagctggcgcttggtgttgaaggaatatcagaacagtatagaaaaaaactgaattcatggatgatagagttctatctggaatactataatgcagaaagctttacagatgaatacaagcagcttgatacatataacctgtcagtgagggatagtgcatgtcttgtgaaaatacttatagattatggcatgtattatgaggcaagacagcttattgataagtatggatatgcagatgtagatgcgacaaagctttttatgtttatggttcatgagcttgaggcatcggttaatgaagaagaatataagaacaaaatatcagaatatgtatttaaaaagcatctttataatgaacaactgcttacgtatatggtggagcattataacagtacaaacactgatatgtatgttttatggaaaacatcaaaggagtttggtgtgaatgttgattcgctgtcagaaagaataatatcccagatgatgtttaccaatgtatattcaaatagattagcagaggtttttgcagattattataataatgtggctggatattcgattgttaaggcatatgcagcatataattcatataactatgttataaagaataagaaagcagatccggttatatttaaagttatagaaagagcatataaggataaaataggactgccattattatgctatattgcatggcttaaggaaaagtcattggaactgtcattattgaatgaatcggacataaagaaaacagcacagtctattctggatgaattatgtgaaaaagaacttatatataacttttataagaaattcaatggaatactaagcataccatataatgcgtatggattaactgttatagaatatttcgacattccggatagaaaggtggaactgcattaccgcatcaatgatgacagggagtataaaacagcagttatgaaaagtgatatatgtggaatatttacatataagcttttaatgttttatgacgataaagttacatattattttacaacatcagatggagaaaaaacaaaggaatacaacatggtatgtgatgatattccagcacagtatgccggcaaaagattagatgccatcaatgaatgtcttgccagtgaagaactgcatgatatggttacattgaagaagctgatgaacagttatgttacaaaggcttacgtttcagaagagatatttaagaaaatagactagtgttacttacgaaacgatgtactagataaaaacagaatggagaagtgcatgaaagaccagggactgataattggaattgaatatgataaatcagtgatacaggcttgtgtttatgatatgagagcaggcatacctgctgcatgcgatgaagtaagcgggctttcaatagcagatgccatcagaagaatattgggcagatataatgtggatgagattgacagtctgtgtgttaagtcaggattatctgatatagaagagcttaatgatataagtgatcagataaattcacttgggataaacgagaaccagtacatgatcacaggtcctatacaaagctttgcttattatgcgtattcacagcagaaagaactgtataagtcgggagtagtccttatggattatgatggacagattattaatatatacaggctttcatataatacagctgatggtgtgcagtatatagtatcagctcatgaacagtatacgatagattcgcaaagcggcatgtcagataagaaactggttgagtatgtgtcagattatttttcaaggaatacagcatcatcagtatatcttacaggaaaaggttttgatgtgaaaaaactgccagatggactttcaaaggtgcttgtgaatggcagaaaagcttatataggtcagaatctgtatgtaagaggagcctgctatgcagcatatgagaatatataccatgatatatttgataacgtgactctgctagtagatggatgtataaaggtgaatatagaaactgatataaatgaacgtggaaaagctatgaggttccgcataataaagatgggtaccgaatggtatatggcacgcagaagcgtggattttatcatagaagatatgacaaccctggctttaaagctgatcacagctgatggaaaatgtactgataaaataatagatataagcagcataccttatcgtgagggaaagacaacaaggataagaatggatatatatgcagtatcacaggacaaatgtatgctgactattaaggatcttggattcggggaaatgttcaggacatctggcagagttataacagaggaaatagatttaagtgaggcatgcttatgagtacgatgattctatgcagggataaattagcagtcaatcctttatatatcagctgttctgatgtcagattatattcaaatgaggagttgtgctactatatttataacaatatatatataataacaaatgattttataagtgatgagcttatacattttttaaggtatgagacaaaagatatggcacttgcagacagagttgaacagatgaaaaaaagtgatgcaggtcttgcagctattcttgttactatattaaagtcagttgattattattcgataagccagatagataagataagtgaaatactaagtacactggacagtcagaatgtgtatgagcgtttaaggtcaagggctgatacatatcttgacagaaagagatattttaaggcaatagattgttataagcagataataaaagagtataaaaatgatgcaccaggtgcatttacagccaggatatatcataatatgggagtggcttatgcgggtatgtttatgtatgataaagcagccgaaagctttaagctggcttatgaaacaggacagtattccgaaagttatgatgcttatctggcagcaaaatattttgacgaaagaaacaaagaacttatagttgaggatgtatctgatagagagcttgcggtaagaaagcgcatagaaggtgttatggataacgccagatatcaggaagagtatagaaagcttgaagagcttgtaaaaagaaaagagcatggtgacgttgcatattatcataaggccgtaaaagatatacttagcagctggaaggatgaatacagaggttacagtgcacgtgataattagaaggatattaagctgtgataatgtgcaagaggatagcatgaattgcgaggtgataaacaggtgggattgttcgatgttataaaaaatggctacgataaggatgatgatttaaaagatcttgaagagcttatgtatgataattctaaagaagcaggcaataaaatgtctataaatgatatgattaaaagctttgagcttaatgaatcagataaaacatcaaaagaagaagagacttctgattacaaggaactgcttgagagtatgcgtaataatgaagaagaagatggaccttccggactgacggaaaaaacaagaaaacagcaggaaagtgttcaaagagaagaagaaaaatatgataatcttcttaatacacttcagactcagacgcttatcaggaaagtagatgatgtaacaaggagcaagggaaaagacagtcagaattccaaaataaaatcaactgatccagatacttatgaaaaatcagaaaatagcaggcagaatattaatactataatagaaactgatatagacagagaacttgaactaaagcaggcagagcttgatgctgtaagtacaacaggttttaatggtgatgatataggaagctttataaaaagccagtgcgatatatgtgaagaggctgcccggttcatagaaaatgccagagttgaatatgacagtgtgactgattattatgaggatatacagaaaatagaaaatgcacctgctgatataagcagagagcttgttatggtggcagacagagttgataatctgtcggtagacagacgtatattaaatacacctgatagcagattatcaaacaatgcatacagaaatatggagatgtatgaggctgaatttccagatgctgtagctaagcttcgcaacacagaggatgacaggaacacaatcgccagagatataagaatggttaaaacagagcgttctatgtacaggatggaagctaaggaacttgtgaataaacagttgagaataaaaggctatgcacagcttatatgtggcttgttagcagcgatatttgctgtgtttatggtgattatggcagtgacagatggaaaagataatataggtgcatttataactgtagtacttcttgccggagttatggcactcggactgtatgcatatcttaagtcgatagaaagaaaggtatatgtaacggaaataaaacttaacaaagcaacagcgcttcttaataagataaagataaagtatgtaaatgctgccaacgtacttgattatcagtacaataaatataatgttaagagtgcgtacgagcttgaacagaagtatcaggcatatatagagatgaaagaagaacaaaaaaagatgcttgaagtcacaggaaatcttacaagtgcagaggtagatcttatgcatatacttggaaggcttggggttatagatacacatgtatggatagcacaggtaaaagcgatactcaatcctaaggaaatggttgaagtaagacacaatctgtcagtaagaagacagaagttaagaaagcagatagaatataatgagaacagaattgaagatgcgaagaataatattaaaaatataacgaggaataatccggcttatgctaaggatgcaatggagattctggaaaaatacttgccaaaactataagttgtgttacaattaagaatggctttttgtaaaaagagattaatattccgaattaagaaatatgacgcatatcaggtgcgtagtgttagaatggaggataagatgaaagagaaacttgatgcaatcaaagaaagtgctttatcccagattaaagcaactgattctcttgaaaagttaaacgatatcagagttgcttttcttggaaagaaaggtgaacttacagaagtattaaagagcatgaaagaagtagcaccggaagacagaccaaaggtaggccagattgttaacgagacaagacaggctatcgaagaagtgttagatgctgcaaagaaggaccttgctgcaaagaagagagagcttcagatgaagtcagaggttatagatgttacacttcctgcaaagaaagcagaattaggacataagcatcctaacactcttgcacgtgaggagatagaaaaaatatttatcggtatgggttatgaagtagtagaaggaccagaagttgaatatgaccattataactttgaacttcttaacatacctgctaatcaccctgcaaaggatgaacaggatacattctacattaatgataagatagtacttagaacacagacatcacctgttcaggcaagagtcatggaaaagggaaagcttcctatcagaatgatatcaccaggacgtgtatacagagcagatgaggttgatgcaacacattctccttgcttccatcaggtagaaggtcttgttattgatgagaacataacatttgcagatcttaagggaactcttgctgagtttgcaagggaactttttggaccagatacaaaggttaagttcagaccacatcatttcccattcacagagccaagtgcagagatggatgtaagctgctttaagtgcggtggtaagggctgccgtttctgtaagggtgaaggctggatagagattcttggctgtggtatggttcacccacatgtatttgagatgtgtggaatagataaagataagtatacaggctttgcattcggcgttggtcttgaaagagtagcacttcttaaatatgaaatcgatgatatgagattattatatgaaaacgacacaagattcttaaagcagttttagtatatatatgctgcatggaaggttgtgcaatgtaatgtgtatatgcatataaagtaaataagccctgttcagtcagattatcatattgtggctgtttagtatatgggcaggaatggagattagtatggatacatctattaaatggataaaggaccttgttccaggtttagagtgtacagatcaggaattcagagatgctatgactctttcaggtactaaggtagaatgttttaacagacttgacaagaatcttgagaagatagttgtaggtcagattctttcagttgagagacatcctgatgcagacaagcttgtagtgtgtcaggttaatgttggagatgaaacagttcagattgttacaggagcacctaatattgttccaggaacaagtggacagaaggtacctgtagttcttgacggaggacgtgtagcaggaggacatgatggaagtccacttccagaggatggaataaagattaaaaagggtaagttaagaggtgtagaatcatgtggtatgatgtgctctattgaagagcttggttcttcaagagaattctaccctgatgcagctgagaatggtatatatatattcggtgatgatgctgttgttggttcaagtgcagttgaataccttggtcttgatgatacagtgtttgaatatgagataactaataaccgtgtagactgctatagcatacttggtattgcaagagaggcagctgctacattcagaaaaccatttacaccacctgaagtacatgagtcaggcaacgatgaagatgttaatgattatatcaaggtagatgttcaggcagcagatttatgcagaagatatacagcaagagttgttaagaatataaagcttgctccatcaccaaagtggatgcagcacagacttatgacagcaggcatcagacctatcaataatatagtagatatcactaactatgtaatgactgaatatggtcagcctatgcatgcttatgattatgatactattgctggcagaaagataatagtaagaagagcagaggatggtgagaagttcgtaacacttgacggacaggaaagaatacttgattcagatgcacttcttatatgtgatggagataaggctgttggtttagcaggtatcatgggtggagaaaactctatgataacagatgatgttaagacaatgctttttgaagcagctacatttgatggtactaacataagaaaatcagctaagaagataggcttaagaacagatgcagctggtaagtttgaaaagggacttgacccagaacttgcacttgaagccatgaacagggcatgtgatttaatagaacagcttggtgccggtgaagtagtcggtggagttgttgatgtgtatcctgctccagtggctaagaagagaatagccttcgagccagctaagtataatgcacttcttggaacagatgtttccagcaaggatatgcttgaatactttacaagacttgaagttgaatatgatgaaaagaataatgagcttataatacctacattcagacaggatctaaacagagatgcagatatagctgaagaagttgcaagattcttcggatatgataatatccctacaacgcttcctaagggttctacaactatgggtaagattacatttgaaagaagcatagaagatgttgcaggtgaagtggcacagtttacaggcttttcacaggctatgacatattctttcgagagtcctaaggtatttgacaagcttaagcttgcagaggattcagagtatagaaaggcagttgtgatatctaatccattaggagaggatttctctatcatgagaacaattccagttaatggtatgctttcatcactttcaactaactttaacagacgtaacaagaatgttaagttatatgagttagctaaggtgtatattgcttctgatgacaagaacgagcttccagacgaaagagttatgtttacacttggtgcttttggagaagtagatttcttctctatgaagggtgttgtagaagaatttcttgaaagaatcggcatgaagaataagccagaatatgatcctgaagcaggaatttcgttccttcacccaggtcgtcaggcagatatcatatatgatggtactaagataggttatattggcgagttacatccagatgtagcagataactatgctttaggagaaagaacatatcttgttgttattgatcttgcaacagtaacaggaatggccagctttgacagaaagtttaagggcatagcaaagttcccagcagtaacaagagatattagtatggttatgcctaagtcagtgcttgttggaaacgtagaaaagattattgaaaaacgtgctggcaagatacttgaaagctataagctgtttgatatatacgaaggtgcccagattaaagatggttataagtcagtagcatattcaatctcattcagggcaaaggacagaacacttgaggataaagatatctcccctgttatggaaaagatatataaagacttaagcgatgcaggcatagaactccgtatgtaatgtaataggccaaaagaaaaaggaagcggctgcgaagcagacatttactttttcttggccattaacgaacgaatagtcctgcgaagcaggacgaaagagcgcgaagcgcggattcgtgagtatagacgagccaaaagaaaaaggcgaacgaaattagaggaatattatggatttacatgatttttattatgatctgccagaggaactgatagctcaggatcctctttcagatcgttcaagttcaaggctgatggtgcttgataaaaacacaggggctattgaacacaggatattcaggaatataacagaataccttaagccaggtgactgccttgttatcaatgatactaaggttataccagccagacttatcggagaaaaggaaggaacaggtgctgccatagaagtgcttttgcttaaaagacttgaagacaggcaggatacatgggaggttcttgttaagccaggtaaaaagtgtaaggtaggagctaagatagtatttggtggtggaaagcttaagggcgaaatcatagatatagtagaggaaggaaacagacttatacagtttacatatgatggtatatttgaagagatacttgatgaacttggacagatgccacttcctccttatataacacataagcttcaggataaaaacagatatcagacagtgtatgcaaagcatgaaggttcagcagcagcacctacagcaggtcttcattttaccaaagaacttcttaagcagatagaagatatgggtgttaagattgcaagagtcactcttcatgttggacttggaacattcagacctgttaaggttgagaatatcctggatcatcatatgcattctgaattctatcaggtagacagggaagccgcagatattataaacaaaacaaaggctgacggaggaagagttatcgcggtaggcacaacaagcacaagaactcttgaatcagtagctgatgagaatggacatataccagttaagagtggctggacagagatatttatatatccaggttataagtttaaggctatagattgtcttataacgaattttcatcttccagaatcaacacttgtaatgcttgtatcagcacttgctggcagggagaatgtacttcatgcatacgaagtggctgttgaagaaaaatacagattcttcagctttggtgatgctatgtttataaaatgatgagattataatacgtaaaaaaacataaatctaatcataaaaaaacataaaactaatcatataactttgacatacaactattaatgtggtagtatgtcaaagttattggaatttatagaaatgacggaatatatggtaaaacatatattaaataagtttgtatgagtagcacagatgatcgcggctgtggtgtaagaaccacaggtgaggaaagtccgggcttcacagggcagggtgccggataacgtccggtggaggtgactccaaggctagtgcaacagaaatataccgccaggcaggaggttttattaatgtttttacattggtagcttccgttgttcaacaatagcagctagctgctattgttatagacttaacactttagtgttaagtctattggtaagggtggaaaggcagagtaagagactaccgcagtactggtaacagtgctggctatgtaaaccccatccgaagcaagaccaaacataaagctatacggctgcccgtcgtgcttttaggtaggtcgcttgagcttactggtaacagtaagactagatagatgatcatcatcagccgttactggctgaacataacccggcttatagtgctgctcatattttttgtcctgagtaggtttgacaggggttttataaaagatatgaaaaagaataaggatacagagtggaacgaaagaagattaagaattataagagatgcactgtttgttgttattccattgattcttatagttttcatcttcttaacatacataaaagatattaaaacaattataaatgaagtagatacactaagatatgaaatggatagtgtattaaccagtattaaatctaatgattcagaaatggtggaagaagctgttgaccatatagatgaatcatctaagcatatgcagtatatactttcagaaaaaaagtggaagcttttgtcacacattccatatataaaaaaatacataaggtcagctgatacacttgtggatgttattgttaatgcatcagatgatgtgttaaaaccaggcgttgaagttatgaagcaatatccgctttcgcagttgaaatcaggagatggtttcaaggtggatactatcaatgcatatctggattatcttgagaaaatagagccagagatagaagatatgacatcaagtataagccatgtaaatgttacattcagcaagtcagaaaatatatcaaaatatgttgataagtcaaacagtcttactgcttcgtacaaggagaatggtaaatatatacagcttttcagggaatttctcggtgatggaagcgacaggatgtatcttgttgcagcacagaattcttcggaaatcagggcatcaggtggattcccgggttcagttggaactgtaaggatagaaaatggagtgatgtctataggtgattttcagactgtatacaaggtgttatcggaaagagttccagaaagtgtacaggttacagagcatgaaaagactatattcagcagctggatgaggctgtcgagggatgtctgttataatccggattttgaaagagttggcagtatatgggcacactcatatgaaagcagaaatggcatacatgtagatggagtaatctcattgacaccggttatcatacaaaaagtacttaaatgtactggtggggtaactttgtcagatggtacagaactaaatggtgataatgctactaaggttttacagaaggagctttattataagtatcttagcaacagaactgatactaacatgagtaatgcaaatgattatgttgatgctttgtttgcggaaacggctaagcttgttatgagtaagtttgtatcagaatttgattataaaatgatatcacaatatgcacagatattcacagatggtggaaaagaccgtactattcttatgtggatggaggatgaaaaagcacagacatatgtcagggaggccggctgttcaggagggcttaaccatgataaagaacatccgcaggcaggagtatactttagctgttcatatgctagtaaaatgggatggttcatcaatcttgatacacagataggagattctgtggttaatacagatggaagcagaacatatgatatgacagttgttatgagcaacgctatagtaaaaaatgatatatataaagcaggagaatatatacttggtgcacagaatggtggaataaaaggctttattcatctgtttgctcctgaaggtggaacaataagcgatataacaactagtaattccatgaagatggtacttgatgagtatgaaggtttgcagcttgcttataaccttgattttgttgtttatgctgataaacctataactataaagtataaggttacaacagctcccggggtggatgaaccattaacagtaagtaaaacacctacattacaggaatatagatgatatgattgcttatgattgtgaagctgcatattgttgtaagcacttatactaaaaacaggatgttgtagaagaattcaagtttcttcacaacatcctgtttttacatttggaatattatattaaatacgttgtattatttacctgtatatttctcttcacagtacttgcatctgtatacctgtttttcagggtctgcaagaataaatacctgatcaagctcctgttctatagaagtgatgcatcttggattcttacatttgataacattagtaatctgcttaggaagggagagcgttttcttttcaacgatttctccattctttataatacttacagttatgttgtgatcgatgaatccaatagcatcaaggtctacaagatcaagaccgccttctatcttgatgatatcctttcttcccattttgctgcttctggcattctttatgatagcaacctgacagtcaagttttccaagaccgaggttgttatatatatccatagcctttcctgcttcgatatgatccaatacaaaaccttcattaagctgacctacatttaacatattaatctgctgctaaggaacatataccgatatgtatatatccacatagcttttcctttcattaattcttaaaattatatttatttgttatttgcctgttattggtttatcatttgtctgttctttagttaagaccaagaagtgtcattataagtgccatacgtacatatacaccatactgtacctgtttaaagtaagctgcccttggatcatcatccacttcgacagatatctcattaacacgtggcagaggatgaagaacatacatattatccttggcaagagccatcttggctgtatctaatacatagaaatccttcatacgaagatattcatcctcagagaagaaacgttctctctggacacgtgtcatatataggatatcaagctgtggtatagcttcttcaagactttcaacttctatgaattctgcgttgttagcagatagtacatcatctctgatataatcaggaattcttaactctttaggagagataagtacgaatcttacgttgctatatcttacaagagagttgataagagagtgaacagttctgccaaactttaaatcaccacataaaccgatagtgaagttatcaagagagcctcttaattctcttatagtcataaggtctgtaagtgtctgtgttgggtgctgatgtccgccatcacctgcgtttataacaggtatagaagacttgcttgctgcaaccataggtgcaccttccttaggatggcgcatagcacatatatcagcatagcaggatataaccctgattgtatctgacacactctcacccttggaagctgaacttgagttagcagaagaaaaacctaatacagaacccccaaggttaagcattgctgattcaaaactaagacgggttctagtactaggttcatagaataaagttgctaatttctttccatcacatacgtgactgtatttcttaggatcctttgaaatgtctctggcaagatcaagaagatctgttaactcgctgacacttaaatccagtggactaagtaaatgtttcatcaattgttcctccatgtgctgttgttatgtttagcgttatctgacttcataataagaaaagtgattaaaaataatcatcatgctgacagccagtaacatttacatatatattactattatttaacataattctcaattgttattttgaaaaaaatgtgataaaattgtaaacattattaattaagtataataaccagtataatcagatagaattaaagatagatataatcttattatatgggtttaacataggaatggaggagtagtttcatatgtcaaagataatattaacaggagacagaccaacaggcaagcttcatcttggccattatgtgggttcgttaaagagaagagttgaacttcagaattcaggagaattcgagaagatattcataatgatagctgatgcgcaggctcttacagataatgcagataatcctgaaaaggttcgtcagaatataatagaggtagcacttgattatctttcagtaggtattgacccagctaagtctaatatattcatacagtcacagatttcacagcttacagagctcacattctattatatgaatcttgttacagtatcaagacttcagagaaatccaacagttaaatcagagattcagatgcgtaactttgaggcaagtattccagttggattcttctgttatcctataagccaggctgcagatataacagcctttaaggcaactacagttccagtaggtgaagatcaggaacctatgatagaacagacaagggagatagtaagaaagtttaattcagtatatggtgagacgttagtagagcctgagattcttcttccacagaaccaggcatgtttaaggcttccaggtacagacggaaaggcaaagatgagtaaatcacttggaaactgtatatatctgtcagatagtgctgatgatgtgaagaataaggtaagaggcatgtatacagatccagaccatattaaggttagtgacccaggcaagatagaaggcaacacagtatttacatatcttgatgctttctgtacagatgaggattttgctttattcctcccagaatacaataatctggatgaacttaaggaacactataagagaggtggccttggtgatgtcaaggttaagaagcttcttacagaggtacttaacaaggaattagagcctataagaaacagacgtcatgagtacgaaaaggatataccagaagtataccatatcttacaggaaggcactaagaaagcatatgaagtggcagaacagacacttaacgaagtgaaagctgctatgaaaataaactactttgatgatgctgagcttattaagcatcaggctgaaaaatataacggacagtagaataaaacttagccagatgaaagggttaggatatgttatgtacggcttttgaaaattacaggagggatgcagaagatgaaggaaaaaaagaaggaaaaatagaactaataaggaaatttatgaagaattttaataagtctgcagatgaggctatggatatactaggaatagatgaaactgaaaaagaagaattaaagaaaaaaatgtaaaaattctaatgttataaaaaagaataattataaaagctacatcaaagatatagtaaatttgatgtagcttttagtttagtaagaacaatgtttataaattatgtttataaataaatatgttataatgatgaataaaaccacattacagttttttaataaccatgttattagggcgcgatatcttgatttccttgccattcataactataagaccttttttataatctactgtaaagatagtgatagagctgccctcgttattcatagacatgaggtgcttattatcaggaaaaagacatacatatttaggataatcgccacttacaggaagtgagttaagagtaacaatctttcctgacttcttatcaacggaatatattgtagcagtgttatcgccagcattagagcagataagattgctgccgttattggcaaatattatatcagaggcagcactgtttgacttgtggtcacgtcttacagtaaatatgttttgaatcatctcaaaacgggttttatctgaatccttgtcataagaatatacattgatataattctttagttcacacacaacataagcatattttccatcttctgagaatatcatctttctaggggctgattcctgctgtgaacggattatatcaaacagcttaagcttgccggttctgtggttgaattcatataacttaatctgatcaataccaagatcacacgcacataagagctcttcatcaggtgtgaagcatgtgttgcttacgtgaggacggaaattgcgttctgcaacgctgcccatgcctttgtggaacacctcgtcagcaatactgccaacagaaccatcagcatttatgtgcatgacagtaatcttaccgtcatgataaccagatactacaaggaaattgttggccttagtaactgatatatgacaacctctcataccgtttatagatacgacattcatgagctcaaggcttccatcttcggtgatggcataggctgatacaccctggtcgcatatggcatataggaatcttttgtcatgtgaaagagttatataagaagggttatcaataggtacttcgcagcgttcatatatacgtccctcctcaacatcacaatcgtatatatgtatacctttactgctctcatgggtgtaacttcccacataagcaacgtaattatctttcatagtaacctccaatcattatcgcaagaactaaaaatatatgtatatattagcatttttctttgtgtttatcaaggcagacatttacaagtacgatatctttaccaatcgattttatacaatgaaatggaatgacatacacgaactcccttccaaagacaccacatagcctggcaggaccaggaactatgattgagttgatgcagccgttagatggctcgaaatctatgtcgataacacatccaagaatccggcagtcattttcattgatgacttgtttattcttaagatcatacattttcatacagactaaaaactcctttctgatgttttacccgttgcacgtgttttgtatcagtcacagctttgcatttttgtgttcttattaaaatagtatgctgatacacgcagaaatgtgaaaacatgagtgaattatcaaaatataaagataaaatgaatatattgtgaaagaaataaagtatatatttacataaaagctttttatggtagaatgataatataattatgatgtcggagacaaaaactctgatactaaaaaatatggaggatttgatatatgtattatttttatgatgcaacatatatacttgtgcttataggtgcagttataagtatcatagcatctatgaatgttaagtcaacatttagcagatacagtaggaataactgcagaacgaatatgacaggtgcacaagcagcaagtgaaatactaagagcagccgggataacagatgtcaggatagaaagagtgagcggaaatctaacagaccattactcgcctaaggaaggagtgttaaggttatcagatagcgtatatgatgttaatacggtggcagctgttggtgtagctgcacatgaatgtggacatgcgatgcagtatgatcaggattattttcctattaagataagatcagttgttattccgcttgctaatataggttcatctttatcatggccagtcatattgttaggacttatattcggagcaactgggcttatgcagataggtgttctgttattctcgctcgttgttatattccagcttcttacacttccagtagaatttgatgcctctgcaagagcacttagaacacttcgtgacagaaatatgcttgcaggacgtgaactttcaggtgcaaggaaggtacttacagcagcagcactcacttatgttgcagcacttgttacatctgtacttcagttattaagacttgtgctcataacaagaagaaatgactgattgacgtgaatgtaactgggtttgatgaagaattagaaaatatggatattaaaggcaataactataaatatatataagtggcaatttaaagatgcaggtgaacaattggcaggaatatcataagatgtttttgcaaattgttcacctgtatctttttatcctattggaataagttgttttttgtaaaatgtgacaaaaaacacttaaattttcataaaaaatatgttacaatgcacttaataaaaaacataatcaactgactatgtacaatttataactttagtactatactaatagtacagaagtacttacacacaccaaaatgggggataagagacgattgcaatatatatcatataggaatagaatctaggagcagttgattattgcatttacattattaaagaggggttgttatggaaacatattcatacacagcagttgcaaaggatggcaaggataaaaagggtcagatagaagcagaaacaagagatgaagctgcaagaaagttaaaagagcaggggcttacacctatgtctatcaagacacagacagcacttgataaggatatagagcttccttttcttactaagaagaaagttaagccaagagatatgagtgtattctgcaggcagtttgcaagtatacttaatgctggtgtcagtgttgttaacgctcttgagatgttagcagagcagaccgagaataagaatcttaagaaagctattatggatgcccagtcgggtgtagaaaagggtgaaacattatcagattccatgagacaggactctggcatattcccatctattcttatagatatggttaaagcaggtgagtcatcaggtagtcttgagaatgctcttacgcgtatggctatacagtttgagaaacaggctaagacacagggcatagttaagaaggctatgatgtatccatgcgtgcttcttgtggttatggttggcgtaattatagttatgttaacatttgttataccaaactttgtatcaatgtttgaggatcttgaatcagatttgccatttatgactaaggcagtgctttctatgagtgatgcggttatgaattactggtacataataatagcagttatagcggctatagtagttggatataagatgtatgtaaagactgatgcaggaagacattcagtagataagcttaagcttaagattcctgtatttggagtgcttcagacgaagacagcctgtgcaagctttgcaagaacacttagtacacttcttcaggcaggtatgcctatgatagaagctatagatatagcagcctctactatgacgaatgtcatgtataaggatgcacttatgaaggctaagagtggtgttgcccttggacttccactatcaaaccagttaaaggcatcacagatatttccacctatgatagttcatatggtaggtatcggtgaggaaacaggtaacatagaagaaatgcttactaattcagcaggctactatgaagaagaagttgaagtgcagacacagacacttacagcacttatggagccggctatcatagttatcatggcacttgtagttgtagtacttatactttctatataccagcctatgatacagctttacaatacattgggataggtacatatataatatatgcatgaattagcatgtatatgatcagtatgacggtgaaaagtcacactgaattatataaatattttattatcaaagggagataaagaacatgaaaaagacacagaaaagacttggtaacaagggtttctctttagttgagcttatcgttgttatcgcaattatggcagtactcgttggtgtacttgctccaacacttatcagaaacgttgagaagtcaagagaatctaaggatgctcagaatatggatgctattaagaatgcattagaggtaagcttacagaatgaaaaggtatataatgaagcagtaccatcatcaggagatccagttgctgttattacagttgaagcaaaagacaaagctacaacggatgttacaataacaggtacagaattatcagctgaaatgggcaaaacactagatacttcaaagacaaagttaacatcaaagaaatataaggcaactggagtaaaagtggaatttaagcttgatacagaaggtcatgtatcagtttcaggagctccatctatagattaattaaggaaacaaaatcatgcaatacgaactaccaatctacgtcataatattcctctacggtatcgtaataggaagctttttgaacgtacttatatatagattaccattaaaagagaatatagcgacggagagttcgcattgtatgtcatgtggtcataaactccagtggtacgatttagtgccactggtaagctacatgatgttaggcggaaagtgccgttattgtaagacaaagatatcaccacagtacccggttatagaggggattaatggtgctatgtatgtcatcatatttttagtgaatggactgaatatcatatcaggtctgatgtgtctggtattctcgatgtttcttgttataacagttatagacgagagaacacaggaaataccattcgcacttaatgtagtaataggagtcctcggtataataagaatactttttgacagagaacacctattagattatctaataggctttttttgtgtaagcatatttatgttgctgcttcttattataggaagagccataaagggagtcgatgcatttggcggaggcgacatcaagcttatggcagctgcaggactgtttgtgggatggaaaaatgttatactggcatttttgcttggctgcatctttggtgcggtaatacatgttataagaatgaaggtcagtggcaaggaaagagtacttgctttcggaccatatttgtgtgcagggcttacaatagccatgctttttggtacgaatataattaactggtacatatcaatgttttgatgttagtttgaatctgaaatgtatcagtatttatatatagatttttcataatatgctaaggggagaggagactgtttcgttatggcagttaaggttaacggcaaatatataagcataagcattaacaatgaatatacaaagttgtgcgaagcaacaaagggtgttaaagcaactactattcataaggtagttacaatcccaacaccagaaggtgtgtataatgatggtgagattcttgatgtaaaagaattcgccaaggttataaagtcatcacttgatgacaatcgtatgaattctaatgatgttgtgttctcaatatcatctagtaaaatagctacaaaggatgtcattgttcctgatattaagagtaacaagatagataaaatcatagaaaccaatgcagcagagtatttcccagttaaaatagaagattatatagtacagtattatcctatcgagaaggtaaaagaggataacacaccgaagttaaaggttgtggttgtagcagctcctgcgaatatgatagaacagtactatgagcttgcacaggctatggggcttaaagtggcattcattgattatgcaggtaacagtacatatcagcttataaaacagcagatagatgaaggtactaatcttgttatatctatagagaatgattcaacacttgtaagtatctttaaggcaggtgccttacagctgcaaagaactgtccactatggtaagactcttatggttaaaaccgtaatggatgaatacaagttggattatgatcaggcacttcaaaagcttcagacagaatatcttcttggtaagactgtagattctaatgatgttacagagtcagtgagagctcttataagtaatataagcagaattacagattattatgtttcaagaaataatacgcctatagagaagatatacatcataggtaatgccacaactataagaggttttaacaagctgttaacaaacgagtttaatatggaagttattccaatagaaaagcttgatggtgtgcttacagacaagagaacatatgttgatgaaaatgcgcttacagcgtatacagcaactataggtgcatttatagcaccggtcaattttgtatcacttaacaagatacaggaggacaagaaaaaggaagcaggaaaaggcatggcactggtcgttatagcggcggttgcagcatcacttttacttgtacttgtcccaggtatccagctggtattcacaaacatagaagtagcagcccttaagaatgatgttaagaagcttcagcctattgaagagattgtaaataagtattatgaagccaaggatgagaatacagatgtgaacacatttaggacacaagcttctaacaacaacgattcagttgatacatttgtaaaggaacttgaaagcaaggtgcctagtgatgttgtcataacaagtatgagtataacatctggcaatgtggcagtcagtggtacagcagcaagcaagtcatcacttggtatgcttatacttcagcttaagtctataccaactgtatctaatgttattgtatccaatgaaacagaaaatgaggataatacaggaactgtacagcttactttttctcttagctgctcatttggggatataaagggtgcttcacagggaggtaataagtaatgaaggaaaagttaaagaatagtcttactatatctgaaaaagataagaagttacttgtgtatgtatttgcatttcttataatctttatagcttactttgttggttaccagaatctgtcagcctctcttgatacatcaactaagcaggttacagagcttacaaagaaaaagaaagatttacagaaaaagaatgataacaaagctaagtatgagtcggatacactttctttacagagtgattcatcaaagattttaaagacatttgaaaatggtacaagccagccggcaacattacagtttttaaacactattgagagttcaactggtgtatggataaagagtataacattctctgatcctgttgcagtgtatacatttggacagaaggcatcttctaacccatcgaatacatcaggcagcgcatatcagactaataatgtaggttacaaggaaactatcaatgtatcttatgaaggtacttatgcagagtggaagaatcttatcggatttatcaacaactatgaaaagaagaatacgatagaagcattaacaacaacttataatgaagcaacagatgttgttacaggtacgatgacacttgcattgtattctataacaggtaacggaagagagttcagtgaacctaagtttgacttaaagacaggaacagataatatatttgcaaagccagctgaatagttaagggttaagtaaccagccaggaaatggagaataacagatgattatgatgaaaaaatcaggtgctgataagcgaaaaggaaaactgaataatgcaggtttctctcttgtagaggtacttgttgccatggcagtgcttgctattctttctattcctgttctaggttcgttttctaacgcagcaagaatcaatcataaggctcgtaaagaagaaaatgcgaatactgttgcttctgatatagtagaacagtttaagtctgtaagcatgagcaggatacttgaggattacgctggaaaatatacagaaagctctggaaaatatatattcagggaaacaaaggaaggaacaaatggggaagaatatactgttgtaaccgaacttgatccaggtatatataattcaggtgatgatagtgataagaactataacaataatattaactcttatgtaaattcggttaagaatattgtgttaagagaagatttatacagtcatgatatagatgctgagaattatttcaaggaaagatatacagctggttttgataaaaataagatagaaaagacaactaatgttaagatagaagttaaacatagtgaattatctgaggcaccagctgaggcttcaagtgcagttgatacaggcatagatgcatattatcagaggataacactggattttgaatacatatatgatggaaataaggcttatgcatatacagcatctattacatatcctaataattatttcaaggcggaaataacaggtgataattcttatagaatatcatcctcattaactaataatcttaaagatgtgtatatgttttatataccttatgacagacattcaactttaactgtaggtgataacagatattattatactactgataagattaacataacttacgattatcaggaaaatgcatttgttaaatatgataattgtaatgtattccttattcagcagacatctaacaacacaacagacagctctaagaatatgatgattaacaaagacaaggtgagtctttatcttaacaaagatacttcaagacaggagtttgcaaacgtaggaacgattaatcttggaaataaaacagttaataaggatggaacaactaatccaggaccggtaagtgtattttctaatgtatataagtgggatgaatataaggatattaacaatacaggttcaggcagcaatggagtagcaagtaagagtcttttgtatactatgacggttaaagtatattatggcagtaatgctgatacatctaaggaagaaccgatgatacagatgactacaacaaagatcgggtagagaaaggtgaggagaagcttatgatggcacataatttaagaaaaagagttaagtgtaataataacggttcaactatggttatcgtacttataatgttatcatttgttatgatacttgccaccgtagttacttcatctactattatgaatcttaagatgaaagtagctaataagcagtcagctaaaaccttttatacatccgaggatgcagtcaatgagatatatgttgctatgggacagatgtcatcagactgttttaacagtgcataccaggatcaggttgcgaagatggttgttaataccgaaagtggtataacaactgttgataatataacatgtaataaggagctaagacttgattatattcatagaatgcttaataagcttggcatgatacaggataatatgcttgatagtatcaagtataaggatgatagtgattatgtaagcaagaagcaggagggtgtgtacgaaagaggtgctaatacaatagaggcgcagggtatagtcagtgtcctcaatgattgtatagaagcaacgcataaatcaggaagtaacacgcttgatgttgaatccatagataacatccagattgtaagtaagaagagtcaggctgaggagaatattttttattatacaattaatattaataactgtcttgtaaagtatcttacacaggcaggatattattcatatattacatttgatatgacccttggaatacctgacaagcttgttaatataactgattcaaagaaacttagtcttgattcgtttttaagatatgctattgttggaaacagggggatatcagttgcatccaatgcatcatttaacctgaatggtaatgcttttgcaggctcagcaggtggttttaaagtgaatccagcggcaacagctaatgtggcaggaaacacgcttcttgctacaagtggtgatcttgttgttgaaaatggaacacttaatgcaggaaatggtggaacaggcagcaggatatggtgtgagaatataaagacctctgatagcacaggtggcacttctaacataacggtaaacggaagctctgatacatatgtaagggatgatcttgagttaaacggaaacaacagcaaggtcaagctgtcaggtaattattatggatatagttacgtaggggttaatgctactgaaaaggtaaacagaagtagtgcaattgttataaatggtactaattcagagcttgatcttcagtcgcttaacaagcttcttgtttctggaagggcgtatatagattattattctcttgcaaatgctgatggatatactgtaccaggagattatgatacaggtgagtcagtatcatttattggaaatcaggagatatatcttgtgcctgcagcacttatgggtggtgaaactaatccggctgcggcaggagctaatgtgaatataacaatatcagaagataacttctttggatataagtatttatctgaggcagaaggtaaatattttgttaaaaagactataactataggaagtcttacaagagattattattatctgcgctttaaagatgaaaaggcggctgcttcttatgttaaggctatatttgatgatactgaattcaacagtcttctttcaagtaaatctgataaagtaaagaaaacatacaaagagcagagagaaagattgaagtcacagatgacacttaatgcacagagtcttaacagtgtcataaaggctggctcaggcagtgtgtatactaagaattctatgttatcagctgttgtagcagcagatggcagcattagtcctgtttataatgcatcagatgatgctgcttcatcaacaaaatatgattatgcaggagattatgaagatcttgcttcaagattcaatgttcttagcagaacgctttatgaaataacagatacaaaaaagatgaataacacaattataggtcagatgtatccgaatctaaataagtattccaaagaggtatatgttaatattatatctactataggtcttgaagcttatacaaaggataagtttggtcctgttactacaaagctgacaggtggttatgataagtatgcgctggttgcgtttaataatagcaattcaacctctgaaccacttattataagtaacaatgatgaagttataagaaaaaaagcacatatgtcaaatgatataacttatagctttagagatgttgatggtggcgttatagttgcatccggagatgttgtggttaagaaaaatttctctggaactataatagctggtggaactataactatagaaggcgatgttacggttacaggtctttctgatactactgatattataaaaactgaccagaaatatgcagagatattcaaggtatggaatccgcttgaaaacagtaatgacagcggttttttggatgttcagaatatgacatataaggatatgatacgagttgctaattggaggaaacgtgatgattcggaaaagacgacacagtctacagaagcagttacaactaaataaaggattcactctcgttgagcttctcgttgttatagctattatggcgatagttataggcggctctgctataggagtgtcagtaatcagcaggggaaatgtaaaaaaagcaggtaatttcgtttatacagagcttaataatctgcgttcacaaactcttacagttaatgcagactggaagcttgatatagttaaggatacagatggaacatgcaggcttgttacatataagaatgatgtccagacagaaagtaaaactataggaaaaggttataaaataacgatatcagattatgccaattcatctgataagacagactatgatgtagatagtgataaaaaagctactgtgacttatacaagaagcagtggaagggttggttcttttgttgttaacgcaggagcctccaggtccgataaactggatgttaataataatctgaaggcagttataactataagccgtggaagccattcgtatgatgttacagtgtggtacagtactggtaagttatcgttagcatagtaaaaggagcaaaggattctatgaatgaggttaatgtgtcagcagattgtattaataagagaaaggctgatggaaaacttaataataaaggcttttcacttgtagaaatgcttattgccctgactataagcggtatagtattgtcagctctggttgtccttatagaaagttcagtgcacaacttcacgaagcagacagcacaggcacagcttcaaagcgatgcggatattgcattgaatcaggtcgagaacgatataatggaagcagatatgcttatcatgtatagaagtcctgataagaacagtggatacgattattatcttactaagtattctaatactaataagtcaaggtactatggttatatatgggataaagctaataagatattatatttttcaaatgatttctacccgttaggagataagccgcttgataacgtgagtgtggcatgcgagtatgtcgaggacttttccataaaaatcgatgataaatgcgtatcagcaggagatgtggagcagcctacaacaagagttggggaaacaccaaagaaagaagagggtgttattcttacatctaatataaaggtaaaggcatatataaagctttctaagcagaatgtaagccgtgaagtaaagagagaagtatcacttagaaattctctttatggagatgatttaaccaacaaggttaaaatagtgaaggtaaacggcagtgataaaacaataatagagataaagtattttaagctgggagatataaaagcgcaagggtatgttgatgtctgattatagcttgtaatcataaatgttggtaacagcttgttttgacagaatgtttagtgtgtggaatacatattaagagtatcagataagagtatcagagaaaggatgacaatatgaaacggatgttaggtaagataagaaaaagaaaatatattagtacagttttgttatctgtggcacttgtgtttttgtttgtcatcggcggaatgatatataagacgcaggcgacaggtggcggaaaagctgtgattgctaatgcagtcacaataggtgaaagaacatatacaagggataatccgcttaatattattgaattggttcctgatgaagcagtaggtgcatggggatatcttacaggcatgaataatggtgctgtcaagtggtcagatattgctggattgccagatagtgctgcaaagcatgacctgtgtaatacatggctgaataattatatgaaaagtattattgagtataataactatacgattccagaaaataagaatcaagctgagtatgcaggaaagaatatctattatagaaagaatagcgcgtctgaatggaagctttattcaaaggattgtgctaatgagataacctcagatactgagtttaaatttaatgttattgataattatggaaataaaaaagaacttgatatatatgataaaacatttgtcgatgaacagggaaataatataagcggctataatgataatctctttgcttatatggtatttgctggtgataattcaatagctaaaggcgattataatatgatggataaaatcagggttacaagtgtctctattgatgccctgacaacaggtatgattgataatgcagatgcaataatagtatctgctggagaaaatatcagtacttatcctgcagaaacatataaaaaaatgtatgagtatgcacaggcttatggcgatgcacaattaaaagcaaaatatccagctaaagccggaatcactgataaagactggtcatctcatacatggggaaataatgtatgtttgggaaaagactttagtgatgcatcagttgcaggacgcatttgttacaaatatttaaatcaggagcttagtataataggtggatttgattataataagattgataaaagcagacaggaaaatcttatgaaaatgtttgtaacaataactggaatagacagggatacatgtctgcgtgatttgtgcgagtataaggttattgatgaagatacaacaaatgaaataactggtgtatatgagggagagtatggcaggtttgactttgataatatggaaatatacatatttaatgagaacaggagcaatacataccgtgtaacatatgatactgctggatggattaattttaatcagggtgtttttggtaaatacctcggtgaatggcctaaagtaagtaattattatagcaattttccgtataaaggatataacgttgcaccagatagaattaatgagaatgttttctggtttggatatgcgaataatcctcttagatcaggctttatatcaactaaaattaatatcaagtggaatgataacgagttcaatcaggttaatgatgtattaaaaacatataatataaatgatggaaatatagatattgctaaaatgattcaatatgttcttggtggctataagagaaataaggctatagaaaagctcaaggttcttgaaatccagccatctgctgattatgagtataatacatatgatggagcaaagtctttgcttaaatattttagtaatgcaaagtttaaaataaatgtatcgggaattacagaaaagaattataaaagatatattgatgtcacgtcagttactgtaaatgaacttaatggtatgacagataatatagctaataattatgatcttgttgtcataggtgaagaacattctaagaatcttcttaacataaaaggacgtattaaacagaataatggcgatactgttgacagctattattattcgcagggtgcagttgtgagtctgtgggatcgttcaggtaatgatacaggaaaagatgttgcttcggctggaaatgatataactgaaaagactctggaaaaacttaaagagtatattaatatggataaaccagttatattagcttctgatatatataatgcatcaactagtggtgtcttagttaaagataaaaatggtaaatatacaagaacagttgatactaatatttattctgtattaccatatgccagaagtgttggtaaaacttctaatataactgtagaagctgcagctaatgctgttgtttcagatagtgacaaaatagaatataagtttaaaccagttataagacagactattgcagatactggcctgaatgaggaaaataacacatttacggttaaattcaagacagataatacatctggaaaatataatatagagttttatattgataaagatgcaaatggtgtgtttgtaaatgcacatgatgacactggtgagttatatgcaggtggatttagtgatacgaatccggtggtttatacttataacaatggatatataactgttacaacaacaacattaccaaaagatttaagaccttatttaccttggaagcttgtcattaaggatgtaagttctggattgacggctgaaacaacaggaatattaagaataaatgtaccagacgaaaagcaggaagatgtaaagatattacagataatgcctgatatagatagtaagcatgattacagtcttaagttaaatgattctgattttatgaaattgtttaatgatgcaagtggcacaactggattaagaataaataaaaaggatgttgatattgtaactgttaaggagttgtgtgaaggtgataacaaaggtaatgactggtataaaaacagcaggtatacagcaggaacaagccttaataaagatggagaagatctgctaaaggattatactattgttgttcttggttttgcagatgcatttgacaatattacgaacacacatgctctggctaatctgcgtgattatatagagagtggcaaggctgtacttatgactcatgatactatcggacagtattcatatacggatgagaatactgatgaaactgaaagcttatttgcaggagatgattccgatataagaagagcagttccaataatggtagatgacaagatatcaaagggctatatgttcacaactgcgttcagaaacatagttggtatggatatgtatcatgttacggtcggacaggctaaagaaaatctgtcttaccagcagggatacaccaatacaatagttacaagatatggtgtattgccaggctatgattataaaaatgataataattatatatataaatataatcatagaacggaaagaacggtttcatcgcttcgtactaatgctgttaataagattaatgatggacagattacctcttatccatatacaataccagataatctgactgttgcagaaacacatgcacagtattatcttcttgaccttgaaaagcaggatgatacagcaagcagtatagatagtggcggagatgtggttgtatggtatacattaggacagggaacatctaaatatagtgagagtgattatttttcagtgacaggaaatgatgcagccaataattattatatttattctaagggtaatgttacttattctggtgcaggacattctactatgagtaaggccataagtgaagatgaacttaaactctttgttaatactattatatggtctattaactctggaaataatgcacctcagattaagattgagaatgccgtgatggctgatgatggcatatatgaaatgtattcactagacggttctataccagatatacagttcgttgcaactgatatagatatgggttcagacaccagtgcgctgatgtcatcaggtgtatattactgggataaggataaagatggtaattatactaagaataacgcagacaaagatgttgttatccagacatttgataaggtgacagaaggtttaaatagtggatataatatatataatggcataagtgaaaaacttatgtcggccagattcaacaagtcaggtgaatatacaaggctggcgagtcttgtgtataagagtgcaacagcttcatcagataccaatgtgaatcttgcatcagaaagtacacagatatataaagatatgtgtaatgaactggcagataaaggcgttgtatatcttggaatgcaggtatctgattccaagggaggaactggaaaggctgttataagagttgtaaggagagatttgtttaagttgaattaggatattaaaaattgcaggcgatagagcagactatgatttactgtataagcagtagattgtagtctgcttttgttatgtttgtaaaagtataaagtatttataaaaagtaaaacaatacttgcaatattaatatttttatgatatatatagtatataaatatgcatatcatgtgagggttaaaagattaaaagccatatgagcttacaatccttacatttttataacaggaagattatttacctgtgaattctagctggatttggcatcggaatattcccccaaggcgattaaactgaatattaaagagaatgtttacagacattcagaaaggtggtttatgactaattctattaaggataaaagccagaatgatgttgtgatgaaagagttctggcgtgataataagcattttgcagatattgttaatgctgtagtatttgatggtgagcaggtagtgattccggatgaactgcaggaggttgatacggatgtgtcaggttctattattgtggacgagtataaggaaacattaaaaagaataagagatgttgtcaaaaagtattattatggtgtagaatttaatataataggtttggaagtacaggaaaatgttcatctggctatgccgctaagaactttggtttacgatgcacttggttatcttaaagagtataataaaatcagctcagtgaatgaaaagcatggctataagtgtaaagaacgtacagagtttttatccaggttaaaaagaacagataaatttcatccaataataacaatagtattctactatggagagaaatgctgggatggaccagtgaacctgaaagatatgatggttgatatgcctggtaaaatagctgaaaagtttaatgattaccggttaaatcttatacagattagagattcgtataaatacaggtttaataatgatgatgtaagattactgtttgattttgtttctgacttatataacaaagaatttgataaaatatttaaagaatataagggcagggatgtatcaatagaatttatagagatgataggaaggataacaggaacaaaggaactggtaaagcttgcagataatggcagaaaggataaggtagttaatatggagatgtgcaatgcaatgaaagagttcttagaaggaggcaggcgcgaaggacagcgcgaaggacgaatagaaggacagcgtgaaggacgaatagaaggacagcgcgagggcaggatagaaggaaaggatgaagccagacttgacagtataagaactttaatgaaaaagcttgaccagactgcagaagaagctatggatacgcttgatatagctgatgaggataaagtaagatatcgtaagatgcttggcttataagtttgtttcagtgtgctatgaaaggtgcaagttatttataagaaaaacacagatgaaaagtgcaaaagttaagaaagagggtgtaatgtattgtttagcagtataacaactgcagcgttgtgtggtatagatgcccgtatagtaagtgttgagactgatgtgggaagtggacttccaacatttgatatgagtggatatcttggtacggaggttaaagaggcaagagacagggtaaggatagccataaagaatactggagttgaattaccgccgcagcgtatagtggttaatatttcgccggcagatataagaaaagaaggaacagggtttgatcttcctatagcgataggcattctcgtatcaaacggaatcatagaagaggaaaaggttaaagacacgcttgtgcttggagaattaagccttgatggaacagttaatcctgtcaatggagtgcttcctatagtatgtgcagcaaaagaagccggtataaagctatgtattattcctaaggataatctaaaagagggcagcatagcacaaggaatacggttatatggtgcagagagcttaaaggatgtacaggatatacttattaataatagtctagatggcgtttcagccaataatcccagtgatgattttaataaaaaatatgaagctgaatctaaagaagttaaatctaaagaagctaaatctgatggagtgatttctgaaggcgttatattagctgacagtttaaacgaagaggaagattatcttgatataagaggtcagtatagtgcgaaaagagcaactcttattgcagcagcaggaatgcataatattatgtatgttggtccacctggaagtggcaaaaccatgcttgctaaaaggattcctactatattacctgatatgacagatgaagagaaactgaaggttactaaaatatacagtgttgcaggaaaacttgatgcagaaaagggacttataactagaagaccattcagaagtccgcatcatactataacggcggctgctatgcttggtggtggaaggataccaaggccaggagagataacactatcaggttcgggtgtgctgtttttagatgaaatgacggaattcagacctgagcttatggagtctttacgacaacctcttgaggataagaagataacagttgtaaggcttaatgctgcgtatacatatccagcggaatttatgcttgctgctgctattaatccttgcaaatgtggttactatcccgatagaaaccgctgtcactgttcagagtatgatatcagaaggtatatagggcgtataagcaatcctatgtgggatagatttgatatatgtataaaagtcgatgaagtgacatatgaggatataactggtgcaaaagacagcagtgctgtatacagttcagcatatatgaaagagcaggttgagaaggtaaggcttatacaacaggaaaggtttaaagattctgtaacagattataattcacagatgaatatgcgtgaaataaagaaatattgcaggcttgatgaagaatcttcaaagattatggagtctatgtataagaagttatccatgtcagcaagaggatatgggaaagtacttaaaactgcaaggacaatagcagatctggcaggcagtgagaatatattaagtgaacatataacagaagcacttatttataaaaagaacgaagtgtaatataagaaactgacatgtaaatattttttataatgcgagggaaaatatataatgagtaaaaataaggctatatcttcatatctcgaagattattactggtactggttctgtaacataccacgtataggaaagactaagctaaggcagctgctaatggtatttgaatcaccagaacatgtatacaaagcagatgtggaagttctaagatgtctgggatcactgagtgataaagaacttatgtatatatctgattctaaaaaagataatatgatatatgaagaatttatcagtatcagaaagaaaggaatacattttacgtatccaggaaaggaagattacccacaaaggctgttacatatatatgattatcctttatgtctgtattattatggaaagctgccagatgataagaaaccatcagttgcaatcgtaggttcaaggcagaatacaacctatggatataatgtggctggcgtgtttgcaaaaagctttgcaaagatgggaatacaggttataagcgggttggcaagggggatagatggagcggcacatatgggtgcttttaaggcagatggatatacgtgtggtgtacttgggtgtggggttgatatatgttatccaagacagaatatagagctttttacacagatgaaagaaaaaggctgtattgtatcagaatatccagttgggaccgcaccgcatgcaggacagtttccggtaagaaacaggattataagtggcttgtcagatgttgttatagttgtagaagcaagaaaaaagagtggttcacttataactgttgatgcagcacttgaacagaataaggaggttatggtagttcctggaagaataggggacagcttaagtgaaggctgcaacgatttaataaagcttggagcagccgtcataacaaggcccgaagatatattagatatagaagaaataagaagaaagttagatgattacaggaatatctatgattataaatcgagcaggagtggtgaatgttatataggtatgaaaacagaagaaaatgaaacgatatgtaataaaacagaagaaaaatccacaaacagtataccggaatacgagcaaaatgtgaattctgtacatgaatttaaacttgcaacacctaaaaatatgttgtatagttgtgtggatttatatccggtggggttaaatgaacttatagaaaaaaccggattatcattgcaggaaataagtaatgcactggttgagctggagcttgagggaaagatagaagaggttgctgataattgctatgtaaggatatacgtatagaagcaataattataaataccagacattagtcagaaaatatgttttgaccctgtaatctaaacatttaatcatatctaaggagttagtttaatggcaaagtatcttgttatagtggaatcaccagcaaaggtaaagacaatcaagaagtttttaggttcgaattatgaagtaatggcatcacagggacatgtaagggatctgcctaagagtcagatgggtgttgatgtagagcatgatttcgagccaaagtatatcactataagaggaaaaggagagattcttgcagcacttagaaaagaagtaaaaaaagctgacaaggtgtatcttgcaaccgatcccgaccgtgagggagaggctatttcatggcatctttcaaaggcgttaaagttagaggataaggatatatacagaataacatttaacgagatcacaaagagtgcagtcaaggcagccatcaaggatgccagaaagatagatatgaatcttgttgatgcacagcaggcaagaagagtacttgacagagtagtaggatacagcataagtcctgtattatgggcaaagataaagagaggacttagtgctggacgagtccagtcagtagctttaagaataatatgtgacagagaaaacgagatagatgcatttattccagatgaatactggactatggatgcaacacttaaggttaaaggtgaaaagaagcctatagttgcaaaatttcatggagatgtcaacggaaaaattgacataaaaaacaaagaacagatggaaactataaaaaaagaagtggaaaacagcacatttgcagttgatagtgttaaaaaaggtgagaaagttaaaaaagctccacttccttttacaacaagtactcttcagcaagaggcttcaaagactcttaactttgcgacagccaagactatgagaatagcacagcagttatatgaaggtgttgatgtagagggaagaggaactataggtgttattacttacttaagaacagattccacaagagttgctgatgaggcaaaggaagcatcagaacagtatatagctgctaattatggtgaaaagtatcttccacatagtggcttaagaaaaaaagatgataagaaaatacaggatgcacatgaagctattagacctactgatatagcacttacgcctgttatgataaaagattcattatccagagaccagttcagattatatcagcttatatggaaaagattcacggcaagccagatggcagaagcgatatatgaaacaacatctgttaagatagcggctggagattatagattcagcatagcggcttctaagattacgtttgatggctttatgtctgtatatagaagtgatgatgataaagatgaacctaacgcacttgtaaagggtatagatgaggattcgcagctcacacttgaaggtgtggaaggagtacagcattttacacagccaccagcgcattttacagaagcatcacttgttaaggctttagaagaacttggaataggacgtccaagtacttatgcgcctactatatcaactatcatagcaagacattatatagcaaaggaacagaagaatctttatgttacagagcttggaagagctgtcgatgatgccatgataaaggcatttccacagatagtagatgttaattttacagctaatatggaatcgcttcttgatggtgtggcagatggtgatgtgaagtggaaagagattattaagaatttttatccagaccttaaagaatcagttgatagtgcggaaaaggaacttgagaatgtaaagatagaagatgaggtaactgatgttatatgtgataaatgtggacgtaacatggttataaagtatggacctcatggtaagttccttgggtgtccaggatttcctgagtgtcataatactaagccatatcttgaaaagataggagtaaagtgtcctaagtgtggtaaagatatcatacttaagaagactaaaaaaggcagaatgttttatggctgcgaaggatatccggaatgtgatttcatgacatggcagagaccttcggataagaagtgccctaagtgtggaggttatatgcttattaaaggtaacaagcttgtgtgcggtgatgaaaactgcggttatatattagatgatacgaaaaatgttaaataaatggttctatatatcacattaatatagcttttatgtgactttagaaagagatttattgaaattgtcagataaatacaataaaaatgttgattatttgaaagttgtgtgatagtattctcttatacagatatttatcggtgtaattatgtatatggaggaatgtatgatgagtgtacagcttttggataagaccagaaagattaacaagttattgcataataatcattcagcaagagttgattttaacgatatgtgcaatgtcttaagtagtatactcgaatccaatatccttgtcataagtaagaagggaaaggtccttggtactggttattatgctggcgtcgaagtgattaatgagcttgtctatgacaaagttggtgggtttgtggatgagatgcttaacgagagattattaagcgtattatcaactaaagagaatgttaatctgtctacgttaggatttactattgagaatgttaagaagtttcaggctttgattgcaccagttgagatagctggcgaaagacttggtacattatttatgtataagagtgatagttcatacgagatagatgatattatccttagcgaatatggaacaacagttgtaggacttgagatgatgcgttctgttaacgaagagaatgcagaagaagtcagaaagaaaaagatagtaagatcagctatagacacattatcgacatctgagctagatgctattaagaatatttttaaagaacttaacggaaacgagggtactcttgttgctagtaagattgcagataatgttggaataacaagatctgtaatagttaatgcgttaagaaagtttgaaagtgccggagttatagattgtaaatcatctggcatgaagggaacatatattaaagttattaacgaatatgtgtttgatgaactttcaaagtatgatgaatagtcttttgcaggattgtttacaaagtataatttagttatgtataagggagagcatatgatatatatgccctcccattaattattttaagggaaaataataatgtttgtcatgaatactattaaaaatggaataaatagacaaaaatagcttgtttttttgtcgaaaatatttataatgatagtagtatcattatatttatgattataatgagcgcaagaaaagccggaaagctgcttgcagatttcttgcgaacagcgaatgacgatcgcgatagctgcgatagcagcggcgagtagcaaagctacgaatcgtgatataataaacagaaactatgtgaataaaactatttatatccattgtttggaaaggggtatatatgagttcaggaatgtttggattcgttaatgtattaaaagcggcagcagatgccagctggacaagagaagaagtattaactaacaatatagctaatgtagatacacctaactataaaagacaggatgtagattttacaacttatttaagatctgcactttcgcgtaccaacggaggttcatcatcccttacgaacagagttaataatctcaattataatgatattgctatcagaacttacacggataattcaaccttatcatacaggcttgatggcaataatgttgatctttcaacagagaatgttgaacttgcatcagaacagattaattataatgcacttattgacagtatgaataatgaattttcaagattcaagacggtacttaagtaagtagtatagtgataaggagaataatcttatgtcgatgtttacagcatttaatataagtgcatcaggaatgacagcacagcagctaagaacagatgtcatatcgcagaatatagctaacgctaacacaacaagaacaagtgatggaacaccttatgttaaaaagtcagttgtgtttacagaaaagacactcacctcagcacaggcaggggttggaacttctgtatattcatctggatacaggggaagtacaggcacatttgctgatgctttaagagtagcaagtggtggcatagtaggaaatggtgttaaggttacttctatatatgatgacacaacagaagatatgaatatggtatatgatccatcacatccagatgctgatgagaatggatatgttacatatcctaatgttaatgttgttcaggagatgacagatcttattgatgcgtcacgttcatatgaagctaatatatcagcgtttaatgccagcaagagtatggcatcaaagggacttaccataggacagtcttaataagtaacaaagcatagaaacataagtattatttatggatttacttatgtatatagatacacggaggaattgtaacatggatttaacaacggcagttaattcacttggaaatgattatatcaataaagtatcagatcttttaactaacaacagtgttacaaagacagatacatctggaaattctacatttgattcagtatttaattcagtatcaggtcttttagacagtacgaattcatatatccagcaggcacaacaggctgaggttgattatgcacttggcaatatgacaaatacacacgagcttggagtgtatcagcagaaggctaatatagcattgcagtacacagttgcaataagagataaagcattagaagcatataaagaaatcatgaatatgcagatataattacttaggagttaataatggcagatagattaaaacagattccacagaagttattagatatctggaagagctggtcggtaaagaaaagaataataatagtaagttcaatagtagcttttatagctgtagtaggcatattgtcagttgtacttacacgtcctaagtatcaggtacttgtaacatgtgaagattatacagagatgaattcagtaacatcgatacttaccgagaataaccataagtataaaatagacaatatggtagtaagcgtaaatgaaaaagaacttacagcatgtaagatgttacttgcaacacaggatattaagtcagatggttatacttttgaagatgccatgaagaggagctttacaacaacagattcagatagcacgaagcagtatgcacattatcttgaaactaagctggcaggagatcttgaggatatggatggggtcaagacagcttctgttaccattaatatgcctgagaagactaactcgttctatcaggcagcaacagatgcaacagtagcagtaaagcttgttacaactaaagagataagcggtgatacagcggagagtatggcagcacttcttgctatggcagttgggaatgattctacgaagagcattactatcatagataacaagggaaatacattatttaacggagcatcagggaacagtacaacatcaggtgttggaatgaatgataagttaaagtataagtcacagatagaggctacaacaagcagctctctgctaagaaatatacttgcaacaggtctttatgatgatgcagttatcacacttaactatgaactggactggaatacagttaacaaaatagctaaggagtatacagcacaggatggaagagatgagggactttatagtcattcatatcagcaagcatcaacaggaacaaacggtgcaagtggaacacctggaactgcaagtaataatgaaactacttacgatataacagatggaacaacatcatcatctacgtatacagttgatgagtttgattatcttcctaatgagcttgtaacaacaactaataccgatcctggcgcgatagttaaggctaattcttctattgcagtaacacttatacaggatgtgacatatgaggaagaacaggcgggcaagcttggatatcttgatggaactgactgggatactttcaagagccagaatgcagagccttctcctatagcagtagataacacatggatagatattatatcaaagggtacaggtattgatcctgctaatatatctgttgtggcatatcagaagaattcatttattgataagcagacaactaatattttaagcaaggcatcattctggattcagcttgctttagcagcagctatactcggaatacttatctttgttattatcagaagtgcacgtccacttactgttgaagaaaaagaacctgagctgtcagttgaagaaatgcttgcttcaacaagagagaaccagcaggcttctgttgatgatattgatcttcaggagaagtctgaaacaagaaaggcaatcgagaagtttgttgatgagaatccagaggcagttgcattactgcttcgtaactggttgaatgatgattggagttaagaacagtaataaatataatatgggagtacatatatggcacgaaagaataacaatggtgaaaaaggcatggacggggttgaaaaagcagcgatactgcttatagcccttggtcctgaaaaatcagcagaaatattcaaacatttaaaagaagaagaaatagaacagcttacacttgagatagccaatacaaacagtgtatctccacaaactaaagagcaggtgcttaatgagttctatgaagtatgtcttgcccagcagtatattgcagaaggtggtataggatatgctaaagagcttcttgagaaatctcttggtgaagaaaaagcaaaagctgttattggaaagcttacagcaagccttcaggttcgtcctttcgaattcatcagaaggacagattcatcgcagctgcttaactttatacaggatgaacatcctcagactatagctttgattttgtcgtatcttcctccggcacaggcttcagctgttatatcttcactgccacctgaaaagcaggcagatgtagcacgcagaattgcccagatggatagaacatcacctgatgttatcaagcaggttgaaaaggtacttgagaagaagcttgcatccttagttaatcaggattacacgattgttggtggtgttgatgctatcgttgaaatccttaattctgttgacagaggaacagaaagacatatcatggaaacactcgaggttgaagagccagagcttgcagacgagatcagaaagaagatgttcgtattcgaggatattctttcactcgacgacagagctatccagagagtgcttagagatgttgataactctgatcttgctcttgcacttaagggagcaacagaagaagtacagaatgttattcttaataacctttcaaagcgtcttgctgtaatgataaaggaagatatggaatatatgggacctgtacgtatgaaggatgttgaagaggcacagcagaagattgttaatataatcagaaagcttgaggattcagctgaaatcgtaatagcaagaggcggaggtgacgaaataattgtctaatctgttaaaaagaggaactacgtttataagcgaagaaagaatcattgactataatgaacttataaagcttaagcttaaaaatattgttagtgataaagaaagccatagtaatgttgatgcggatggcttcgtgaatggactaaaggcagatgttgttgaacagcttcttacaggttcagaagatgaaaatgaagctgtggattcacagaatccggatgatgttaaaaatcagcttgcagcagctatagaagaggctaatgaacaggccagaagcataaaagatgaagctaatgaagtgttggcacaggcgcatatggaagctggaaaaataatagaagatgctaagcgtacaggatatgagcagggtgcatgcaatgccagagaagagtatgaatcaaaggcagaagcacttgaaagggagtacgagcaaaaaaaggcacagcttgaaaaagaatacaatgacttgaaggctgcaatagaacctgagctggtagaaactattacagaggtttttagaaagataacttatacggtagctgaggataacaaagagattatcattggtcttatcaatggagttatgaagaattcggatataagcaatgaattcgttataagagtttcgccagatgattacaggttccttgtaaacaatcaggggaaaatatactgtgcagtatctaaggaagttaatatggatatcgttgaagatgcagccatgaagaagaatcagtgcattatcgagagtgacactggtgtatatgactgcagtctggatattgagcttaacaatcttatcagggatattaaacttctaagttgtacacaataaaaaatcagttgaatgattcagacagggaggaaggaaagttgtcaattctgaataaagataagtattatgctttaacagagcaatctttctataagaagcttggaaaggttacaaagatagttggacttactattgagtcaataggaccggatgctaagttaaacgacctgtgtaaaatatattcagcagataaaagccaggtgctatatgcagaggtggttggctttaaggattcaagagtacttcttatgccttttgatgttgtagacggaatagggccaggaagcatagttgagaatacagaaagtccacttgctgtaaaagtaggagatgatatattaggtcatacacttgatggtcttggcaacccgacagatggggcagaacttacactggataacagttattccgtagaggctgcaccgccagatcctatggaaagagaaataataagtgaagttcttcctctcggtgttaaagcagtcgatggcctgcttacagtaggtaagggacagagaataggaatatttgccggaagtggtgttggaaaaagtacgttgttaggtatgtttgcaagaaacacaaaggcagatatcaatgttatcgctcttataggagagcgaggcagagaggtaagagagttcgtagaaagagacttaggtcctgaaggcatgaaacgaagtgtacttgttgttgcaacatcagataaacctgcacttataagaaacaaggctgccaagacagcgacagctatagcagagtatttcagggatcagggcaaagatgttcttcttatgatggattcattaacacgtttttctatggcacaaagagagattgggcttgcatctggtgagccgccagtaacaaggggctatccgccaagtgtatacagtgagatgcctaagcttcttgaaagggctggtatgtcagataggggctcaataacagggctttatacagtgcttgtagatggagatgattttaatgagcctatcactgatacagcaagaagtattcttgatggacacatcatgttatcaagaaagcttggacataaaaatcattatccggcgattgatgtacttcagagcatctcaagatgtatgagccagatagttacaaaggaacataagaaggcagcaggaagattgaaaacagttcttgcaacctataatgaagcagaggatcttataaatataggagcatacaagagtggttctaacagaaatatagattatgccatatataagatagatgccgttaacaggtttcttatgcagcagacagatgaaaagttttcatttgaagaagaactacaggagcttattgaactgtttgcagattatgatgattttgaagcaggtaagctaaaacttggaggtccaccttcaggacagagaagataatgatgtgaagcctttataatcaaggatatcagaataacttctgcttaagaaacagacaggtatatcaaagaaagatggataatggcaaagtttatatatagtatgcagaatgtgcttaacataaaggagcgtatggaaacacaggctaagacagaatatgcgcagatgttaggtgcacttcatgatgaagaaaacagaatgagaagcatagttgatactttaaattcatataaggcgcaggctaaggcattagcttctggaaagctggatattgcaaagataagaaggtgcaatgaggctatagagataacagaggatatggtaaagaaccaggctgtaagggtaagacttgctgaaaagaatgtagaaacagctatgatgaagctgacggtggcagttaaagaaagaaaggttcaggaaaagttgaaagaaaaagcttttgaagaatttttacatgaattaaacgcccaggaaatgaaagagattgatgaagttgtaagtttcaattataataatagagaagatgatgtgtgattgttatgataactataatagagtattatagaaaacacagatgaattaatatggagaacagattattatggcaaagaagaaatccaaggaagaattagatattgataatgacttagacatgggtgaagaatctgaaagtgctggtggcaataagttcctcaatatacttattgtacttgctgttattatcgtatggcttgctatatttgcattgcttataaagatgaatgttggaggaataggcagtatgctgcgtccttatcttaagaatattccaggtatcaatatgattcttccagctgcaacagacgaggatatagccaaagaaacaggtggtaaatataagaatctctcggaggcaatagacagaattaatgagcttgagtcacagcttgataattacaagaattcagattcgtcagattcgcagactatatcagagcttcaggctgagattgctagacttaaggtatttgaagaaaatgcacagtattatcaggaccttaaagataagtttgaccgtgaggttgtatatgcagataatgcgccggatatagaaaactataagcagtggtatgagtcaatagatgcagataatgcagcaaagctataccagcaggttgttaaggatcttcaggaatcacagcgcgttaaggactgggcagaggcatattcaaagatggatgctgaaaaagcagcagctattcttgaagaaatgacaggagataccaatcttgttgccaagattcttaactgtatgacttcaaagcagagaggtgcagttcttgcagctatggatcctgtatatgcagctaagataacaaagattatgtatccatagagttaacactggtaattagattataagattaacagttgtataatctgtaatctgttacatatataaaatgctgtgagtgttgtatgtgaataaggcactcacggatatatcaggaaaggaggtaaaaagtatggtaagttcagcagttatgggagctggggcagtaagaaatacttcttcaggaacagcttcaaaaagcagtaataccaaaagcaaatcatcagattttaagtctgtcatggcagcctcaatatctaagaatacttctaatgcaggcacaggttcatcagatagtaagcttggaatagcagatgctgtaaaaacagctaaagaccagaatacaactgatacaaagaatactaaagctgatacagatgtggttgataaaaagcagaatgcagctgacacaggtaaagctgataaaactgacaagagtaaacaggataataagtctgatgaaaaagtaaatgatgtagttcagaatgtgaaggatactattaaggaagaactggatgtttctgatgaagacatagctaaggcgatggaagtgcttgggataacagataatgatttactttcggtagtaaaagttactgagctggtgagtgctttaacaggcgctgattctataacacttataacagatgatgatatgtctggtaagcttacatcggttctggatgctgttaatacagcacagaaagatatagcagatatgttaaacacagatgttgatgatgctgtgttagtggtaagaacggatgctgtggtaaaaaaagatacagatgaaacagttgtaaagaatacagatagcagtataacagataatcagtcagtttctgaaacagagtcacttagtgacgtacttgctgctaaggttacagcacagggctcttcaaaacatgaggagagtacaggcgaacatacaggtgaacagaatcacaatacacaaagctatggcggtgttgctgatagtattatccagagcatgaaggatagttttgctgacattgtaactgaggatacttcacgtgtaagtgaagcagatatagttaatcaggttatagaccagattaagctttcatcgggaagagagcttacaagtatagaggtgatgcttaatcctgaaagacttggaagtgttcatgttacggttacagctaagaatggtattctttcagcccagatagcagctcagaatgaacaggtcaagacagcacttgagaatcaggtaacagctcttaaagagaatttccagaatcagggaataaaagtagaggctgtagagattactgttatgactcatcagtttgaagcgggacagaactttggacaaaacgagtctgaaagaaagcagtcagagcaaaagataaacaaaaagcttaatttatccgactatatggatgatgaagatgagactgtaagtgcacaggatatcagaagaaaagattcaatacagaatggaaacagcagtgttgaatatatggcataatgcatgagttttatctgatattaaagcagttattacttaaaattttaacatgtgaaaggagatgatattatggcaggaactatagatacaacaagtaaagtgtctaatcagattatgagttctacatctaagacatctaacacaaagaaatcaaatactcttaatatggagaatttcttaagccttcttgtagcagaaatgcagaatcaggatccacttgagcctacaagcaattcagattatatggcacagatggcaaccttctcacaggtagaagctactagtgagatgaatgaaagggtactcagccagacagcatctaatcttataggcaaggctgttatagtaaagacagatactaacagcacaggttatgcaggtggtatagttaatggctggcaggagattgatggaatagtatatcttggtattaatggtaacctttatgatatcaacgatgttgatcaggttattgacaaggattactatgaaaagtggaataataatggaagcactacaggtggcagcaaaactgatacagacaataagactaagtaaagggatactgtaaaaggagtttaagtatccggacaggaacaggagattcgtatgaataatatgattaacaataatattaattcaattgaacgaatggccgaagtcatcagtaagagaaagaaacaggatgttaatgccagttatgctggcccttcatttactgaaatattaagcaggcagaagtcgatagatgagattgtatcagacagaactgatgtaaaaaaagctgtcacgggacagataagatttacaaagcacgctgatgcaagacttactcagagagatatcagacttactgacgaccagatgacaagacttgaagaaggtactaaaaaagcatctgataaaggaatcaaggaatcccttgtgcttgtggatgatcttgctttcatagttaatactgataaaaaaatggttataacagcaattgaccagaattcaagtgaagataatatatatacgaatattgatggtgcggtgattatatagcaggaccataaaggatgctatccattcctgaatgacagaaggaatggacgctcatcaataaatacaggtataggcaatatggaggaacaatattatgatgagatcattgttctctggtgtatcaggtataagagcacaccagacgagaatggatgttataggtaacaatatagctaacgttaatacagttgcttacaagtcacagtctatgacttttaacgaagtgttctatcagacaacacagacagctacaggacctaatgcgaccacaggaagaggtggtaccaatgcaaaacagataggtcttggttcatcagttggtgctatatcaacatcgataacatcagaaggctctacagaaagaacagataatgctacagaccttgcaataacaggagctaatgcattctttatagtaaacagtggtggagaaactttctttacaagagcaggaaactttacaagagatgaagcaggagcacttgttacccagtcaggagctaatgttatgggatggcaggtaaatcctgaaacaggtgaagtggttaaggataaggtatctaagttatatcttgaatccgctgatactaagtatactatgccagagaagacaacaggacttacattaactggtaatatcaattcttcttcggatgaagatactactgcaacacttaacttctatgatagtttaggcagttcatatcaggctactatcaaaataaaaagaacgggtacatcaggtactacaggaagccaggttacatattctgtagaaggttcgtctgtaacaaaggatggagaaaagactaacctttcaatattaactaatgacactatcacattcaactctgatacaggcgtttttgtaaaaaatggtgatagtgataacatcacatttactatagaagatccagatggaactaaccttggtgatataggtaatgataaccatgaaatatcagttaatgtatcaggacttaaaatgattaaggataaaacttcaatcaatcagacatatggtatatatgataaagatgcaggtggatatgttggcggtggtaaagcagctggtactatgacatctgtaggtatagatacatcaggacgtttggttgcaagctacagtaatggtgatacaaagtatgtaggacagatagctgtaacagagtttactaatccggctggtcttgaaaaggttggtgaaaacctttataaggcaactcttaattcaggaatattcgacggtgaaggaaaggaaatatcagatacagctggaaagattcagtcaggtgttcttgagatgtccaatgtagaccttgcagcagaatttactaatatgattacaacacagagaggatatcaggcgaattcaagaataataactgtatcagatacgttgcttgatgagcttattaatcttaagagataattaactggattaaagtaatccatgcatgaatgaaacgctgcagaagatattctgcagcgcatctgataaaatagaaaaatatgcataaaatggcagtattttgttgcaatattttgccattggtgttttaatatagatagtttacatgggggtattgtatttatatggataagtttaccccacaacaaaagaatggatggtgtattgaatggatatagctacacttattggtattattgtcggagcagtaatggtagtattcggtattctgtggggaaacggagtttccactttacagaatttcgttgatgttccttcaattattattacaattggaggttcattatcaggacttataacctcttatactctaaaagatttccttggaagctttaagggaatcggtcttgcatttaaagatccaaagtatgatcacggagctacgatatctaagattattgaattatctaacgttgcaagaaaagaaggacttcttgctcttgaagaggttgctcagaatttagatgatgaattcatgaaaaaaggtattcttcttatagtagatggtacagagcctgaacttgtaagaggaattcttgaaacggaacttatgaatatggatgaaaggcacagaggcgtagctggcttcttcgaaacatgggctacacttggtcctgcctggggtatgataggaacactgataggtcttgtaaatatgttaaaggatcttcaggattcttcggcaatcggaccttcgatggcaacagctttgcttacaacgctctatggttcacttatagctaactggttctgtacgcctattgctaacaagttaaaggcacagaattctgttgagtatcagcttaaggagatagttattgaaggtcttctttcaatacaggcaggtgagaatccaagagttatagaagaaaagcttaagtcattcctttcaccagtttcaagaacaggcataggagaagaaggtggaggtgaagcttaatggctaaaagaagagctcaggaacagccagctggttcaccagcgtggatgagtacttttagtgatttgatgaatctgctgttgtgcttcttcgttttgcttttctctatgtcaacagtagatgcagaaaagtttgaaaaagtagcagcatcacttaatgcaagctttagtatattttcggcaggcggctcggcacttactgatgaaggaatactcgttggaagtggagcaacacagcttaatgatcttagcagttattacaataatatgggtcttaacactgatggtgaattcactgaagaggttaaaagtgcccaggagcagatagaaaaagaaggtataaaagagtctgaaaacatggcagaacagatagaaaacaatctgaagtctgctaatgtaaataatcaggttgaaataactgcaacaagcaaatatgttatgcttaacatgaatggtggtgttctatttaattcgggagatgcagagcttacaccagaggcagttaagcttttggatagcgttgctgatgcaatatatcagtacaatgataattacataaccatagaaggacatacagacagcaatcctatcagcacagcaaagtatcctgataacatgatgctttctgttcatagagcacatagcgtatataattatcttgtgaaaaataagaatttcgattctaagactatgacggcatcaggaagaggtgaaaacgttccggtagctgataattcaacagcagaaggaagagcccagaaccgccgcgttgagataagaatatataataacctgaataaggatattcagtaaaaggagaaagcatatgaaaaaaagtacattaaatgtaataacactagcgcttgtacttattaatcttgcacttacggttattcttacattttcattggtgtcaactaataataaaacgaataagcttatagggaaagttgcagaaataatagatcttgatgtagctggtattgataattcagataagagttcatcatctggtggagaaatagaagatacatcttatgtggatgtgactaataatggttccaatgatataatgatatcttatacagatggcggaagaactcattatgctgttatgaatgtgtcacttggtcttaatactaaagctaaggattattcggctaaaagcactacaattaacaatggaatgaaagttatagtaaatgcagtccagacagaggctatgaaatatacatatagtacaatagcagcaagcaaaacaactattgaaagtgaattgttaacacagctgcaggatacattccagacaaagtgtataacatcagtgattgtatctatagtagtacagtaaataaaaggaatgcgtttatgattaagaaatataaggaggtgaggaagatatgccagatgtcttatcgcaagacgaaatagataatcttttgaaggctcttagcagtggagagttagatgttgaagaaatgaagggcactgatgaaaaacaggtcaagaattatgattttgcaagaccatctaagttctccaaggaacatttaagaactctggaaattatctttgaacattttggaagacttctagcaactaatcttccagcctatttaagaaaatcagtcaacgttgatatagtaaattcagaagtagtaatatattcagaattttcaaatgctttgtctaacccagttctgcttggtgttgtaagtatgaaaccattagcaggcaatatggttatggagatggcatcaaacctgggatttgctatagttgacagactgctgggaggaacaggtacagctcttgataaggaaagagatttttctgagatagagcttaccattatagaaagaattttttcaatatgtgttaatcttttaaaagagccgtgggagaatgttattaaagtaacaccaaggcttgaaagaatagaaacaaactcacagtttgcgcagattatatcaccgacagaaacgattgctattataactatcaatcttaagattggtgatgttgaaggtcttatgaatgtatgtcttccatatactttgcttgagccagttatggataagcttaacaccaagttctggttctccaatatgcaggagaaggatccaacaatgtatggtgaagttattgaaaatgtgattagtaagacaaaagtacctattaaggctattcttggtgaatctaaggttaacgtttcagattttgttaatcttcagataggagatataattaaaattgataaaaaagttgaccaggagcttgatgtatatgtgggcaatattaaaaagttcaatgcattacctggttactttgaagataaatacgcagttaggataacagacgtaattagagaggagagtgagtaacagatggatggcatgttatcacaggatgagataaacgcattattaaatggaatgaatgatgatgataataacaacagcaatgataatgcggatatgacaactcaggatgatggcagcgtaactggtgataataatactacaaacaatgatccaggtgctgatgaggttctttctgattacgaaaaggatgcagttggtgaaatatctaacataagtatgggaacagcagcgactactcttagttcactgcttaatcagaaggtaaatataactacacctagagttgaggtggcagattgggatcatctttcaagaaagtatgacagaccttgtgtaatgttacagataagatataaagaaggtcttgatggaaacaatgtgcttatattaaaagaaaaagatgtaaagataataacagatctcatgatgggtggagctggtaatgctgatgatagtgaagaacttactgatcttcatcttagtgcaataggtgaggctatgaaccagatgatgggttctgcggcaacatcactttcatctatgttcaacagaaaaatagatataagtccacctatagctaatgttgtggaaacatataacgaaatggatgattcacttccaccatttttagcagaaccttttgttatggttgcatttaaaatgcagataggagatcttattgatagtgagataatgcagttatatcctatagatttcgcaagagaactgcttaatatgttctcacttgatccaacaatgggaggtcagactgattctgataaggcaacagcttcaactggtgctacagccggtcaggaaagtcaggcagctacagcagcaccacagcagccagttcagccacaggcacagccacagcagcctgttaacgatatgtcggcacagcagccatatatgcagcagggaatgccacaacagaatatgggaatgcagcctaatatgggcatgccatatggttatggaatggcacagccaaatatgggaatgcagcctaatatgggaatgcagcctaatatgggtatgccatatggatacggaatgccacagcagccagcacaggatgttaatgttgcaccagcagctttccagccatttgcagctgatgttaatccgctcacacagcaggaaaatattgatctgattatggacgtacctcttcaggttacagtagaacttggaagagtgtcaaagtctattaaggatattcttgaattctcgccaggaactattgttgaacttaacaaaatagcaggtgaggctgtagatgtacttgtcaatggaaagtacgtagccaagggcgaagtagtagtcatcgaagaaaactttggtgtaagaataacagaaattgttaaataaattttatttataaattttttaataaatacatatatgaaaatcacgattattgatgtataataaataaggatttttagtgaataatttatatttttattttagataagataggagaatcaatcatatggctaagaatattttgatttgtgatgatgcggcatttatgagaatgatgattaaggatatcctcacaaagaatggttacaatatcgcaggtgaagcagaaaatggcgcaaaggctgttgaaaagtataatgagttaaagccagatttagttcttatggatattactatgcctgagatggatggaatccaggcacttaagaagataaaagaaacagatccaaacgcttctgttatcatgtgctctgccatgggccagcaggctatggttattgagtcaatacagtcaggtgctaaggatttcattgttaagccttttcaggcagaccgagttcttgaagctgtccagaaagttgtaggctgatggttattgcatcgatgagcagcagaatagaggcatttgcgcagcttctcactttacttataatatttatttttgtattagctgttacatattacgttacaagatttgttggtaactatcagaagaataagttgtctggcagcaatatcaacatattggaaactatgcgtatagcaaataataaatacatacagatagtaaagataggaagcagggtttttgccattgcagtagctaaagatactgtttcatatttatgcgaactggatgaagatgaacttatatataaagaatcttcatctggtaagatgcttattaacaatgataattttaaagagattttagagaaattcaaaaaggacaagccagaaagttaggcagattttagtatgttacagtatattaagaaacataagaaaactttagctaaagcaagtattgcaatgagtacaataatgggtattattttcgctgtgtcagctaaggttcttgctgcagatggagataatcttataagtataggcatatcaagcggcgatggcagcgatatggcaggagtattacagatgcttatagtacttactgttatttcacttgcaccatctattctgattatgctgacatcttttacaagaatagttatagttcttcattttacaagagcagctataggtactcagactgtaccgcctaatcaggtgattataggcttatcattattccttactgtatttgtcatgacacctacttttacagaagtatataatactgcggtggttccgttatcgaacaatgagatgacagtacaggaggcgtttgatgaaggcataaagccattgcgtacttttatgcttaagcagacatctacaaaggatctggatacttttttgaagattgcaggatatgaggaaggctctgtaaagtcagaggatgatattacattgagagttcttattccttccttcattataagtgaattaagaatagcatttattataggctttttgatttacctgccttttatagttatagatatggttgtatcatcgacacttatgtctatgggtatgatgatgctgccgcctacaactatttcaacgccatttaagatactactgtttgttatggcagacggatggaatcttattataggtaatctgatgcttacttttaagtaatacatgatgattttatggatttatacaggatgtggaggcatgtatacagatggatgctggtacagttattaatatagcaagacagacaatatgggttatagtagaaacagcagtaccagtattgcttgtatctatggtggtaggtcttgtgataagtctgtttcagacacttacgtctattcaggagcagactcttacattcgtgcctaagcttatagcaattctgcttactattatgattataggttcatggatgttgaatcagattacaggatttatgaataatttgtggaatttttcccagtatatttgattaaaggattaaattacaatgattaattatgaagtcgcacttggacaatttgagctatttgttttgatacttatccgattagcctcatttgtctttgctgcgcctttttttaatactgcgaatgtaccaaacaggtttaagataggcttttcttttgcgctaagtattatagtgtattctattaattcagacatgactgtgcagtataacaatatgatgggtttctgtgtgattgtagtacaggaagttatagttggcgttttgcttggtgcagtttcatcttttgcagttcagattatacagttttcaggtaaaatgatagatatggatataggtatatccatggcacagatatatgacccgacaacacgtatgcaggttggtatcatgggaaatttttattattatatgctgatgctgcttctgataatttcaggtatgcacagattcctgatagaagcaatagttgaaacatacaatgttattcctattggtggagttaagtttggtgcaggtttatatacaactattattcagtttatgtcggattattttgttattggattcagaatagcacttccggtttttgccactatgcttctgcttaactgtattcttgcgattcttgcaaggattgcaccacagatgaatatgtttgttgttggtatgcagcttaaaatatttgttggtatatttgtcatattcttcacgataagaatgcttccagcagtttctaattttatatttgaggaaataaaagatttgttttcattacttgtaaggggaatgagttgatatggataatgaaactttgttgttaaagcttaatctgcagttctttgcaaaggatggacctggtggtgaaaagacagagccagctacaagtaaaaagcttaacgatatccgaaaggaaggtcaggttgctaaaagtaaagagctaataacggcggtttcgcttatgtctctttttattatattaaagatatatttatcaaaacttggaacagggcttatagatgtgtatacacaggtatataactctatatctaaggttgtagacgacagctataacggattaccgataagaacggcaggctctgttatgcagcaggttattatagatatgataaagcttgttatacctattttattagttgctattgttatagccatacttggaaatatgcttcagcagaaatggatggttacagcgaagcctttgcagccaaagttcagtaagataagtccgataagtggatttaagaggatgttttcagtaagacagcttgtagaactgattaaatcaatagcgatgatatccattataatgattgtggtatataatacagttaaaagtaaaatgaatattcttctgacattttatgatgtaggactaaacacagctttatccacaataggcagtattattattgacctcggcattaaaataagtgctgtatttcttattgttggctttgcagatcttttttatcagagaattaagtttaaaaacgataacatgatgactaagcaggaaattaaggatgaattcaagaatacagaaggtgatccgcaggttaaaggtcagataaaaagaaggatgcaggaggtttcaagaaggagaatgatgcagcagctgccagaagcggatgttgtcattactaatccaacgcattttgcagttgctcttaaatatgagcctgatgcgggaaaagctcctgtagtgatagcaaaaggtgcagattatcttgcgttccagataaaggataaggcaaaagagtacaatatagctatagtggagaataaaccactggcaagaatactatatcataacatagatataggcatggagatacctccagagttatatcaggcagtggcagaaatacttgctgtagttatgcgaacaaataatagattataattaaaatgtgtgatataattaactaatcaatgtcgaaatatgtagaagctgccagaatatggtggcggttacattacagatataacactattattaaggataaatatttatgatacaatattacatcgggaaggagaaataaagtgaagttaaagaaaaacgacttattcatgggcatatatatactttcagcagttttattcttcattatttctattccttcatggttacttgatatattacttgcgtttaatataatggtagcacttattatattatttaattcattatatgctaaagaagtgctggatatggctgcatttccaacaatgctgttattcacgactattttcaggatatcactgaatgtatcatcaactaagatgattttacgtgatggatatgcaggacacgtagttgctacgtttggagagtttgtcggtggcggcaatcttgttattggtacgattatttttattgttcttattattgtacagtttatagttatcaataaaggttctgaaagagtatcagaagtaacagcaagatttacacttgatgcgatggctggtaaacagatggctatagattctgatcttaatacaggagcgataacagataaggaagcggctgaaagaagaaaaaagcttcagcaggaaaacagcttctttggttctatggatggtgctacgaagtacgttaaaggagatgcaacagcgggtcttattataacagcaatcaatcttgttggcggtgttattatgggaatgatgtatcgtggacagtctgtaaatgaggcactttctacatatgcaattcttactattggtgatggattgtgttcacagattccatcattgcttatatctttgtcaacaggtattcttgttacaaaggcatcaagtgaaggtgaacttggtgatgagatggtaggacagctgttttctatagacagagttcttatcatggtaggtgctgctcttgcatttttaggtgttttaacaccattgcctatatatatatttgtgccgcttggcatacttcttatagtatatggaagaaaacttaaggataaatctggtgaagcaactatcgaggagatggcggaggcagaagaaacagaggcacaggagataaggaagccggaaaatgttgtttcactgcttaacgttgatcctattgagcttgagtttggttatggtattattccacttgccgatgttaatcagggtggtgatcttcttgaccgtgttgttatgataagacggcagattgcattagagcttggtgcggtagttcctattatccgtttaagggataacatacagctgaatcctaaccagtatgttattaaaataaaaggcatacaggtcagtgaaggagagattttatttgaccattatatggctatgaatccaggatatgtggaggaagagattacaggtatacctacatttgagccatcgttccacctacctgctatatggataactgagagccagagagaaagagcggaatctatgggatatacagttgtagatccaccatcaataatagctacacatcttactgaggttataagacagcatatcgcagagcttcttacaaggcaggatgtacagaatcttattaataatattaaggataataattcagcacttattgatgagttagtacctaagctgctcggaataggtgagattcagaaggtgttacagaatctgcttgaagaaggcatatctataagagatcttgttacaatatttgaaacacttgctgatcatgcagcggttacaagagatacagatatacttacagaatatgtaagacaaagcttaaagagagcaatttctggaaaatattttccaccaaatgaagttacaaatgttattacactggatcctaaggttgaacaggagattatgggagcagtcaagaatacagaacagggttcctacctttcactggatcctgcccgcacaaaggcaatcatggattcacttggagaagagttaaagaagcttgaggatatgggaaaaaatccgattgttataacttcaccaatagtcagattgtattttaagaaacttgcatctgattattataaggacattatagttatctcgtataatgaagttgaatctaatattgaattacaatcagtagggatggtgacagcgtaatgatagttaagaagtttcaggcaccaacagagatggaagccataataaaagcaagagaagaacttggaagcacagcagttgtacttaatataaaaagtataaagcagagaggtctggcaagattgtttaaaaaggatgctgtagaggttactgcagcacttgaggaaaaggatatagttgatggtatcaacaaaaacaagccagtgtttgataataatgctgccagtggtcaggaagcaaagccggaaagaatgattaaccagagcatggtttcaggaggcacttcatcgactattaatcttatagctgatgataatacagcagtaagctcagcatcagccatagaacagaagcttgacagcctgcataatcttttacagaaccagggaagcttaaactctgatatgccatcattaggcagtcagggaaagacagtggcagcttctgcatatactaaaagaatgtcagatattaaagaggatatatctggtgcagcaggtgaaaataagcaggtaaaagaaagagaaaatgcgaattataagttccttcagcttatttataagaaccttatagataatgaggttgacagcagattcgcagatgaaataataggtgaaatagagaattcactaaaaaaagagtctaaccttgacagtatacttgcagcggtatatcagaagattatattaaaactgggaaaaccaaagactatagaaatgggcgataaagccaaggttatattctttatcggacctacaggagttggaaaaactactactattgcgaagattgcctcaagctttaagatagaaaaggaggcaagagttgccttcataacagcagatacatacagaatagcagctgttgaacagcttaacacatatgcatcaatcattgactgtcctgtaagtgttgtgtattcagtagaagatatgaacaagagcctttctgaatataaggattatgatctcatacttgttgatacagctggaagatcgcataaagcaacagaacagatggatgaacttaaggcatttattgaagaggttgcgcaaagagcagatgagtttgattttgagtgttatcttactttaagtcttacgacaaagtataaggatcttaagagcattgctgataagtatgatgatgttgactgggcagttatatttacaaaactggatgaaacatgttctgttggtaacatattaaacatccgcatgttaacagacagacccctttcatatacaacatcaggtcagaacgtaccagatgatatagaagtgattaacgagcagggggttgcaagacagttacttggaggtggcgaatgatgatggatcaggcagagaatcttcgtaatatgatcagaaagcagaatcagaataatataaagaatgcccgtgttatagctattacaagtggaaaaggcggggttggaaagtctaatctgtcggttaatcttgcgttagaattaacaaggatggggaaaaaggttattatccttgatgcagactttggacttgctaatgttgaggttatgttcggtgttatacctgaatataatcttagcgaccttatgttcaaaggaaaagaaataaaggatattataacagaaggaccagaaggtgtcggatttatatcaggcggctcaggaatagctaatcttattaatcttgatcaggagcaggtaaaaaggctcgtaggaaaaatgacagatttagaggaacttgcagatgtgataatcattgatacgggggcaggaatagcaccaagtgttatggagtttttgcttgctagtccggagactattattgtcacaacacctgaacctacatctgtaacagattcatatgcgctattaaaggcgcttagcatgaatgaaggctacaataaagaagaatgttctattaagatggttgctaacagagttgagtctgagagtgaaggacgtaatctttatgaaaagcttaatgcagttgttacaaagttccttggaataaaactcagttatcttggcagtgttcctcaggattcaaatgtcagaaaagctgttatgaagcagaaacctgtaactattatgtatccttcaagctctgcagcaagacattttaaaaatattgcagcagaacttcttggtaatgatattactgttcctgcacacaggatgggaatacgaagttatttcaaaaatgtattttcaagaaaaatgtagaagtataaaataacgatatccgtaagataaatcatgatgctgtaggaggaaggattatgtttgaaccgctaaagctgggaaacagggttgaaatggtgtttaagagcaggtcaggcgatgatgatactgtagaatatgccagccagatacttgactttactgatgaaggtattatgtgtgcaatgcctatttatgaggggcacatagtcccgttggaaaaggggaaaagatttgagggatatttttattcggataataagatatacagggcaatgtgttctgtagtatcaagaggaaaagaagaaaaggttcatgttgcagaaataaagcttgattctgcacttgtaagaatacagagaagagaatattacaggctgagctgtattatgccagcttctttaagaacagtaactgatattaaagaaggcctggatgagattcaggatcttattcttaatgaagataattataaatgtactatagtagatataagcggcggtggaataagagtattttccaaaagacagcttgaaaaaaatgagatggtttatgttaaattcacactgaattttaatagtggcgataaggaagctgacgtacttgcaaaggttgtggattcacagaagaattcaaaagatgaaactatgtttgacagcaggcttcagtttataaacatcagcgaagcagacagagaagaaatagttaaatatgtatttgaacaacaaagaaatatgttaaaaaaggagttgggctataatggctaaaaaaatcctggtaatagatgactctgcactcatgagaagagttatatctgatataataaacgaaagcgatgaatacgaggttgtggctatcgcaaaagatggacttgagggtcttgatatgatagtgtcgcacccatatgagtatagtgctatcattcttgatattaatatgcctaagcttaatggtcttgagcttttaaaaagattgcagaaggatcatatagaacagacagttatagttgtaagtactgttgcaaaggaaggtgctaaagaaactatccaggcacttgaatatggagcatttgattttgttacgaaaccggaaaattatctggagacaaagagtattgattttaagaacaaaatctttaatatgcttaatgtagccacgaattccagatcttctttaagaagagcatctatgagaacaggcagtgcatcatcagcaagaagcacaggaacttttagaaaaccggaagatagcagtaagcctttttttgcttcggcaagaagaaatcttaacagtacaagaacagtagaagattcatcaagaacttcagttatgcatacaacgggttatgattctttggaacatgccgttaaggttgatggcagtaagtatagcagagtaaaagctggtaagaataagcttgttgcacttgcatgctcaacaggcggacctaagtcgttacagcaggtgataccgatgcttccagcaaatcttgatgcgggtatggtacttgtacagcatatgccggcaggattcacagcctcactagcagcaagacttaacgagatgagtgcaatcaatgttaaagaagcagcagatggtgaagctattaaaaaaggctgggtatatatagcaccaggtggaaagcatataagagttagaaagaaaggcatggattatgttatttcacttagtgatgaggcaccattagatggtcttaaaccatgtgccaacattatgtatgaatcgcttacacaaagtaactatgacgaaataacatgtgtcgtacttacaggtatgggtgcagatggtacgaatggaataaaagcactcagcagaaatcataaaaacatatacgttatagcacaggatgaagaaacaagtgtggtatacggtatgccaaaagcaatagctaatacaggactagttaatgaggttgtgcctcttaatcatgttgctgaagcaataacaaaaaacgtgggggtgtcttaacatggatgtaagccagtatttagagatttttattgatgaatcaaatgaacatttacagtcattaagtgatcagttaatgatacttgagaaagagccagagaatagcgatactataaacgaaatattcagagctgcccattctttaaagggtatggcaggtactatgggatataagagaatgcagaatcttacacatgatatggaaaatgtattctcagaagtccgcaacggtaacataaaagtaacatcagatatgtgtgatgtattgttccagtgtcttgatgcacttgagaattatgtatcaaacatacagaatacacaggatgaaggtactgatgataatgagcctattatcaaagcacttaattcattcataggtggcaataacgaagaaagtaaagaaacacagccacagacagctgcttctgccgtaacagcaggagaaggaacttctgagcttgcatttgctgattttgagatgaatgcagttaatgaagcattaaagaagggacttggtgtatacgagatagatgttacagtagatgagaactgtatattaaaggcagcaagagcgtttcttgtgtttaagaatcttgagggacattgtgatgtcatcaagtctgaaccttcaacacaggatatagaagatgaaaagtttgataaaaagtttacaatagtagtagtatcaaaagaaagcatggaagatatatctggtataataagaaatgtatctgaaataaagtcagcagaagccaaagcgataacaacacctttccctgaaagtgaagaaacagaaagtaaggaagaagcaaagacagagcagactgaggtaccagaagcaacatcttcaaaggaagcaaagaaggaggaaacaaagaaaccttctatgcttacacaggcaaagaaagcagcagcagctaacagcaaggctgtaagccatacagtaagagttgatatagataagcttgatgtacttatgaatcttgtaagtgagcttattatagcaaagaacggacttgtatcagcaagtatatctgatgacggagaaactgcttctaacaatcagaaattcactgagcagatagaataccttgaaagagttactacgaatcttcatgaatctgtcatgaaggtacgaatgatgcctattgaaggtgttataagcaagttcccacgtatgataagggatcttaataaaaagcttaacaagaagatggaattatatataacaggtgaagagacagagcttgatagaacagttcttgatgaaatcggtgatcctatcatgcatcttttaagaaactcagctgatcacggacttgaaagtgcagaggtaagagcagaaagaggaaagccagaagttggatcaatctatcttaatgcgttccaggaaggcaataacgtagttattgaagttgcagatgatggtaatggtatagatgtagaaaaagttaaatctaaggctgttgagaaaggaacacttactcaggaacaggcagatgctttaacagaaaaggaagctattgatcttttatttaagccaagcttctctacatcagataaaattacagatgtatcaggacgaggagttggtcttgacgttgttaagtctaagattgaggctcttggtggtgatgtagaagttaagacaaagtatggcgaaggaagcaccttcagcataaggcttccacttactcttgctatcatccaggcacttatggttaagcttggagatgagaagtatgctatttcattaggttctatcgagacaatcgaagatgtgccagtaggtgatataaagtatgtacatgctaaagaggttattaatcttagaggcagtgtaataccacttataagattaagagatatactggatgtaccaggtgaggctgaagaaactgatactattatagtagttatagtaagaaagggcgataagcttgctggtcttgttgttgacagtcttatcggacagatggaaatcgtaatcaagtcacttggtaagtatattaatattaatagaatgataagcggagctactattcttggagatggttctgtagcactgattattgacgctaacacattagtataggaggtggcctgtgatggaaaacattaatgcaatagaagataaaaatgaagaagtatcaacaacaatacagtacattgttgtaaaaataggcaatgaacagtatgggattaatattaaatatattgataatattgtaagaaagcaggatattacaagagtaccaaagacacagcattactacaagggagttataaacttacgtggtgagataataccagtcatgagtgtaaggttaaagcttgggcttgaagatgatgtgtatacagataagacaagatatataatcgttaaggtggaaagtgctactataggtataatagtagatcaggtaatggaagtagttactctgaacagtgaggatacagaaaaggttaaccgttcagcaggtgacgatgttgctaacagttacataagtggtattggtaagcatgatggtgagcttatatcattgctagatattgtttctcttattgttgagaacgattaaacacagaattgaggtttcttatgtcaaaggtaagtttagaaaagcttaatgatgtacagtttgatgttttaaaagaaattggaaatataggtgctggtaatgcaacaacggcgttgtctactatgcttaatgtaaagatggacatgtcagttcctaatgtagctttaatccagtttaaagatatatcaactattataggtagtgaagatcagactgtagtaggtattttgttagagctgggtggagatatagatggaatgatgatgtttatattcgataccagatcagcacaccatcttgttaattcgcttatgctacaggatgacagtaaagataacgatagtgcagagttcacagaaatggaaatgtctgcattaaatgagataggcaatatcgcatcaggttcatatcttacagctatctcatcattgacaaatatgaacattatagcagatgttccacagatgactatagatatggttggagcacttttgagcgttccagcatcagaatttggtaaatatggtgataagttattattgattcagacacagttcggtgagctggattttgttaaaggatattttcttcttattccagaacttgaatcgtatgataagattcttcgttcattaggagttattgattgatattatctttaggatgagagtttggttatgaatttagatgaaatgattaaagttggaatggcagatctgcagttgtgtaagtcaccaggggtattgacgacacttgggctaggatcctgtgtaggtgtagcgctatatgatcctgtaaacaaaataggtggcttattacattgtatgctgcctgacagtacacagtttaagaataattctaatacagcaaagtacgcagatagtggaatagatgaacttgtttcaaagatggtaagtctaggtgctaacaggtcaaggattgttgccaagatagcaggtggagcacagatgtttgctatgaaaactaacaatgataccttaagggttggcgagagaaatgttgaggcagttaagaaaaaactgtctcaaatgggtatcaggcttttatcagaagactgtggacttaattatggtagaacggtggagttctatacagaaaatggcgattatgttataaaatcggtaggtaaaccaagaaaagttatataagcagagtttgtgaggatgatgtatgaaaaggtttagaaatgtatctgcaatagtatcattattagctggttttataaccgcagtcgttatggttattaacaaatatgatttattaacatttatatggatactggcggttgtaatggcagtgttttatattgtaagcagaatcatatgctttatatgtgacagacatataacaaaagaagaagaaaaagctgaagaagagcggcttgaaaaggaaaaacaggaaatcgaagcaaggatagctgagtcagaaaagaagaattcagaagattccaaagaagcggtataacaactaaatgatcgttacgggggcattcttttatggatgaattgggaagaagcaggctatgggaaagatacatggcaagtcatgacagtgaaatcagggaacaactaataacagaatatgcacagcttgttaaactggtagccggcaggatgaatatgtatcttggatacaatgtcgaatatgacgatcttgttggttatggcgtatttggactgattgatgctatagataagtttgatttcggtaagaatgtcaagtttgagacatatgcgagtcttagaataaggggtgcaattcttgatcagataagaaaaatggattggattccaagatcactcaggcagaaacaaaagaagatagatacagcaatggcaaagatagaggctgaaactggaaaagttgtgactgatgagcttctagcagcagagcttggaatatcaatagatgagctgagtgaatggcagggtcagatgaaatcctctaatcttatatcacttgatgaatacacagaagcgggtagtgaaatcaaaatggagaatgtgggaaattcgcattttgaccagccagaatctgtggttgaaaaagaggaaacgaaaaaaaagcttgtcgaagcaatagatacactgactgaaaaagaaagaagagtgatagttttatattattatgaggatatgacactaaaagaaataagtatgactcttgaagtgtcagaatcaagagtttcgcagcttcacacaaaagctttgaataaaatgaagaaggttatgggcgattatatgtttccggcataatgaaagatatttatgcatgtgaagcaaagtcggaggactttttacctccgatatcacaataaacgacaaaagaaagtgggtttaagatgattgaagaatgtatggcagggtattttcaattttcttctaaagtagacggactttatataacggtttacccacctaaggagagatataatgcagcatctatagatgatgtcatgtattatattgatcaaaggaaaattgaatgtaatagtgttaaactaatggaggcagttaaagctggagctttatcagaaacaacaatcaaggtttcagatgagcagcagcttacatatggagaattcggtgattacagaataagctatgatggcatgagagcagaggctgttttttatccgccgtttgagggtggaaccaggcttgataagaatgaaataatgcgggatcttgagcataaaggaataaaatgcggaatagatgaaagtgttattgatacatttataaaagaaagacaatatggaaaaatatatgttgtagcaataggaaaacaagtccgaaatggcaaagacggatacatagaatataagttcaataaagaacttaagccaagacctaagatgaatgaagatgggacagttgattttcatacattagagaatgtgaaccatgttaatgcaggtgatgttgtagcaatattgcatccagaggacatgggcgaagctggcgtggatgtattcggtaagaaggttaatccagataaggtaaagcatgtgatattcaggtttggacgaaaccttgttatatcagaggatggaagaaagcttatcagtcaggttaacgggcatgttatacttgaaaatgataaagtggttgtatctaatgtgcttgaacttgttgatatagataattcaacaggggatatcgagtataatggagatgtcacaataaaaggaaatatacttgccggtttttctgttaaagcaaagggcgatgttgtagtacagggggttgtagaaggtgcaaccgttatagctggcggcaatataacatttaacagaggtatccagggaatgaataaagctgtgataaaggcaggcggcaatatagtttcaaagtttattgaaagtgtcagtcttgtggaatcaggtggcaatatagaatctgattcaatattacattcaagagtagttgctaagggctttattaaagctactggtaaaaaaggacttataataggtggtgatgtgaaagcgacatcatttatagaagctaaaactataggtaacgagatgggaacaactactgtggtaggagttggggttaatccaacgatgaagaaacgtatggatgagcttaaaaacagtcttagcactaaaggcaacaataaaatacagctgacacagcttatgacagcgttaagaaaaaaacaggatatggaaggtacgttggataaggataagcaggagatgctttctaaaacaatgagaaatcttatcatactggatcaggagctcaatcaggaaaagaaagagtatgagcagcttaaatctacattgggcgaggaaaagaatgcctgtataaaggtttctaatgttgcatatgttggtacacagctgatgtttggagatatatgtatgttccttaaggaaaagtataattattgccagttcagaaaagagggtgctgatataaagagtgctccactgtaaacagaaacggagaagaatatgataatcagacctacagaattcggtatgatccaacagcagaatacagtatcccagataagacatggagaagatgctaagccgatgattgaacaacagactatagttgtacagtcacaaaaggatgctaatgtcaggtctgagaaggttaataataaggatgatgccgataacagacagaaaaagtttgatgccaaggataaaagcgataatgaataccagccagggcataagaatgataaaaataaaaagcccgatggaaaagttattataaagggtcagaaatatcagaacgttgatttcgatgtcaggatttaataaatatgagctggctcatgcgggttttgaccttatgaccatggtgttatatatgggcatagagaaaaggaaacagcttcggaggatataatgggaacagtagagatagtacttttagtaatagggataatatgtgttattgtaggtattatattaggcataacagataataatgaccatgataaagatatgaatccagctgtttcagattatgatgcagcaagtcaggtgagcaaggtgtcccagactatagacaatatcatagaacagaaaatgcaggatatagaagataagacagaagcaagacttgataaactatctaacacaaagattcttgagatgaatgaatatgcagatggagtgcttaaggaaataaatcgtaatcataatgaagttatgtttatgtatgacatgttaaacgagaaggacaaagaaataaaaacaacagttaaagatgtcaatggtacacgcatgaacagaaatacgaatgcatattcagaaaagaaatcgcagaataaacaatcagttcagaataagccatctgcaaaaaatgatatagctgaagttattttagatgatgcactttcttcaaatgaaaagattataaagctgtataatagcggatacagggatgtggatattgctaaaagacttaaaatgggtgtaggagaagtaagacttattatcaatcttagctcaggtaataattagtgttttatagcacagtaaggattaaagaaatgaaattaaaatattatatgtgtggtcttggaagcggcataatattagcagtgcttgttcttatgattgctaataagattacaccggaatcttcgggcaataataaagacatacatgaaactactggttcggttatagcatatacaacacaggcagatgtaaagggaacagcagcatcagataatgctgttactacagcagcaggtactatagctgcaacacaaaaaacgactgaagggcagacgacagctcctaaagaaaaggttacagtacatataagttcggtgacagttgcctctgatatagccagaatgcttgctgaaaacggaattatagataatgcagatgcatttgttgaatacctgtattcaaaggattattcaagagtgatacaagagggcgatttcgagcttataaaaggcgatacatatgaaaatattgctaaaataataacaagacaataagaaagaaatatgaaatgcaaaataagagtgtaaataagagtaaaaattatgagtaaatatataaaaaacacttgcaaataattgatactattgatataatgcatttcgtgtgaaaaaacatgcaggtggattgtgtgactggtgccagtatacgcgctggttgtcatgcgagtatgaaacccgcaaaagattatttaaccaatggaggtattaaaatgagcgtaatttcaatgaagcagttacttgaagcaggtgttcactttggacatcagacaagaagatggaaccctaagatggcagagtacatctacacagaaagaaatggtattcatatcatcgacttacagaagtcagtaggaaaggttgacgaagcttataaggcagtttctgatatcgttgctgatggtggtacaatccttttcgtaggtactaagaagcaggctcaggatgctatcgctaacgaagctgcaagatgtggtatgtatttcgttaacgaaagatggttaggtggtatgctcactaacttcaagacaatccagtcaagaattgcaagacttaaagaaatagaaacaatgcaggaagatggtacatttgatgttcttccaaagaaggaagttatcaacttaaagaaggaattagaaaagcttcagaagaaccttggcggtatcaaggaaatgaagagaattccagatgctatctttattgtagatcctaagaaggaaagaatctgtgtacaggaagcacacgcacttggaatcacattaatcggtatcgctgatactaactgtgatccagatgaattagattatgttatccctggtaacgatgatgctatcagagctgttaacttaatcgtatcaaagatggctgacgctgttattgaagctaatcagggtgaagaagttgtagccgctgatgtagaagaaacagctgaggaagcttaatatttaaggtttgacttaagtttatgtatgcttcagcctgttgtttcaggttgaagcattttttaaaattattctaaaatattataattggaggatattaaaatggcagcaattacagcagcaatggttaaagagcttagagagtctactggcgcaggcatgatggaatgtaagaaggctcttacagagacagatggagatatggaagcagctgttgatgttcttagaaagagcggagcagctaaggtagaaaagaaggccggaagaatcgcagcagaaggtatcacaagagttgcatctgaaggtaatacagcagtagtagtagaagttaactcagagacagatttcgttgcaaagaatgcagtattccaggaattcgttcaggatgtagctgataaggctcttaagtcatcagttgataaggccggagacggagaagatgtatgcggtattcttgatatgaaggcagagcttgaagaaaagactatcgtaatcggagaaaagctttctttaagaagatttgaaaagcttacaggtgattgtgtagcttcatatgttcatggtggcggaagaatcggtgttcttgttgctgctaagggtgcttcaggtgatgcagttaaggaagcacttactaatatagctatgcagatcgcagctatgaatccacagtatatcagcagaaatgatatgtcagcagaagaacttgctaagttaagagaaatcatcgaagagagcgcattaaacgatccagcatctcttccaaagcctatcttaaacaagttaattgataaggctatcaatgataaggtatggagtgatgaagatatcgcaacatataatgagcataagagcaatatgcagtatttattcaacttcctttcaaaggaagcagcttctcagttagctgaacttgcattagcagatagagctaatattgcagctgataagatcttcaagggcttagtagaaggccgtgtatctaagcagcttaaggaaatctgccttatggatcagacatacgttaaggctgaggatggtaagcagtcagttgctaagtatatcgcagaggttggcaaggcagtaggagcttcattcacaatcagcggttatgtgcgttttgaagtaggcgaaggtcttgaaaagaagagcgaagactttgcagccgaggtagctgcacagcttggcaactaagcagggttttcaatctgaaataaggatttgattctttatagattatatagaattttaaagggcagtaccacaaaaaggtattgccctttatttattgctattttcaacaacataagatttataacataagatttttatctgaaattatataattcttcattttatgaatgtgaaatttacggaaaatttcacaggaaaactttaatgtacaaaatagagttgaaaaagcaaaaatatactgttataattgtatataacatatggtgcgtgttatatatattgacagaatagggttaacagaaagtgataatgttcttcataagaatattgatgacgtctgtttgtgttatcctgttgattgcagtatgcggctatattatgtattttgctggatactgatagacgtgctatatcaacaagttgatgtggagaaatgtagctgatatatagtaatagtactctgcatacatataaaaactaataagaaaaaagtaaaaggagtaaaagcatggaagtaaagaaccctattagaaaaagactgaacaagggattttcacttattactatagtgtgttgcatagctcttgttttatgtgatattgctatatttgcaatgagcagccagtatgaacatgccatgtcaagctatggattttcacagggtgacattggtaaggctatggttacattctcggaagcaagaagttccttaagagcagtaatcagttacaagagtacaacagagattaacagtgaaaagaaggaatatcagacaaaaaagcagctttttgatacctatcttagtgaggtggaaaaaagcatggtaacaaaggaaggaaaagaatcctatgccaatatagtaagcaagcttgatgattattggaatatgagcgacagcatactaaagatagcttctacatcagatcctgcagcatgtgagaatgcacagaagcaggagtacgaagtacttggacctaagtatgatgaattatacaatgatatgaaagaacttatggatctcaatgtaaatatgggtgatgatcttgaagatatattatttgtaataaagattgtccttggtgtattggtacttgtgataataggcggaagcatcatgacttctaagagaataggtgctaagatagctgaccagatagaaaaacctgttgctgatctggcagaaagattaaagaagtttgcacagggtgatcttgattcaccattccctgagcagaacaatgaagatgagattgcatttatgaatgatgttgcaaaggaaatggcagctaatcttaatcttataattagtgaccttagcagacttatgtctttaatggcagatggcaactttgcgatttctactgaaatagaagataaatatgttggtaagtttgttgaattattagagtctatccgtaatatgaacagaaagatggattcaacattaagacacgttgaagaatcagcagagcaggtaacagcgggctctgagaatcttgcacagtcagcacaggatcttgctgagggagcaacagaacaggcaggggcagttgaacagcttcaggcaacaatgtcaactataactgaacaggttgctgatacagttaataatcttaatgatacgagcagaaaagcagaatcatatgctaaatcagcagattctagtaaaacagatatgcgtgagcttatggaagcgatgcagcgtataagtgaaacatcgaagaagattgagaatatcatatcagatatagaaagcatagcaagccagactaatctcttatcacttaatgcagctattgaggcggcaagagcaggagaagcaggtaagggctttgcagtagtagcagaacagataagaatgcttgcggatgaaagtgcaaagtctgctgtagatacaagaactcttatagagggagctcttaatgagatagaagaaggtaatcaggtagcacagaaagcagctgattctatggagacagttgtacagggtatcaatgatatatcagatacatctaagatgttaagtgagaattctaatcagcagatagcagctttaagagaagctgaaaagggtatagaacagatatctgaggttgtccagtctaactcagcggcatcagaagagtgttcagcaacaagtgaagagttatcagcccaggcagaagctatgaatgaaatgacagctcagtttgtattaagagataaataaatatacatacatgtacttgttatataaaatataaaagaagtagaaaaaagaggtggaaaatttttttcacctcttttatagatatgactaagaaaaatatagatagtactatgtaaaatatatagatagtactgtgtaaaatatattttgaccctgacattatattatgctataatttccatagttaatgtgctgtatgtaagctgtctggcacataagatcattacgtgatgcaaaggaggataatgatgggtttatttggaacaaaaactaattcatcagatgattcaaaagatatatttggcagattaggcaaagaagaaaaagagggtatgatggttaacactcttgatgctgcagagcctgcaaagttttctggacagactggaaaagaaaacatgataagcagcaatggtgcaataacggataagcttgaagcggagcttaatggcactgaaaaagagaatgtgccagctgacactgtcgtaaaggaagagccaaagacagaacttgaacagatttcagatgagacagctgttattacatcaggtcttgttgtgagcggcaatcttgattctataggttcgatagatatatttggagttgttgatggtgatgtatcatgtaaaggcaagcttactgtcagtggaacgataaatggaacaactatagctaatgaagtgtttgctaataatgcacagataactggtgatatacaggcaagaggaacggtaaagataggccagggaacagtagctgtaggtaatataacagcaacatcagcagttattgcaggtgctgttaagggtaatgtggatgttaacggacctgttataatagattcatcagcagttattgcaggagatataaagtctaagtcagtccagattaataatggagcaactattgacggaagatgttcacaggcttattcggatgttgatatggatgcgatatttaacattccaggtggtaaggcagaaagtaaagcagactaaatataataaaaggaagtaaatacaatgaaagatataaaaagagtaatacttaagcttagtggagaagcattatcaggagataagaagtcaggatatgatgatgaacttatcatagacatagcaaaacaggtaagccagataatagataagggtattaatgtaggtgtagttatcggtggaggtaactactggagaggccgttccaatgataatattgacagaacaaaggcagatcagataggtatgcttgcaacaattatgaattgtatatatgtatctgaaatattcagatcacaggggttaaagacaaatattcttacaccttttgaatgtggaagtatgactaaacttttctcaaaggacagagctaacaagtattttgagaagggaatggtagtattctttgcaggaggaacaggacatccatacttttctacagatacaggtatcgtgttaagagctattgaacttgatgctgatgcgattcttttagcaaaagctattgatggagtatatgacagcgatcctaagattaatccagatgctaaaaaatacgacagtatatctataacagatgtagtagataaacatctgggcgttattgatatgacagcttcagttatgtgtatggaaaacaaaatgccgcttatggtatttggacttaacgaaaaagatagtatagtaaacgccctttcaggtaagttcaacggaacaatagttacagttgaatagttgcagttgaatagttatagttgatagttacaactgaatagctgcagttaaacaattacagttgattattgcaatagattattgtaatatgaagataataccgcaaggtgaaattaaataataatgtagactaggaaagagagtttttagtaatgagtgatatcagagaatatgaagaaaagatgaagaaatcagtggagaacttaagagaggattatacaacaatccgtgctggaagagctaatccacatatattagataaaataaaggttgattattatggaacacctacatcacttcagcaggttgctaacatatcagttccagaagcacgtatgattcagatacagccttgggaagcaagccttataaaagatatagagaaggctattcttgtttcagatctaggacttacacctaataacgatggtaaggttgtaagacttatcttccctgaattgacagaagacagacgtaaagaacttgcaaaggatgttaagaagaagggtgacaatgcaaaggttgctataagaaacgtcagacgagatgctaatgatgctattaagaaagagaataaagcaggggatatatctgatgatgaggctaagaacttagaagatgaagttcagaagctcacagataaatatgtagcccagattgataaagcaatcgaagagaagtctgcagaaatacttacagtataagatatatgaaaaaaggctgttggttattgcaacagtctttatttagttgtatcagggcagtattttataagaacagatagaaatgaggtttactatggatagttttaacgaggaattaggcttaaatatacctggacacgttgcagttattcttgatggtaatggacgctgggcaaagaaaagacatatgccaagaacttatggacatatgcagggaagtaaggttgttgaggatatgttatatatagccgatgatttaggcgtaaaatattttacagtatatgcattttcaactgaaaactggaaaagatctacagatgaagtgagtactcttatgaatatattaagaaagtacttaaaagactgtgttaaaaagtctatgaaaaacaatgtaaggtgtcgtgtcataggaagaaaagaagagttaagtgcagatataatagagagcattaataatcttgaggaaaaaactaaaaataatacgggacttaactttacaatagctattaattatggtggaagagatgagatagtaagagctgtacagaaaatagcagataaggttaaggcaggtgaaatagctccttgtgatatagatgaaagcatgataagcagcaatctggataccgctgagcttccagatcctgatcttcttataagaacaagcggagaacagagattgtctaactatctgccttggcagcttgcgtatacagagttttattttacagatgtatactggcctgattttaatagagaagagcttattaaggcatgcgaaaagtataataagagagaaagaagatatggtggtgttaaggaggagtaagcattgttaaaaagaattataagtggaatatgcttagtcattattactgcgccagcattatattttggaggctggtttttatatgcactgtgtcttttcatatctcttgtaggcaattatgagcttcttagagtggctggattagagaaaagtccattaggaatatgtgcatatgtgtcaacagtagtttattacatattacttgacagcgcagataacagatacagcatgctggtgatagtggctgcatttcttgcaatgatgactatttacgtgttcacatttccaaagtataaagctgagaatataatgtggtcattttttggaataatatatgtaactatgatgcttgcatatatttacgaaacaagaagattagacaatggagtttatcttgtatggcttatatttgtttcatcctggggaaatgatacatttgcgtattttacaggagtacttattggaaagcacaagatggcaccaatattatctcctaagaaatcgatagaaggagctattggtggaatcgtaggtgcaacggctcttggagtaatatatggaagtatagtcagcacaaagatgacagaggagcttgtcagtccgatgcttacgtttgcggttgcaagctgtattggagctatgttagcgatagtaggtgatcttgcagcatcagctataaaaagaaattataatgttaaagattatggaaaacttattccaggccatggtggtatattagacaggtttgacagcgtaatatttacagcacctgttgtatactgggctgtcgttattattaacggattaggaagatagcaggaaaggggtataacgatgagaggtatatctgtactgggttcaacaggctctattggaacacagacgcttgatgtaataagaagaaataatgatataaaggttgttgctctggcagcaggtacaagagttaaagagcttgctaatcaggtgagggagttcagaccagagcttgtgtgtataggaagtgaaaagcttgcagcagaacttaaggttctgcttgctgatattgatgttaagatagtatatggtgatgaaggtcttatagaagcagctacaatagaaagcgcagatatagttcttacggcagttgttggcatgatgggaataataccaactattaaagctattgaagcgcataaggatatagcacttgccaacaaggaaacacttgtaacagcagggcatattattatgaagcttgccaaggataatggtgttaatatatatcctgtcgatagtgaacattctgctatattccagtcactgaatggtgaatataaaagagaggttgaaagaatactgctgacagcttcaggtggaccattcagaggaaagaagagagctgagcttgcaggtgttacacttgaggatgcgcttaatcaccctaactgggctatgggacgtaaaataactattgattcatcaaccatggttaataagggacttgaggttatggaagcacagtggctttttgatgtaccatcatcaaaggtatgcgttgtcgtgcagccacagagtataatacattctatggtagagtttgttgacggaggtattatggcacagcttggaagtccggatatgcgtcttccaatccagtacgcattgtattatcctcatagaaaagaacttaatactaagagagtggatttctttgaattaggacagataacatttgaaaagcctgatatggatactttcaaaggtcttaagcttgcatatgaagcatcggacagaggtggaaatataccaacagctttcaatgctgcaaacgagcttgcagtggcaaagtttcttgacagaaagataaagtatctagatataccggatattatagagtacgctatgaatgaggtggattttatcgacaatccatccgttgatgagattcttgatacagagaagaatgtatatgagatgatcggaggaaagtggtaaattggttttaaatataatattggcggttcttgttttaagcataataattatcatacatgagtttggacacttcatagttgcaaaggctaacggaataacagtagttgagttttcgttaggttttggtcctaagctgctccattttaaaaagggcgagacagaatactgccttaagcttcttcctttcggcggtgcatgtataatgcttggacaggattttcttgatgctgaagaggatgatgaagataatcaggatgaaaatgaaaaagaaaaaaatacagatgcctatgatataagtaatgcagcacataaaggcgatgcggcatctgcttctgctggaggctatatgtccatgaaggctaaggatgaggcacttgaacatggatatgatatgtccagatcatttgctaacaagtcggtgtgggcaagaatagctgttatagcagcaggacctttgtttaactttattcttgctttcatatgtgcagttgttatagttggaagcataggatatgatccatgcagggttgatgtgctgtatgaggattcgccagcggctgctgcagggctttcagagggagataccatagttaaagtgaataaccagaaggttacattttacagggattactcgttttacagatattatcatgctgacaaacagatggatataacatatataagagatgggcagaagtatacaacaacacttatgccagagcatgttaagcaggaaaaatatcagataggagtttcacttgaacagaatggtactatttcagcggtgtctgataaaacacctgcagcagtagcagggattgtaagtggtgacagaatatcagctgtcaatggtgtgaaggttgaaaacagcacacagataagcgaacagatcaacaagtgcaatggacagagcatagatataacagtatcaagaaatggttcggatgttacattatccatgacacctaagttagttgaaaatgaatattattatactggattcgcatgttatggagcaagggaaaaggtatcaccaataaagacacttaagtatgcgcttggtgaggttggctacagcgttaatacagttataaggagtcttggaatgatgtttacgggacaggttggtgttaatgatttatcaggacctgttggtacagttagcattatgagtgatattgtggaagaaagcaaggcagatggtgctttttatgtgttccttaacctccttaaccttgctggacttataagctccaatcttggggttatgaatcttcttcctataccggcacttgatggtggaagacttgtgttccttataatcgaagtgctgagaggcaaaccggttaagaaggagcatgaaggaatagttcattttataggaatgattctgcttcttgcacttatggtttatattatgtttaaagatataagaggattgttttagattgtttcagatatattgatttggatatagattattttggacttagattgtttcagatgttgaaacttatacaggaaaagattgaggtggagtatgtacagagataatacaaagattataaagataggtgataagcttattggcggtggcagccctattatgatccagtctatgactaatacacatacagaggatgttgaagctactattaaacagatattaaggcttgaaaaagcaggatgtgatatcataagatgtacagttcctactatagaagcggcacatgctattaaggaaataaaaaaacagattcatataccactcgtagctgatatacattttgactataagatggcgattgctgccatggaaaatggtgctgataagatcaggataaatcctggtaatattggttcgactgacaagataaaagcagtagtagatgttgctaaatcaagaaatatacctataagagtaggcgttaacagcggttcgcttgaaaaggatattgttgaaaagtataatggtgttacagcaaagggacttgtagagagtgctcttgataaggttaagataatagaagatctcggatatgataatcttgtcataagtattaagtcttctgatgttttgatgtgtgtaaaagcacatgagcttatagctgagcagactaactatcctttacatgtcggaataacagaatcaggtactatattctcaggaagtattaaatcatctataggacttggactcatacttaaccagggtataggtgatacaataagagtatctttaacagatgatcctgtaagagaggtagaagcagcaaagcttatattaagaacacttggtcttagaaaaggtggtatagaagtggtatcatgcccaacctgcggaagaacaaggatagatcttatagggcttgcatcaagggttgaagagcttgttaagaattatgaccttgatataaagatcgcagttatgggatgtgttgttaacggaccaggagaggcaaaggaagctgaccttggaatagctggtggagatggctgtggagttcttataaagcacggagagattgtaaagaagtgtgatgaggataagctgctatcagtattaaaggaagaacttgataactggcaggcataatggaaagttgagataagatgtataagtttttagatgtttttaaaacgcttaagttgccagatgatataagagtatatatggagaatgtggaggtcacgaaggtttcgaagacctccactaattctcttgcccgtgtatacataaagaatgataaggttataagcaagaagataatatataaggttgaggatgctcttaaaaagcaggtgttccgtatacagaacatggatgtaaggataatagaccgttatagtctttccaagcagtacacaccacagactattatggatgtttattatgacagtatattgtttgaactcgaaaaatactggactcttgaatataatcttttgaagaattcaacgtgggagtttgagaaaagtgatcttttggtgcttacacttgaggacgggtttcttgcaaggacatatgcggataatcttacagattattttaaaaaaatataccttaacaggtttggatttgaaatagatgttgaatataaatatgccagcaagacagagaaccattatgaaaaggaaaatgcacacaagcttaacttaagagtcaagcagatagaagagcagcttcaggcagcaacccagaatggtgatggtgaaagcaagcagttaagtgatgctgataaaaacaaaaagaaagcagaacagaaagctaaagcagcagcattttttaatgaaagaggcgcaacaggaaaggatcttacaagatacagaaagccagctaatcaggatgtgttatacggaagagattttaatgatgatataactgcgatagaacagcttgaaacaccggtaggagaggtagctgttaatggtatggttatgagcgttgaaccaagaccgataagagatgagaggactatcctttcaatagctgttacagattttacagatagcataatagttaaaatgtttgttaaaaatgagcagctggatgatatgtacggttttataaaaaaaggaaatttccttaagattaagggaatagctgctatggataaatacgaccaggaaataacaatctctaatgtatccggaataagaaagggtactgataacagaagtgtaaggacggatcttgcactcaacaagagagtggagcttcactgtcatacaaagatgagtgatatggatggcgtgtcacgcgccagcgatattattgaccaggctataaagtgggggcataaggctgttgcaataacagatcatggagttgtacaggcatttacagaggcttatcatactatgcagaagctttggggaaagtatgaggctaaaggagaaaaactggacttcaaggttatatatggtgttgaggcttatcttgtggatgataccaagagcatagtaacaaaccccgatggacaggacttttctggagaattcgtagtgtttgaccttgaaacaacaggcttttcagctttagtggataaggttatagagataggtgctgtaaagataaaggatggagaaatagtagacagattttctacatttgttaatcctaaggttcctatatcgtttagaatagagaatcttacaggaataagcgaccagatggttatgtcctctggaactatagaagacatacttccggattttcttaagttctgcgagggttgtgtcatggtggcacataatgctgaatttgatatgagctttattattaataatgcagagcgtttaggtattagtttttcgcctacatatatagatactgtgttgctgtcacagttccttatacctgcacttcataattataagctcgatacgcttacaaagcatcttaatgttgttcttgacaatcatcacagggcagtagatgatgcagaagcaacagcacatatattcttaaagcttataaggatgcttgcagacagggatatatatacgcttgataagctgaatgaagaaggaacacttgatgaagaatctgttaaaaagcttcatcagtaccattgtataatacttgctgcaaacgaaatgggaagaattaatctttacaggcttgtttcggcatcgcatatgaagtattttaaccgatttccaaagatacctaaaagccttgtgaataaataccgtgaaggtcttataataggaagtgcctgtgaggcaggcgaactttttcgtgcaatggttaatggacgttcagatgctgagatagcaagaatagttaatttctatgattaccttgaagtccagcctataggcaataacagattcatgatagaaaaagaagattactatgtaaaggatgaggaagatttaagagatcttaacagaagagtaatatctcttggagaaaagtttgataagccggttgtagcaacctgtgatgtgcatttccttaatcctgaggatgagatatacagaaggattatcatggcaggaaaaggctttgatgatgctgataaccagccaccattatatcttcatactacagatgagatgcttcatgagtttgactatcttggaagtgataaggcttatgagatagttgtgactaacacaaataaaatcatgaatatgtgtgaagaaataatacctgtaagaccggataaaagaccgccggtaatcgagaattcagaccagatgttacgaacgatatgtcataacagggcacatgagatatatggaccggaactgccgcagatagttacagaaagacttgaaagagagctgaattctattatatctaacggatattctgttatgtatattattgcacagaagcttgtatggaaatcaaatgatgatggatatctggtaggttcaagaggttcggttggttcgtcctttgcagctacaatggcgggtattacagaggttaatcctcttagtccgcattatttatgcccgaagtgctactatgttgatttttattcagatgaagtaaagaaattcgcaggtggtgcaggttgtgatatgccagataagaagtgccctaagtgtgggcataagctggataagctgggctttgatataccttttgagacattccttggattcaaaggaaataaagagccagatattgatcttaacttttctaacgaatatcagagtaaagcacatgcttatactgaggttatattcggtaaaggacagacgtttaaagccggaactatcggtacggttgctgaaaaaaccgcatatggatacgtattaaagtatcttgaggagcgtgggaaggtaaaaagacgctgcgaaatagaaaggatagctaagggctgtatagatatacgaagaacaaccggacagcatcctggaggaatagtagtacttcctattggagatgaaatacattcatttacacctgtacagcatcctgccaatgatgtgaagagcggtatagtaacgacacatttcgattatcacagtattgaccataacctgttaaagcttgatatactaggacaccttgatcctactatgatacgtatgcttcaggatcttaccggtatagatcctcttgagatcccacttgattctaaagaggtcatgtcactttttaaggatacatcggcacttgggatcaaacccgaagatataggcggatgtaagcttggggcactgggtataccggagtttggtacagactttgccatgcagatgcttatagataccaaaccacagtacttttcagatcttgtaagaatagcaggtctttcacatggtactgatgtatggctgggtaatgcgcagacacttcttaaggaaggcaaggcgactatatcgacagctatatgtacaagagatgatattatgatatatcttatccagaaaggacttgaaagtgagcttgcatttacgattatggagaaggtaagaaaaggtaaaggccttactcctgaatgggaacagataatgaaggagcatggtgttcctgactggtatatatggtcttgtaacaagatacagtacatgttccctaaagcacatgcggcagcttatgttatgatggcatggcgtgttgcgtattgcaaagtgttttatccacttgcttactattgtgcatattttagtataagagcagatgcttttgactatgaaaagatggctatgggaagagaacgtcttgaatattatcttgatatttataaagctaagaaggcagatggaactatagaaaaaacagagcttgatgaatacaaggatatgagaatagtccaggaaatgtatgcacgtgggtatgaattcacaccaatagatatatataaggctaaggcaagaagcttccagataatagatggaaaaataatgccatcctttaaggttgtatcaaagataggtgaatcagccggagaatctatagagatagcagcaagaggtggaaagtttttatcaaaggatgacttaagacagcgtgcaaagataggacagacagttattgataagctgagtgagttaaagctgcttgatggtatggcagagagtaaccagttatcgttgtttgatgtgttgtagcataaatgtttaatatgcagcagcataatgacttgtcagaatacatatatatatgttatatttgacgggttagcattaaaatacaatgaataatcttaataatatcatgaggtgagaaatgttaaaaaaatatcttatatgttttctggtatctatggtgcctattgtggaactaagaggtgcgattcctatatcgcagggtttccagcttcctttgctgcaatcttatataatatgtgtaataggtaatatgcttcctgttccagttatatatctttttgcaagaagagtgttagagtggggcgctgataaaaagtatataggtaagttctttacattctgtatagaaaaaggacataagggtggagagaagcttaaagccaaggcaggtaatggactgtttgtagcacttttgttgtttgttggcataccacttcctggtacaggagcatggacaggaacacttgctgcaagctttcttgatatgggatttaagaagagtgtaatagcagtgcttgcaggtgtattacttgcaggtataataatgggcgttgcttcagcaggattgtttacagctatatttaactttgcataatatctgtgtaagtgtttttatacagaattggcacacgcagataatataattataatcagctggtatatgttatgcggcatataccagctgtatcaatattaagaaggtttgtttttgcatcatgttaaaactgtggctgtgtgactggctgaaaacatatggattttagggggttttgaaaaaaataaaaaaaattaaaaaaagtttgaaaaagtgcttgacgaaataccgattaacgtgtattataatgaagtgctttgcggtaacgacttacacaaagcgttaaagatatggcttattggtcaagtggttaagacgtcgccctctcacggcgaagacaggggttcgactcccctataagctattctgagttatattcaactgacaagagtggacattaatgtccactctttcgtttttatccagaaatcaacaacatctgtagatttaagaagataaagccagatatatgattcagtatctaattgaataatccagaaaagaggtagacatgggtaaaagagaagattatgaagctaagacagaaaagcttatagcacctattattgctgctaatcatgtggaactttttgatgttgattacgttaaagagggccaggactggtatttaagagtctatattgataaagaaggcggagtcactatagatgactgccaggcagtaagcagagcattcaatgaaatacttgataaggagaattatatttctgaccagtatatttttgaagtgagctcaccaggactaacaagacccttaaagaaagaaaaagactatgaaaagagcttaggacgtcttatagatatcagactttataagccggttgagggtaagaaggaatatacaggagttcttaaagaatataataaagatgttattatgatagaagcagataattccatgataactatagaaagaagtaatctttcgatgatcagatgggcgtatgtagagcagtaaaattaactgtggacatttaagcctgcagcttatgcttaaaattacacgttagcagatgtgtttatattatataatggaggatgataaaatgaataaggatttaatacttgcgattgaggctttagaaaaagaaaatggtatcagtaaagaggttatgtttgatgctatagaaaagtctttaatggatgagtataaggcagagtttgacaaggcagataacggaagagtttcacttgacagaataacaggagattttcatatatattcagacagaactgttgttgagaaggtggaagttccagaattcagggaaaacaaaaaagaaaaatatgtatctggtacagagatagctatagaagatgcaagaaagattaagccaggatgtcagataggtgatgttatcacaatagaagtcaagtctgaagagttttcaagaaaggcagctaagaatgccaagaatacaatagtacagacaataagagaacaggaaaagaacgcactctacaatgagcttcatgataaagaaagagaaatcatcacaggcgttgtacaaagaattaacgagaatggtgatatgacaatcgacatcggaagaacacaggctgttcttaaggctgatgataagtcaagaaatggtgaaggaagcaggtttaaggataaggaatttaagccgggtgacagaataaaggtatatgttgtaagtgtaagcaacagggaaagaaatggacttggtattaaaatatcaagaaaatctcctgaattcgttaagaagctgtttgaagaagaagtaactgaaataaaagatggtacagttgagattatggctatagcaagagaagcaggctcaagaactaaaatggcagtaagagctaatgttcctcatgttgatccggttggagcatgtgtaggtatcaatggtgcaagagtaaagaatattgttaatgaacttggtaatgaacagattgatatagttgagtgggatgctaatccagcacagcttattgttaatgcacttagtcctgcaaaggtagtatcagcagttgctgatgaagaagaaaagaaagccagaataatcgtatctgaacagcagttatcacttgctattggcaagtcaggacagaatgtaagacttgctgcaaagcttacaggatatggaatagatataaagagtgaagctgatgcggaagaaaatacagtctctgacacagatgttgtagaagaaaatacagcctctgacatagatgttgtagaagaataatattttggggagtgatattttgacagcagtaaagaagattccacaaagaaaatgtattggttgtaaccagatgaagaataagaaggagcttattcgtattcttaaaacacaggacgacgagattgtgatagatacaactggtaagaaaaatggaagaggtgcatatatatgccatgatgcagagtgccttaagaaagcaagaaagtcaaagggacttgaaagagctttcaagatggcaataaatccagctgtttatgatgaactggaaaaggagatgacaggtcttgaacaatagcagagcattatctatgataggtcttgccatgaaggctggaaaggttgcaagcggagagttttcaacagaaaaggcagtaaaagagcgtaaggcttatatggtgatagttgcagatgattcatctgacaatacaaaaaagaattttaaaaacatgtgcgaattctataaggttccagtttatttctttagtaataaagaagaactggggcatgcgataggtaaagaattcagagcatcactcgcaatccttgatgaaggatttaagaatagtattgagaagcattttaagtagattagtaataatcagtgtataataatatgcggatataacacatatatgtatatctgcatattaggaaagaggtcaaatggcaaatatgagagttcatgaacttgcaaaggaattaaatatttcttcaaaagatataactgatatgcttagcagcaatgaaaaaaagtacacagcaatgagcgggcttggagaaaatgaaattaacaatgttaaaagcagattcaaagcaaaagcagttgctgacaataacacagtaaaaacagaacctaaaaaggcagaagaaagaaacgtgaaagtagcagaaaagattaataaaacggaagaaaataaaataaatacagaaactaaagagaagacaaagccagatgatgcaaaggcatcagctgaaaagaaaaatgtggcacaggatggggataagaaacatatatcacaggtttatttcccacagaacagtcagaagtctgataacagagacagaaataataaccgcagggataacaacggcggctatagaaacaatgaccgtaacagagatggaaacaacggttatagaaacaatgaccgcaacggctacggaaacagagataatagagacggaaacaacggttatagaaacaacgaccgcaacggctacggaaacagagacaacagagacggaaacaacaacggctatagaaacaatgaccgcaacggctacggaaacagagacaacagagacggaaacaacaacggttatagaaacaacgaccgcaacggctacggaaacagagataacagagacggaaacaacaacggctatagaaacaatgaccgcaacggctacggaaacagagacaacagagacggaaacaacaatggctatagaaacaacgaccgcaacggctatggaaacagagacaacagagacggaaacaacaacggctatagaaacaacgaccgcaatggctatggaaacagagacaacagagacggaaacaacaacggctatagaaacaacgaccgcaacggctacggaaacagagacaacaaggatggcaataacggttatagaaataacgaccgcaatggaaataacaatggacgttcaggaagagacggacagggcttttcaggtgcaagaagaaatgacagagcagcttcagcacctaaggaagattttatatttgaaacaaaacctgattcaagaagacctgattcaagaaagaatgattcaagaaagaatgatagaaagaaggacaatgaggcaaaggaaaatcttaagtttgctaacagcaagcatgagaagaagccagttccaaagccagaaaagaaggaagaggagacaattaagcagcttgttttaccagataccctcactataaaggaacttgctgataagatgaaggtccagccatcagctatcgttaagaagctattccttcagggtaaggttgttacgattaaccaggaagttgattatgatacagctgaggaaatagcacttgagttcaactgtatatgtgatcatgaggtaaaggttgatgttatagcagagcttcttaaggaagatgaagaagatgagtcaaagatggttccaagaccaccagtagtctgtgttatgggacacgttgatcatggtaagacatcacttcttgatgcaatcagagagacacatgttacagataaggaatcaggtggtatcacacagaagattggtgcttatatggtagatgttaacggacagaagataacattccttgatacaccaggacatgaagctttcacagctatgcgtatgcgtggagcacaggctacagatattgctattctcgtagtagcagcagatgatggcgttatgccacagactatcgaagctattaatcatgccaaggcagcaggtgtggagattattgttgcagttaacaagattgataagcctaacgccaacatcgaaaaggttaagcaggagcttacagaatatgagcttatagctgaagactggggtggttctactacatttgttccagtatctgcccatacaaaggaaggtattgatgagcttcttgagatgatacttcttacagctgaggttaatgagttaaaagctaatcctgaccgtaaggcaagaggtattgtaatagaagcagagcttgataagggacgtggtcctgtggctacaattcttgtacagaagggtacattaagagtgggtgatgcagttgctgctggttcatgctatggtaagataagagccatgatagatgataagggaagaagagttaaggaagcaacaccatctatgcctgtagagatacttggtcttaacgatgtacctaatgcaggtgagattattatggctacagataacgaaaaagaagcaagaaacattgctgatacattcatagcagagggcaaaaagaagcttcttgatgatactaagcataaggtttcacttgatgctttatttgaacagatacaggctggtaacatgaaggaacttgatcttatcataaaggcagatgtacagggttcagtagaagctgttaagcagagccttgttaagctttctaatgaagaagttattgttaaggtaatacatggtggtgttggtaacatcaacgaatccgatgttgttttagcatcagcttctaatgcgattattatagggtttaatgtaaagccggataatcaggcaagaatagtagcagaaagagaaaaggttgacttaagactttacagcgttatctataatgctattgaagatgtagaagcagcacttaagggtatgcttgaacctatatacgaagaaaagattatcggtcatgctgaaataagacagatattcaaagcatcaggtgttggtaacattgcaggtgctatcgttacagagggtaggatcacaagagattctgttgtcagaatcacaagagacaaagaacagatatacgaaggacctattgcaacacttaagcatttcaaggatgatgtcaaggaggttaaggctggttctgaatgtggtatggtatttgaaaacttcggacagattcaggaaggcgaccttgtagaagcacatattatggttgaggtgccaagataaaaatgtcaatatatttaaagtatccgggttatgggtatccggatactttaaagtaaaagaatatgattcatataaaaagtgtcagaaaagggggatacaatgcgtaaaaacagcgtaaagaatacccgtattaatggcgaggtattaaaagagcttagtaatataatccgcagtgaaatcaaagatccaaggattaatcctatgacttcggttgtatctgttgaggttgcaccagaccttaagacatgcaaagcatatataagtgttcttggtgatgaaaagtcacagcaggatactattgcaggacttaagagtgcggaaggctatattaggagagaacttgcaagaacagttaatctgcgtaacacaccagagattaagtttatacttgatcagtcaatagagtatggaattaatatgtctaagcttatagacgaagtgactaaaaaagatgatgagagtcataaatagtagatgattaactgataaaagctttagttaagaatggagaataaggtatgaatgtgattgaggaattaaagggtgcacatgttgtcggaataactggacatataagaccagatggcgattgtacgggttctacacttgcattatataattatttgaaaaaaaatatgccggatatggatgtttcagtataccttgaacagccaggagaggaattctcatatcttagcggatattcagatataaggaatacattagaagaagacaaaaggtttgatgtgttcattgttcttgactgtagttcaatagacagaatagagccttttgccagaggctttgaaaatgctgataagactatatgcatagatcatcatataagtaataacagctttgcagatgttaaccaggttgttcctgatgccagttcagcatgtgaggtgctgtatgatacattagatgatgaaaagatagataaagcagtggcagagtgtatatatacaggtattatacatgatacaggtgtgttcaagtatagctgtacatctcttcatactatggaaatagcgggaaagatgatgcagatgggaatagattattctgatataatagacaacagcttttataagaaaacatatgtacagaaccagatacttggaagagcgttacttgagagcgtgcttttctatgataaaaaatgcatattctcaagtgttacaagagatgaaatgaacttttatggtgtgacaggaaaagaactgggtggtataatagagcagttaagacttactgagggtgttgaagttgctatattcttatatgaaaccggagatgacgaatataaagtcagcttaagatctaaaaaagagatagatgtcagtgctatagcagtggcttttggcggcggtggacatgtgagggcagctggttttttggcaaaaggaactgtgcatgatataatcaaccgtataggagaaatgatagaagaacagtattctgatatgcagaattaattaaaggagtacatgcggtatgaacggtataattaatgtatataaagaaaaagggtttacatctcatgatgtagtagcaaagctacgaggtattcttcatatgaaaaaaatcggacataccggaacacttgatccagatgcagtaggtgttttgccggtgtgtcttggaaaaggaacagggctggtatctatgataacagactggactaagacatatgaggcagtgatgattcttggtacaaccactgatacgcaggatacaagtggaaatgttttaacaaagtcggtggttgatgtagacgaaagaacagttcttgaggtatgcagccagtttgaaggtgagtacgaacagattccgccgatgtattcggcattaaaggttaatggaaagaagctttatgagcttgcaagagctggaatagaggttgagagaaaaccaagaagagtagttattaattcgctaagagttaatgatattaatctggaagatgatataaaaacagtaacaataacagtagactgttctaaaggaacttatatcaggacattatgtgatgatataggaaaaaagctgggctgtggagcctgtatgatgtcgcttaaaagaacgagagtcggagattttatcatagatgatacactaacacttaaccagatagctgcgcttactttaaagggtgatatagagcagtacatagtcagcatagataaaatgttttctggctacagaaaggttgttgtcagtgcaggatataacaaactcctttataatggcaataagcttccacttgaggcagtgcaggatcagaacagcgaatttctggatatggaagaattcagaatatatgatgcagatgaggattttgtcggcatatataaatatatcggaggacaattagttccaaagaaaatgttttatgaaaaatcagttacctgaaaggtggtgcataccaggatggaatacatacatggtactgaggatttcaagcttgataaaccaagtgctgtaacacttggcaaattcgatggtgttcatcttggacatcagaagctgatatcaatagtcagggaaaaggcggatgagcttggattgctgtcagttatgtttacatttgacagaataccgcttagcatatgtccgcagaagaatcagcattttttatctacgaattcggagagaagaaatctttgtgagaattatggacttgatgttgaagttgaatatccgttcacaacagagcttatgaacatggaaccggatgacttcataaaagatattcttgttgataagcttaaggcgaaagtgcttgttgttggtacagactactgctttggaaaaaacagaagcggcaatgttgagttccttataaaaaatgcagcaagatatggatatgaaacaatagttgtagaaaaagaaaagtttcagggaaaagatataagcagtacatatgtacgtgaagagcttaaaatgggacatatggaaacagtgaatgttttgttaaacagaccatattcaatatctggaattgttgccaagggtaaccagcttggcagaacgatagatatcccgactattaatgtatatcccacagagataaagctgctcccgccaaatggagtatatgcatccaaaatacttattgataacatcgaatattacggagtgaccaatcttggtacaaaaccaacggtcagtgatggatatgaaataagtgtagaaactaatgttttttattttgataaagatgtgtatggaaacagggtagaggttaaactgcttcattttttaagacaggaaatgaagtttgagaatatagaagctttaaagaaacagatggaaagtgatgcaagctttgcaaaagaaatgtttatgctttagtctgtatagatgtctttactaaattttgcgaaaatgttttgacaaaatacttgattataagatggagatatgctatattacatagcgtatgagccgttacccagattagggacactccgacccggatcttagtgacaggtgattaaaaaacaggaggaatattagaatgatatctaaggaaaagaaagcagaaattatcgctaactatggaagaaaagcaggagatacaggttctccagaagttcagattgcaatcttaacagaaagaattgctgaattaacagaacatttaaaggttaaccagaaggatcaccactcaagaagaggtcttttaaagatggttggtaagagaagagctttactttcttacttaaagaagaacgatatcgagagctacagaagcttaatcgagcgtttaggaatcagaaagtaattataagggcggagttgtacctatattatatgtacaacttcgccctgctttgtgtctatatatcctggaaatatccaggcagagacagaagggaagctataaaacaaccataaaaagcagcagaaacaggcatataacagaagggataaccgagaccactcaaaagaatatcatttttatgacgatataaggatagtgtgaaaaataagatttttcacacgcaagatttgtgcttcgcacaaacttgagatgcgctgaatagcagtggtgtttttttgagttgtttcggaccttctgttcaaaaactaaactaaacagccaaaaggcagaaacgaggaaagcatgtttaaacagtacacaatggaattagctggcagaacattaagagttgatgttggcagagtatgtgcacaggctaacggagcagcacttatgcactatggggatacagtagtactttcaacagctactgcatctaaggaaccaagagaaggaatcgatttcttcccacttagtgttgaatacgaagagaagatgtacgctgttggtaagataccaggcggcttcaacaaaagagaaggaaaggcttctgagaacgcaattcttacatcaagagtaatagacagacctatgagacctttatttcctaaggactatcgtaacgatgttacactcaacaacatggttatggcagtagatccagagtgccgtccagagcttgtagctatgataggtgcttctattgcaacatgtatatcagatattccttttgatggtccatgtgccatgacacagattggtatgattgatggtgagtttgttgttaacccatcacagacacagtggcaggagggtgatcttcagcttacagttgcatctactaagcagaaggttattatgattgaagcaggtgccaatattatcccagaggacaagatgatagaggctatctataaggctcacgatatcaaccagacaatcattgcctttattgaaaagattgtagcagaggttggtaaggaaaagcattcatatgaaagctgtgctattccagcagaaatgttcgaggccatgaagcaggtagtttcaccagaggaaatggaaatagcagtattctctgatgataagcagacaagagaaaagaacattgatgaagtaacagaaaagatgaaggaagcttttgctgacaatgaagaataccttgcagttcttggtgaggctgtttatcagtatcagaagaagactgtacgtaagatgatcttaaaggatcataagagacctgatggacgtgctattaaccagataagaccacttgcagcagaggttgatatcattcctagagtacatggttctgctatgtttacaagaggacagacacagatatgtgatgttgtaacacttgctcctttatcagaggcacagaaggttgacggacttgatgataacgttacaactaagagatatattcaccattataacttcccttcatactcagtaggtgagacaaagccttcaagaggaccaggacgtcgtgagatcggtcatggagcattagctgaaagggcacttattccagtacttccttcagaaaaggattttccttatgcaatccgtgctgtatcagaaacatttgaatctaatggttctacatctatggcatctacatgtgcatcatgcatgtcacttatggcagctggtgttccacttaagagcatggtagcaggtatctcatgtggacttgtaacaggcgatacagatgatgattatgtagtacttacagatatccagggacttgaagacttctttggtgatatggactttaaggtaacaggtacaacagaaggtatcacagctatccagatggatattaagattcatggtcttacacgtcctatcgtagaggaagctataagaagaacaagagaagcaagactctttatcatggatacatgtatgaagccagctattgctgagcctagaaagacagtaggtgaatatgcacctaagattatccagacaactatagatccagctaagattggtgaagtggttggacagcgtggtaaggttatcaatgcaatcatcgaagaatgcggtgttaagattgatataacagatgatggttttgtatcaatatgcggtgttgaccaggctggtatggataaggctatgaagtatataagaactatcgtagatgaattcgaagaaggaaagatatatgaaggtaaggtcgtaagcatcaaggaattcggagcttttgttgagtttgcacctggtaaggaaggtatggttcatatttctaagatatctaaggaaagaatcaatatggtagaagatgttcttactcttggtgatgttgttaagtgtaagtgtatgggcaaggacaagatgggaagaataagcttctctatcaaggatgctgaataaatatattacattataaggaggatatagacatggtagatcagaattgtgcatattgtatggaaggtgaacttgttgcaaagttcggtattaaaatctgtgaattagaaacatctaaggtatatcttttcaaggagcagagccatccaggaagatgtatcgtagctcacaaaaaacatgtaggtgatatgaatgagcttacagcagaagaaagagcagcttactttgaagatgttgcaagagttgcaagagctatcatgaaagctttcaatccagataaggttaattatggtgcatatggagatacaggacatcatcttcattttcatctttgccctaaatacaaggatgaatatgaatggggcggggtattccttatgaatcctgacaaaaagtatttaacagatgcagaatatgcagaaatgattgaaaagattaaggcaaatctttaatccataacatcatatttattaatgttgtagtgcgaaatatcgttatatctggctatgatatgccaggtataacgatattttttgctttttatgcagatatgtggtataattaacgaaaattaaacgtgtgaagcaaaagaaattgtacatattaatgtattgcatttatcagagaggctatttatggaacatacaagagacaatcaacaaaagaaaataaccgcttcaaaagttgaaagagatgaattatatttatattcgttaaagaaaatggctgataataatattaacagcaatgagtcgccattgacaggattatatggaataaaagcatttttctatcagtccaatgaattgatgaaaaaaaatccggataaaagatttgcagtaataagaatggatatatatcattttaaaacggtgaatgaattctgcgggagacaggagggcgataaactgttaaagtatatatcagaactgtttcaaagatatataggagaatatgctgttgcaggacatctgagggcagatatatttaccctgtgtacgaagtttgaggacgaacagcagcttatagatatatcaaagtatattaagaaagagatagacagctatgagatatcatgtaagattatcccggcatttggcatatgtaccaatgctggaaatcttgatataagccttatgtgtgactatgcagatcttgcattaaataggattaagggcaaggtattcagggtatatgagttctatgatactgatatgcgtgagaaaatgctctttgagaaaaagatagagaatgatatactgccagcacttaagaatgactgcataaagacatatatacagccaaaggttgatatgcgtacaggacgtatagttggcggtgaagcacttgttagatggcagcgtgaggacggaagtatggtatatccggatgagtttataccagttatagaaaagaatggatatgtgcttgatgttgatgactatatgtgggacaaggtgtgctattatataaaacagcttgaaaaggaaggcaaaaccccggttcctatatctattaatgtatcgagaatgcatgtctatcaggaagattttatagacaggattaaaaaaattacaagcaaatatgatatcaatccaaagcttatacctttagagattacagaaagcgcatttacaagtgaagagagtagtctttatagaaagattaaatcacttcaggattgtggatacaggttttctatggatgattttggttctggttattcatcacttggaatgcttaaggatgaacatgttgatgaagttaagattgataaaacatttgtggatgatatagctacggataagggaagaattctgttaaagaatgttatacagatgatcagagctcttggaatagacatgatagcagaaggggttgaaacaaaggaacaggctgattttcttgttaataatggatgtatctatgcccaggggttttattattacagacctatgccaatagaagattttgtgttattgcttgaaaagtcaggcaaagagtgataaaatatctgtcggcgtattttagataattgagttaaaaaaggagaaataaaatgtcaggacattcaaaatttgctaacatagcccataagaaagctgctaatgatgctgctaagggtaaaatatttacaagacttggtaaggagattatggttgccgttaaagaaggtggacctgatgttaataataatagtaagctaagacaggttgttactaagtgtaaggcagctaatatgcctaatgatacaattgacagagctattaagaaagctgcaagcacagatatgtctgattttgaatcagttacatatgaaggatatggtcctaacggaacagctatcatagttgaggctttaacagataatagaaaccgtgcagcatctaacataagaaatgcatttacaaagggtggcggtaatgtaggtacacctggctgtgtatcatttatgtttgataacaagggacagataatcgtagataaggaagaatgtgacaagaatgcagacgaccttatgatgcttgctcttgatgccggcgcagatgattttaatgaagaagatgactgctatgagataacaacagctccggatgattttggaactgtaagtgatgcactttcaaacgaaggcgtaacattcgcatcagcagaggttactatgatacctcagactatggttgaacttacatcagaagatgatattaagaaaatgagaagaatacttgcacttcttgacgaagaggatgatgttcagaatgtttatcacaactgggatgaaccagtagaagatgaagaataatgctttaatgtattgtattagatgcaggctggcccgcttttgggtttggcctgcctttttttatgctgtctattgtctaaagcttatatttgccttatatacacaagctgatcaaaatcagtaagtgagttggataatgtaaactaaacttttttaggggcttttattttgaatgatttagtgttattattaagaaaatattttgtaattatcagggaagataattattaagacggagaatataatgcttataaaagaagttccaaaagatgctgagcttacgatagaggtcagtgctgctgcaagaaagctggagtttaagtcgcaatgtatagatacaggcatgaattatctgtatgccagacctataattatagatggaaaaagagtctcttttgaggcttcagttactctgtcagtcagtcttgtatatataagggaagataagaatcctgtgctatggagaggtgtaggcatatcgactgtcactgagaatggaaagccgatgtataagataacctcatccgtggaaggctatgagatgaacagaagacaggcattccggctgtttcttggattaggagcagtagcacagataggtattaataaaaaagctgttaatgttattttaaaagatataagtgagaatggattttcattcgtgggaaatgaagacatagaggttaataaatcgccagttagacttgtatttaaagatacagatgaaaccataagccttatgggagtcgttgtaagaaaagtaaaggcaggtgaaaaaaagataatatatggatgtgctttaacatcatgtaacacagatattgtacattatatcaatgcaaaacaaagatactatctttcaacagcaaagaatacccagattaatgccaacagggcggctataagaaatgcattaagagaatcgcctaagtatattaataacaataataaacaggtgaataaaaagaaaacatgacaataaaagctggaaaataaaaaagtattaagtgaaaatgaattcagcaaattaagaaagtattcagtaaataaaatgaattcagtatataaaaagggaaaaaggaattggagaaactaatatgagggaaacaggaagcaatagcttagaaaaaaaacaaaaacgggagttcgtaagagcagaaatagatgatcagtattctatgacaaaaatctgtcctaaatgtggaactacaatggtatatgcttttggagagacatatgaatgtccaaagtgtggaaataaagaatatacagattttggaaaaataagagaatatcttgaaacacatggacctcagaatgcagtgactattgcagatgcaacaggtgtcagtgtaaaaaccatccagaagtttttatatcagggaagaatagagattccagatggttcagattcatacataaaatgccagatgtgtggcgctgatatcagatatggaaggttttgccctgattgtatggcaaagcttaataaagaaaaccagacagcagtttatgtaggagagaagcctaagcataagagagaccgtaacggaaagatgcatactctcgatgaaagagaaacagagaatgtatcaagaaagccaatagcacttcataggaatgcaaaaaagaataataatcagtaatatataagcaaaagaacaatatttacgggttgttgcaatcagacggtagatgtataatatcaatatatacaaacaatacacatctgagtattgataaatataatggaggattgctttatgaaaaacattagcttgatagatgaggacttcatggattttcctataggagagttcccatatgacaaaaaccattcggctacgggagaatatcattttatccattatcctggattttatggacgatggtatgaccctgtatgcaactatagatataacggacagggtgcctcatggtgcattatggagtataatggcagacattatatggaacagatgaggcttcacaatacagaaccacacaggacattccctacacttgaaactggtgacagattctggagagattatgatatagaagcaggacttagaatgttcaataccaaatggggaagtgcaggtattggtttttgcgcacagaattccctgaacattcttgcatgtatatttgaagataagaagctgaagcttgtatacagacataaagaaaatgtagaagaaatcaaaagtgttgactttgactacaattgtgatgacacatataacataaaggtatctgttaagggaagccatgttatatgcagcgtagatggcagtacatatatagatgtgcagacagattatgcacttcatggtggcaaagtagctgtgacagcaacaataccggctgcattcggttatgtaaaggtaacagttgatgaagcaacagctaaaagaatagaaaaagacagaacagaatacgaattaaagtgtgaggcagcacagaaaaagtaccctaagatgaagcttgccaaaaaaatagatcttaagggctgtggtactggaagacagttaagattcggacatctgcttggaacaaaagaatatcagatggttatggcacaatgccagaagagagttaacagagatgcttacggtacaataagctgtcttacagctatggatcttgatggcaatatattgtggcagcatggtgagcctacagataacactgagattggtagcatttcagcagatatgcctatgcagatatacgatatagatggcgatggttatgatgaggttataacagcaaagaattttgaggtgcttattcttgatggacgtacaggcgaagtcaagaaaagagcaaagacaccttattctacagcagctgaggatggcactattataggagtaccagatggagaatatgcatttgacagaatcaatccagatggaatgagaatatgcaatttccgtggacttgataagccaagagatattcttattaaagacagatactgcagagtatatgcacttaatgataatcttgaggttatgtggcatttccagagtgataagaatacaggacattttccttttgccatagatatcaatggagatggtcatgatgagcttcttgtaggtttcaatatgcttgactgccatggtaaaagattatggacaatgccttttaaggatgatcatatagatgagatagtacctggcagatttgagtcaggacctaataagggtaagaaattttttgcatgcgttgcaggaacacagggatttattctctgcgattttgatggaaacatattaaaaaaggatggcataggacatgcacagagagtaagccttgctaattattgtccagataagccgggctatgagatggcggttgttaacttctggggtcatcagggtattatatacttttatgacagcgaaggtaatgagctgtgggagatggagaatgagcttaatggcaatcttcttacaccagttaactggacaggagacggacaggacttcattctgattaatgcagatgtaaaacgtggcggcatgatagatggtgatggcgttactgttgtgaagttcccagatgatggacacccaacattatgtgcggaagcagttaatattcttggagatgcaagagatgaaatagttacatgggattataattatatgtatatatacactcaggatgatgagcaaagagaggatgtatataagccatataagtatcctgattataatgcatctaattacaggggtgaatattcatataaagaaatattctggtaatacagagtggcttattgataggagtgagagttgtcatgaataacgaattaacaccaggcgacataaagaagatggaagatgagatagaatatcgtgtgcatgaagtaagaaaaaaagcactcgaagatgtcaaggaggcaagagcacagggagatctgagtgagaatttcgagtattatgcagcaaagaagttcaagaatcagaacgaaagccgtataagatatcttcagaggatgataaagacagccacgattatatcagaagattcggcagatgatgaggctggtgttaataacactataacagtaaagtatgaagatgatggaactactgagaagataaaacttgtaacaactgtaaggggtgattccctggaaggacttataagtatagagtcaccgctaggaaaggctatacttggccataaggctggtgacagggttgaagtagtggttaacagtaatgtaagctatttcatagatatactggctatagagaatacggatgactcagatgatgatattatgagttactaaactactgaaaggcgtcttatggtttttagtgaggaacagaaggcggcaatatattataaggatggacctgcacttgtactggcaggtcctggttctggtaaaactactgttataattaacagaatcgaaagacttataagaatacataatatagagccgtcttctatattagttattacgtttacaaaggcagctgcaatatctatgaagcagcgttttctatcccttgttggggattcttatgtatcagttacatttggtacattccacgcagtgttttttaatatgctgcgtcaggcatataattattcagcaggttcaataataacagcagatacacaatatagttttataagagatgccgctatcagctttgagctggaatatcaggatgagttagagatggtatcatctattatatcagagataagccgtgtgaaaagtgaaagaataaatgcagaactttatgaggcagtaagttgtcctatagaaacattcaggcttatatataaggagtatgagcagatgctcataaaaagaaagctgatagactatgatgatatgatactgatgtgccatgaactgttaaagagccgcattgactatagaagggcatggcagaataagttccgatatatactcatagatgaatttcaggatataaataaggcacaatatgatactataaagcttatagcaggaaagcatgccaacctttttgtggtaggtgacgatgaccagagtatatatggctttagaggttcaaagcctgatataatgcttggtttaaaaaaagattatgatgaagctgcacagataaatcttaatgtgaattacagatgttcatcagagatagtatcagcggcgggaacacttatagcgtataataaggtaaggtttgcaaaggatatcagatcgtgcggcatgtgtgctggaagggtgaatgtatacatggctgatgacatagaagcggaagcatgttatgtgatttcaaggataaaagaactgacggctgccggaatgaagctgtcagatatagctgttatatcaagaaccaatataataagcagcatatattatacaaagcttgagtgtgagggtatcgcctgcaggacacagatgatacaaaaaaacatatatgattactggcttgttaaggacatagcagcgtattttaagcttgcagcaggaaaatatgacagggaaaatgttgtaagaataatcaataaaccggtcagatatgtaaagagagccatgataacccagccgttttgttttgaagccttaagatgcagttatgaagataatcagaatatgcttgaaagaataaatgatatgcagtttgatataaaaatgcttgcaaagctgacaccatatgcagcagttaattacatacttaagggcataggctatgaagattatatagaagaagaaataacagcaaaaagacttaacagggaagaagtatatggaaaacttgaagaactgaagcagtctttaagaaaatatacagatataaagcaatggcttatatatatacatgaacagagtgaagagcaaaaaaatcagtcatataataaatataacaatcatgacagtaaaaaaacaaataaaagtgatgctgcacaacacgatgctatcaatatatatacaatgcatggctgcaagggacttgaattcaaggcagtatttataactgatgtatgtgaaggaataattccatataataaagcgttacttgacagccagatagaagaggaaaggcgacttatgtatgttgccatgacaagggcaaaagaaaagctgtatcttgtatacccgaaaaaaaggtatggacaagatacagctatgtcaagattcatcagtgaagcgtctgtttaagaatcctcctgtgcatagagctcttcatactccatggcatcaagctcctcatcaaatgcatcggaaacaatctcatattcctcatctgattcaatgttttcaagaacaggttcattatctgaattgatagaatatctgtaaagatatacctcgctttcatcctcatcaatatctgctattggaagaagtgctatatagttcttatcaccagcagggaatgttcttatgactgcacattctacttcagtaccatcatcaagtgaaagagttacagatgaatattctgaattgttattgtaatctgtattagctgacatattaatcctcatttctgcgcactttatattaacgaatattgtgttaacttaagtaagttatctttagttggtgttttatcacaatgatgtgtcatgtgcgctgtgacacaaagttttcctataagactttaacatatattgtatatcatagcaatttatatttaacaaataaataaaaaaacttaataaaataatataagtacgtaaaaaaatacaatattccgggttgccaacttagaaaagaaggtgtatattacaaataagttaatatttgaagtcaaaggggacaattctaacgtatatagtcagagttgttccctttttacttttcgattaataaagattaccaacctatagaatagtaaatatggaaatggagaacaattatggacaaaatcgataagaagctgataacattattacagaataacgccagaatgccacttaaggcacttgctgagaatgtctttttatcttcaccggctgtatcagcaagaatagaaaggcttgaaaaagaagaaatcatagaaggttacgaggttaggattaaccagttaaagcttggatatcacataacagcatttattaatctggaggtagcgccagtacagaagcaggagttttatccatttatcaagtcatgccctaatgtagtagaatgtaactgcgtaacaggtaattattcaatgctgttaaaggttgtatttccaagtacaatggagcttgatacattcataggacagcttcagaagtttggaagaacaagtacacagatagtattttctacgcctgttgcaccaaggggcatagatgtcaaccaggagcttccaggagaagaaccacaggaatagcatataatgtaaaagcaatattgaaaaagttttgtgaaaaagctacagttgttattgatacttctgcagcttttttgttatacttaacgatatgttaataacatgatgtcggggtcaaaagcccccgactttgatacctacgaattgttacgtgctacgcacttccacaattctccccaatatgagcaagctcatgtgggtttagaccttttgaccatggtatcatcatgttatagaaaagaggaatttatgaatataaacagtatattagacaatgttggtaaagttatagttggaaaagatgatgtagttgtaaaggtgcttacaagcatacttgccggaggacatattcttttagaagatgttccgggaacaggaaaaaccatgcttgcaaagacggtggctaagagtattgattgtgagtttaaaagaatacagtttacaccagacctacttccgtcagatataacaggacttcatatatataatcagaagagtggggagtttgtgttaagtaaaggtcctgtatttgccaatattatacttgcagatgagataaacagggcgacaccaagaacacagtcggcacttcttgagtgtatggaagagcaacaggttactatagatggagatacgcttaagctggaagaaccatttatagtgcttgctacagagaatccggtagaaacagcaggtacatatccgctgccagaagcccagcttgaccgttttcttatgaagcttgagatgggatatccagataaggctgcagaggttaagatacttaacagattcttaaacaataaccctgttacagaccttgaaagtgtatgcacaagacaggatatagcagatatgaagaagaaagctaaggaggtctatattcatccatcacttattaactatatagcagaacttgcacaggcgacacgtaagatgtcagaggttgccataggcataagtcctagaggttcaatagccatggttaatgctgcacgtgcatatgcatatgtgaacgggagagattatgttgtgccatctgatattaaggaactttcagtatgtgtatgggcacacagacttgtatttagtacaggacttgtatcaaagggaagcagggaacaggctgttaatgcagcatttgcacaggttgaagtaccaactgaggagtggactaagtagatgaatattgttttgatgcttataggtgttgttattgtttacaaggttatatcagttgtatacaggaaaaactgggataggaatcttagtacggatgtctccttttcacatacaacagcaacgaaagacgataaagtagagataatagaaacagttgtaaatgcaaaaaagcttcctgtattctgcatgaatgtaaagtttgatatagacagaagctttatattcggacagaaggatacgaattccatggtgtctgataagacgtatcgtaacgatgtgttttcgctgctttctaaccagaaggttacaaggcgtatagaggttgagtgcagcagaagaggcgtatataggcttgaagctgtagagatggtatttccaggtgcgtttatgaatgaaatattgatacataaaagcagactatacagcaacattacagtgtttccaaagccggcagctacagggcagatgtcggatgttaacaacatgattatgggagaacttgaaagaagaaagtatcttagtgaggacaggtttgtgtttgccggaatcagggattatcagtcttacgacagtataagggatatcaactggaatgcatacgcaagaactggcagccttatggtgaatcattataatgagacagtcagcagaaatgtatgtctgcttctgaatcttgaaagtgaaggcgcatatatgcaggaggatatagtagaacaggctataagtatagcagctggactttcacagcttttagcagccagaggtgttaatgtgtctatggtttctaacggacgggatatagatacaaagcagaatataacgataaagccaggttcaggtctgtcacattttaacaagataaatatggagcttgcaagaatagacatatcgcaggatatggatgagttttctgatatgataactgcattatatgagaataatacagtgcttactgatggtatgggcatgcagaatgatatggtatatgttcttatatctgccaataaaaatgacagaataaaaaaagcagcacgtgtgctgatggatagccagtttaataaaatatggattgttccacaggttataagcggaacaggaagtatgtattatgagaatgtattgaaatgaggaaggaataatgcagataaaacacattagaaacagcaggattctgcttgaaatattaatactctgtattgtatatatgtctatggctgtgggtgtgtatacaggattggctggcaataatcctgatacatcatattactgccttatagttttgattcctgtattggtaacatatttttcaagaaaatatgtatcaagttatccactgtttatatttattaatattgtatttgtttttatagcggctaagctttctaaaacggatatagaattcgccggttatgtgtttgtagcagcagctatagcagtacattccataaggctgaaaagcctttatatacagaaaaagcagtatgaaagggcagaagagataagctatgatgtctcaggcagaagcagtgatgatatgaagcttgcggtaggagcagaggaaaagctgcatattgcgtatggtatattcatggttgcattttacatagcaggaagctataaacataataataagcttatgggaatacagctgtttttgtttatagcatttgtaatatgtcagtttttttataaccagcttaacgaactatataagatattctctataaatgagggaaagtcagaatttccagcaagaagaatattgcgtataaatgttatcatgatgatagtgtttgcatcgtttatggttattggaatgcttatattctacagcggaaagtatggaaatatattccagacaatatcagcaggactcatggcggttcttaaggctatattgtgggttcttttaaagcttttaggaagaggaccggactcatcgaccgtctatgaggaagaaacaacgactacacaggcagagtttggtacaaacgaagacctttttgtgccacagaataatgctatagctaatgcacttatggaggtagcagctatcacagccatcataggtatatttatatggattatatatgctatagtaaaatatgctaagaatttcggcagatcacttgatgatgatgttgatgaggtggaatatcttaataaggcttcagaaaaagaacagtatggtataaagccggaaaaagaaagagagcctgcggataagaataatatccaatatagaaaactttataaaaaatatgccagatcaaagaagtatatgaaaaaaaacaagctgtctggtgttaagccggataaggaaatgatgccggatgagataacaagaaagcttataactgatgatgaggaaaaaagcagcataataactaagaactatgaaaaagcacgttattcagacagcgaggtatcaaaagaagatatagaatttttgaaaaagctataatagtgtggcaataaacttacgaataaagtttattattttgtggttgacaatatatggtatatgaggtatcatttagctaattgatagtaagtaaatgctatgaagaggaatattagataagaaccggcttcagagagctgtcgtatggtgcaagacagtggaaggaacttattgaactcgccttggagctgctacccgaaatatttatcgtacagatatagagtaggcgtagacggaggccgaccgttaaagcggacagaatataatgcatagtttaaaagatatgcacgtattcggtgagagcgcagtgcaagctgcgaataagagtggtatcgcgtgagattaattatatctttcgtctctttggactgtatgttctctgagacgaaagtttttttagtttagggacgattcttatgttaacataaactgataactaatatgcggtatataatcatacaatgtatagatttacaggtatttacttatatcatgaaaggatttatctttaacacttatattaaaatcaggaggaataaagaatgttcgattacagacagtataagagaggttattttatgccaccagttgagtgtaacgactgggtgaaaaaggagtatattgataaggcaccagtatggtgttcagttgacttaagagatggtaaccaggcgttagttgaacctatgagtcttgatgaaaagcttgagttttttaacaagcttatagcagttggttttaaggaaattgagataggtttccctgctgcatcagagactgaatatgagctttgccgtacactgattgaaaagaatatgattcctgatgatgttactatccaggttcttacacaggcaagaccacatatcatcaagaaaacatttgaggcagtcaaaggtgcaccaagagcgattgtacacgtatataactcaacatccttagcacaaagagaacaggtgtttagaaagtctaaggaagaagttaagcagatagctatagaaggtgcaaagcttcttaaggagcttgcagaagcagatggtggtaacttcctttttgaatacagtcctgaaagctttacaggaacagagccggaatatgcacttgaggtgtgcaatgctgttatagatatatggcagccaactcctgataagaagtgtattatcaatcttcctgcaacagttgaaatgtcacttccacatgtatttgcaagtcaggttgaatacatgagcaagatgcttcatagccgtgagaacgttgttgtatcacttcatcctcataacgacagaggaacaggagtggctgatgcagagcttggattacttgcaggagcagacagaatagaaggaacattattcggtaatggtgaaagaactggaaatgttgatattgttaatcttgccatgaatatgtatgcacagggagttgatcctgaacttgatttttctaacatgccagagcttacagagatgtttgaacgtcttacacagatgaagatagatgaaagacatccatactgcggcaagcttgtatttgcagcattttctggttcgcatcaggatgctatatcaaagggcatgcactacagaatcgaaaaggatccttctaagtggacagttccttatcttccaatcaatccagaggatgttggacgtacatatgattcagatgttatcagaataaacagccagtctggtaagggtggtgttgcatatgttcttgaacacaactacggcatgctcattcctaaggctatgagagaagaccttggatatgcggtcaaggatgtgtcagatgttcatcataaggaacttacaccagacgaagtacttgagatatttgaaaagagatataaaaagtacacaccagtatttaagattaaagaagtacacttcaagcagatagatggtatccagacagaagtcactattgaagaggacggaaaggatgttgttatcaatgctggcggtaatggacgtcttgatgcggtaagtaacgcacttgcaaagcattttggaaagccatgtgacgtaatgtgctatgaagaacattcgttaaagaagggttcagattctagtgctatagcttatgtaggcatcaagggtgaagatggtaaggaatactttggtataggtatcgaccatgatatcatcaaggcttctatagatgctgtagaatcagctatgaacagaagcatgagcaactaagaaaaagatatactataatacaggcagtatgtaaaagacgtaaattagcttttgcatactgcttatttatgtgttacaataaagcgaaaacatgttcgcagtaatgtctgggatgtcagaataataaacaataagaactatttagaataacagattgaataaaaggaactaataaacatgaaaagaataatactagcttctggttcaccaagaagaagagagcttcttagccagattggacttgagttcacagtcataacaagtgaagcagatgagcataccagtataaaggaaccagccagatatgttgaatatctgtcatccgttaaggcagaggcagtacacgatatgattcagaatgtcttaacagataaagataacgatatcaaacttagtggagaatggtataacgatattatggcaggcagctatgtgatcataggagcagatacaatcgtaagccataaggagcatatattgacaaagccggttgatgaagctgatgcatatcgcatattaaaagaattatcaggagattgtcatcaggtatatacaggtgttacattactttatggtgatggcagcagcaaaagcttttctaacaggactgatgtatactgttatgagcttacagataaggaaatccatgattatataagtacaggtgagcctatggacaaggcgggagcatatggcatacagggaagctttgctgcatttatcaaaggtatagatggcgattataataatgttgtcggtttaccaatatcaagtgtatatcaggagttgaagttatggttaagttgattgcaagtgatcttgatggaactatattaagacatggggcacagaaggttgataagtctacgatagatgttataggtaagcttttagatgcaggtcttcttttcgcacctgcgagtggacggcagatagtgagccttaaaagactttttgagcctgtcagtgacagacttgtatatatatcagagaatggcgcactcagtgagtatcgtggtgaggttatagcaaagacagccatggaaagaaatcttgcgcttcagatagtagaagatgtgtatgaacagccacattgtgaggtgcttatatctggacagcacacagcatacattaagcctaagacagaagaatatctttataggatgacgaaagtagttaactataaaacaactattattgataaattctcagatatagatgaagatatattaaagattgcggtatgtgaccttagtggaataaacaactcgaaggaacatttctttagcaggtggaagggtcaggcatcaatagcggtatcaggagagctttatcttgactttatggagagcagtgtcagcaaaggaaaagccatgaggcagcttcaggagtattttggactgtcaagggatgaatgtatggcatttggtgataattataacgacatagatatgcttaattcagttacatattcatatgttatggagacagcagcagatgatataaagaagcatggaaaatacgtgacagactgggtagaagggtctttgcgtgagaattttaagagtattatttaaataactgcttaaagtattgtttaaagtgttgtttaatttaaagtattgtttaaatagttgtttaaatagtgaatggcgaattataatataggattaacggaggaatgaataatggataagcatataaaagaatgtgcagcagtatttttaagagatcagaagagactttttgacgagccggtagtttttgatgtagaagaggcagaagaattccttgaggactgctttgcacagtattgtaaaaacattaaagagttaaagaaggttatggatgatgaaggcatggatatatcaggcatgtcagatgaagagatagaggagcagcttgaagtattcaagctcgatgatggacatggctactttttcgttgaggcataacagtacttaccgggaatgaggattactatgaaaataactatatgttgtgtaggaaagataaaagaaaagttctacagccaggcgatagaagagtattcaaagagattatccaagtattgtaagcttgagataaaagaggcagcagacgaaaagactccggatagtgcaagtgatactgttaacaggatgattaaagaaaaagaaggagacaggctgctttcctttataaaagatgacagctatgttattgcacttgtaatagatggtaaaatgttagattcagtcgaactatcagaaaagattgataatcttatgttatcaggtaagagtgatattgtttttgttataggtggttcacttgggcttgataagagagtgttagacagagctgattataagcttagtttttccaaaatgacatttccacaccagcttatgagagttatacttttagaacagatatacagaagcttcaggataatgaagaatgagccatatcataagtgacatagataatgtctgatattaaaaatgtgcagaaatggagattagtgtgaaaaataagatttttcacacgcaagaatggagattaatatgaaaagaacgaaaaaaagaatagttacatttcttataatagcaattgctatagcagcagtgtttgtgtttataaaattctttaacggcaatggaatatatatttcaacaggcatgggcaaagatgttcttgcaaaggtggatggacaaaagacatacactatggatgcagcagtgcttatgtcagatgcaaggtcacagtatgaagaaatgtttacaagttcaatatggtcacagcagatagatggaaaaacatttgaagaatatgtaaaagaccagatcagggtaaagcttatcagagtaagatgtatgaatgccatggctaaggaaaaggggatagttcttggaagagaagaaaaggatggcgttaagaaggcagccgagaagtactataatgcactaacagaagaacaaagaagcagatataatataacagaggataagcttaaccagatgtttacagagtttgctatagcacagaagctgtataacgatcagacttcacttatggatatagaaatcagtgcagatgattcaagagttattaatatacagtatatagtaacagattctaaagatgagatagaaaaagcatatgctgagcttaaggagggcaactcattctttgctatagcaaagaagtataattcggatggtgagtatgagtacgagcttcgaagaggtgagatggatagtaagtttgaagaagcagcctatgctttatcaacaggtgagatgagcagcatagtagaggcagaaggaaagtattacattataagatgtacatcagataacgataaagcaaaaacagaggtcaacaagtcagctatcttagcagacaaaaagcttgctgccttcaacgaaaagtttgaagaatatgaggcaggtaaatatgttgaatggaatgatagcgaatggaaaaagcttagcgtatcttcagcggttatatataatgttaagtttgaagatatattcaacacaataacaatcaactaaacagaaaggtatggttataaaatatagatggcagaaaaatatgatgcaaatagtatatctattcttgaaggtcttgaagctgtaagaaaaagaccgggaatgtatataggaagcgtaggaactaagggacttaaccatcttatatatgaaatagcagataatgcagtagatgaacatcttgcagggtactgtagcgagattacagtaacccttaatgatgatggtacagctactatcatagataacggacgtggaattcctatagggattcatccaaaggctggaatacctgcagttgaagtagtgtttacagtacttcatgcaggtggtaagttcggagatggaggatataagatatcaggaggactccacggtgtaggtgcttcagtagttaatgcactttcagtgtggcttgaggtagagataagagtagatggcggtgtatataagcagcgttatgaaagaggcaaggtggcagctccgcttgaaaaaataggaacatgcaggaagagtgacacaggaacaaaggtgacttttttacctgatggagaaatatttgaaaagacaagattcaagtcagatgccataaaaagcagaatgcatgaaacaacttaccttaatcctggacttacaatacattttgaggataaaagaagcggcagtgaagaaaagattacatattctgagccagatggtatcagagcatatgtaaaagagctgaataatggtaaggaagccgtcacagatatcatatactttaaaaagagtgagaatggcatagaagtggagtgtgctttccagtatgtcaatgagtttgaggaaaatattcttggcttctgtaacaatatatatacacaggaaggcggaacacacataactggttttaaatcaaagttcacaatgatcattaaccagtatgcaagagagcttggtattcttaaggataaggataacaactttacaggactggatgtaagaaatggcatgactgcgatagtagctgtcaagcatcctgcaccaaggtttgagggtcagactaaaacaaagcttgataatccagatgcgggaacagttgttagtgcggtcacaagcgatgaggtacagatgtactttgacagaaacctagaacagctaaaggcggttattgcatgtgctgaaaagtcagctaagataagaaaggcagaagaaagaacaaagacgaatcttttatcaaagtcaaagttttccatagattctaacggaaagcttgcaaactgcgagagtaagaaagcagaagaatgtgaagtgtttatagtcgagggagattctgccggaggttctgcaaagacagcacgtaacagacgtacacaggctatacttcctatcagaggtaagatactaaacgttgagaaagcatccatagataaggtgcttgccaatgcagaaataaagacgatgataaactcctttgggtgtggtttccttgaaggctatggcaacgattttgatataagcaggttaagatataataagattattatcatgactgatgcggatgtggatggagcacatattgatacactgcttcttacattcttctacagattcatgcccgagcttatcaatcagggacatgtgtatatagctacaccacctctatacagggcagagcttaagaaggcacctaaggaagacaagtctgtaaaaaagacagcagcaggctctgcactgaaagcttcaaaaacagataagagtaagcttgttcagtatctttatgatgataaagcattagaaagatacaaggagcttcatgcaagtggaacatttacacttcaaagatacaaaggactaggtgagatggatcctgaacagttatgggaaacaacacttaacccggaaacaagaatactaaaacaggttgagatagaagatgccaggatggcgacagaggttacttctatgcttatgggaagtgatgtcccaccaagaagggcattcatacatgcgcatgcaaatgaagcacagatagatgcgtaaaggcttttctatctgtacagtcagattcgcaggcataacctgacaaaaattaaatatattagatgtcggggtcaaaaaccacgactttgataataaaaaatcatacggagataataatggcagagaatattataaaaacagaatattctgagctgatgcagaagtcctatatagattattccatgagcgttataacagcaagagcgcttcctgatgtaagagatggacttaagccggtacaaagaagagtactgtatgctatggatcagctcgggttaaactatgataagcctcatagaaagtctgcacgtatcgtaggtgatgcaatgggtaagtatcatccacatggtgacagctcaatctatgagacacttgttgtgctttcacaggatttcaagaaaggcatggcacttgttgacggacacggcaacttcggttctatagaaggtgatggagctgctgctatgcgatatacagaggctaagctaaagaagttcacccaggatgtatatttatcagatcttgataagaatgtggttgactttgtacctaactttgatgagacagaaaaagagccagcagtgcttcctgtaagagttcccaatcttttagtaaatggtgctgatggaatagcagtaggtatgacaacaaatatccctacacacaatctaagtgaggtagtagatgcagtatgtgcatatatggataatgaggatataactacagatgagcttatggagtacatgccaggtccggactttccaacaggtggactggtcatcaacaagtcagagcttcctggtatatacgagacaggaactggcaagataaagctaagaggaaaggttgtttttgaagcagcttctaagaagggcgagaaggacaggcttgttataacagagattccttatactatgataggtgctaatatcggcaagttcatatctgatatagtagaacttgttgaaactaagaaaactacagatatagtagacgtatcaaatgagtcatcaaaagagggaataagaatagtacttgagttaaagaaaaatgcagatgtagagaatcttaagaaccttctttataagaaaacaaagcttgaagacacatttggagtaaatatgcttgctatagtggatggaagaccagaaacacttggacttcgccagataataaagcatcacattgatttccagtatgaaataaacacaagaaaatacacaacacttcttaacaaagagcttgctaataaagagataaaggaaggtcttataagggcatgtgacataatcgaccttatcatagagatacttcgtggaagctctaaccttaagatggcaaaggactgccttataaatggtaatgtagaaggcataaagtttaagtcagaagcatcaaaaaaacaggcttcaaagcttgatttcacagaaaaacaggcatcagcaatacttgaaatgcgtctgtacaagcttataggtcttgagatacttgcacttcagaaagaatatgatgagtgtcttgcaaagatagaaaagtatgagaagatacttggcagtaaaaaagctatggctaaggttataaaagatgatcttgcaaggataaagaaggaatatggagttgcaagaaaaacagttataacagatgcaaaggctgctgtgtttgtagaaaaagaaattccagcacaggaagttgtattcatcatggacagatttggttatgccaagactatagataatgctgcctatgagcgtaacaaggaagctatatataacgatttcaagtatgtattcacatgtatgaatacagataagatatgcatatttacagacaacggacagctccatcaggttaaagttaaggatataccttactctacaaagttcagggataagggaacacctatagataatcttggaaactatgacagcagcggggaactgatcatctatctgtgtgcatatgatactattaaggatcagaagcttcttttcgttacaagccagggcatgatgaagatagtggattctaaagaattcgatgtggcgaaaagaacagtagctgcaaccaagctgcaggatgatgacaggataataagcatagagaaagcagatatagaggtacagacatactccaagttcaatctggatggtactacaagtgaagttgaagatattgtcagcagcaagaacgttgttgtacagacagccaatggatatttcttaaagttcccactctcagagataccagttaagaaaaagagtgctgttggtgtcagaggtatcaagcttggcaaggatgattatatagaagaaatattccttatggatgatggaacagaattcaccatggaatataagggaaagaatatagactttgcaaagatgaagatggcacacagggatactaagggagttaaggtgagagtgtgagagtgattctacagggagtatattcgcaaagaataaatattcagcatagattagtatatcaggtatacaatcagccagttgtaattaatgaaactaaatatgagggaatcattaaagttattagaatgtggacacattatgataaagtaagataaaaaagggcatcagtagaaagaacattatttattctttctactggtgtcttttaaagtcaacctccaaaagttaacccataaaaaatcaactcacaatttttaatgataaattctgtgcattctgcaccattgataagaaatattcatgtattcttgtgtcatttgttaactcgggatgaaatgcaagcccaatctggtttttatatctggctgctacgattttgtcatcaacagctgcaagcacttcaacaccatccgaaacactatctatatatggtgctcttataaatgtcataggataattcccaatatgtttaatatcagcattagtcacaaagcttgaaagttgtcttccgtatgcattacgttttacagtgacaggaagagttcctatgtggacagtgtcatcatcagctatatgtctagcaagaagtataagacctgcacaagttgcaagagtaggaagtccgttgttaatcatacaacggatatcatccatcatatccagcttgttaagaagctgcccctgaactgtactttcaccaccaggaagtataagaccatctatcccctctaaatcatccctttgacgaagctgtttagttgtatgtccaagactttcaatcatatgagcatgctctatgaaagcaccctgtacagcaagtatgcctataatcataataatcaaaacctcttttctagcgtccacgctcttccataataatctgtatttcgctaggattgataccaaccatagcttctccaagatcctctgataatctggcgataagagcagcatcctgatagttagtaacagcctggacgatagcagatgcacgctttgcaggattgcctgacttaaagataccagaacctacgaatacaccttcggctcctagctgcatcataagggcagcatcagcaggagtggcaacaccaccggcagcaaagttaacaacaggaagcttgccgttatcatgaacgtaaagaacaaggtcgtaaggtacctgtagctgctttgcttcttcaaaaagctcatccttgtgcatagatgttatcttgcggatttctgaattcatttttctcatgtggcgtacggcctggacaacatcaccagtaccaggttcacctttagttcttatcatagatgcaccttcattgattcttcgtaaagcttcacctaaatctcttgctccacatacgaaaggaacattaaactgagttttgtcgatatgatatatatcatcagcaggagagagaacctcagattcatctatataatcaatctctatagcctgaagaatctgtgcttctacgaagtgaccaatacggcattttgccataaccgggatacttactgcatcctgtataccttttatcatcttaggatcactcatacgtgatacaccgccagcagctcttatatcagctgggattctttcaagtgccataacagcacaagcaccagcagcctcagctatcttagcctgttcaggagtagttacatccatgataacaccgccctttaacatctgggcgagtcctttgtttaattcgtattgtgaagtagttgtcataataaataacctcttttctttatttttaaatattgatatttcattgtcagttcaatcatgtcaagtatgtcatgaccggttgattacactaagtaatcagtaacttgtggatataatagaacttatctggatatattaaaatactcaatataaagaaaaataataataccagttgatattaaactggtattcagacacgaggggaatacatatgaaatgataatgtcagatatagacacaagatataaatacaaaagtaaaaaagctctttcctacagtcagaaaaagcttttttatattagaaatattatgtttaagttatagcagtattactatgagatgcacgaaattcatgaaattctcagcattacaatatatcactgccatctggtatcttagatataatcgttttattaatccttataaagaatataagcgaagcagtgagtgatataagttcagcaataggaaatgcccaccatacagcatgtagtcctccaagcttagagagtatgaaggctgctgggataagtaccacaagctgacgcataatggatacaagcatgctgaataccgcttttcctagtgcctggaatacagttccgcatacaatacagaaccaggcaataaggtaatgtatgccaattatacgtaatgctggtacaccgattcttaacatatcgtctgatgcgttgaacataccaagaagaatctgagggattccttcaaagcataagaaacctataaatgtaaggaaaaatgcagttataaggcttagcttgatagtcttaagcatacgtttcctgttctgtgctccatagttgtaagcaataataggtgttataccattgttaagtccaaacagaggcataaagaagaagctctgaagcttgaagtatacaccaaatacagctgtagctgtagaagagaaacctatgaggattctgttcatacagtaagtcatgacagaaccgatagactgcataatgatagatggcacacctatggcatatatcgtgcctataatacgtgcatctggtctgaacctgtggaaatcaagcttgatttcatggttaaacttatggttacatgttccggcaactatggctgcaacacactgaccgataacagtggcaacagcagcaccggtaacacccatccttggacagcctaaaagaccgaatatcataacagggtcgaggataatgtttgtaacagcaccacacagctgtgatgtcatgctgaatatggtacgtccggtagatgttaacagacgttcaaagaaaatctgtgcaagtagtccgaaagagaatatcataacagtacttaagtattctattccgtattccataatctgcatatcagcgtttcccatctggcttttatagaaaggcttaacgatagtgaaaccaagaattaaaaagacgatataactgcatacatataaaaatgctgcatttgatgcaatcttattcgctttcttatagttgtgttcaccaagcgacttggatagtaaggcattcataccaacgccggttccggtagcaacagctataagaagagtctgtagcgggaatgccagagaaactgcagtaagtgcattctctgataacttggcaacaaatatactgtcaacaatgttataaagtgcctgaacaagcatagaaatcatcattggcagagacatgttaaataataatttagctatgggcatagtacccattttattttctaccctaggggcagagtttgtttcctgactcataaatcctcctgtatgtaaataatgtaaaaatatgacaataacttttatagtatagcataaattataaaatggtacaatgaggggatgataaaggaagttaataagagaattaataaagaaaatcaatagaaatcaaaaaaagattgagtacaaataataataaataataccggaatgaatggaacgtatggtattcattccattcattctggtattaaatcaagatatccaaataacaagattatagactataactgtgtttttaaggtttctctttccttgattgggacatctaatatatccatcgcttcgtcagcagacttgttaagcttagtcatgatgtttctgatatcttttaaggtagcatcagcacgtccttcctcacgcataacatccataacaccttctttatcatattcaaaaatatctgaacgtttattttcaatgggagaactgatattagatgtaaactcgttattaatatctgtagttatcccaagtatctccataacttcatcggcagacttaccaagttttttcatggcattgtcaatggttttctggatgactgcctgcatttcagcacgtcattcctcacgtccttcctcacgcataacatccataacaccctcttcatcatattcaaaaatactcacgtcaatcacctcgtccctgtgttttatgaagaaatcagatagtacatcatctttaatacattcatctacagcttcgataacagcaagccttactttcataccaagtctgtcaattttatagcgaaccttattaacaaatgtcatatagtctttaagagaacggcatctgtcaagaatattagtagtgaacaatcctgagttaacagacatctcctgagtgtcaaagatgccatctgaaactttatcagaagtaccatcagaagagttatcgtaattaagattaatcatggtaacttccaattcaagctcgggaaaatcaacaggatgttcaaacatatctgacaatttaagaatcttaatacgttccgtcatatgttcacgtccattataaaaagtaataaaatgtggcgttggaagcttaaccatactttttctatgtaacatactattagaaaataaatctctatacacttcagatacatagtgtaaaaatctgagaggcatattgtgattaacggttgactgctgttcaaacatatataactcgtaactaaatacgaaagaagcatcattcttatacttcatatatacgccaccctttagtgttgttatagtaagctcatcaatattcgtgtgagatgaattattaagtgcattgtataaatctaatagattatgtttgtctgagtacaacagacagaatacattgtcactgtatcttttggtagtagtagatgagttatcatcattcttagttttatgctggatatagatattatcgttagatctcataagcagaatctcctttagtaaatatagtaaataaatgagtgttaatgtgaaaacaacaaacagaactgctatgaaatcaatatataatatacttataaacatattgtaacatctgtcaacttatataacaagcaaaagagagcacaatatggcagccggaatatagctgcgtaaatgtctgcaacgattgaacatagtatattctgtcttgttatgcatggggataataagatactggatccagctataaatgcgtatatagaacataagaaggctgaaaatacatcatataataacaacctatatattcaagacttaattaagtatattaataatataaaacattaatgcaacgatgtcaatatataattaataaaaaatataaataaaatacatcagtattcatatcattaatgatatatctataataatatatctgcaataatatatcataaaatattcaactactttataattaaacattgatgtattcaaggctttagtaagccacatatacataataatgtttaaaagggtaatataccggcacaataagtaatatcagcaagaattatattattcagaataagtagcaacaagatggataattcctcacaggctgtgaggtgtattaaccataaatatattgtagtagaatggagtcagtaggatatgtcaggaacattaaaaataataagtcaaaaaagtaacagcgaaacaaacagctgtgggtacgataacaggataataacaaagaaagcaatagaatactatgaaaaaatgcttataatggaggaaaaagaaacacagacaataaagaaatatataagagatgtaaaaaaacttatgatatatgccaatggcagaagcataagcaaggaacttctcttaaagtacaaagaagatcttgaaaaatgtggtgactataaaatatcaagcattaattcatatctggcagcagccaataacttctgcgatgttatgggatggacagatataagagtgaaaatgataaaagtgcagcacgaaacattcataccggaaaacaaagagttaacaatgcaggaatatgaaaagctcgtaaaaacagcctacaagaaaggtgatatacggcttgcccttattatagaaacacttgggagtacaggtataagaataagcgagcttagatatataacagctgaatcacttaaatatggtatgacagatattcataataaaggaaaagtaagacgtatattgtatcctggtgagctgctaaaagtactgcgaaaatatgcaaaagacatgaatatattacatggctgcatattcataacagcctgcggcaatcctgtaaaccggagtaatgtatggagaatgatgaaaaaactttgtcatgatgcaggagtcagggaagaaaaagtatatccgcataacatgagacaccttttcgccagaatattttataaaataaaaaatgatatcgcaaagcttgcagatgtacttggacacagcaacatagatacaacaagaatatatataaaatcaactggaagggaacataaaagacaactggataggatgaatatgataatagatatggggtagataacataataaatattatgttgtattatcacagaatcttcacagatgatagcacatcataaatgataaaacaagagaatattacatatttcatataaaaatacaatatttcgacattagtaagatattagttccacattattactgattatattttgcatataatatgagttctttcataaaaacaaagcttttaattgtaaaaaacatttaatcttacgccatttcaggcggcaattccatataagtaaaacataatacaacataatatttattacgttgtatcgacaataagctaaacagcactcaataagctgtaagcagtcaggcagaatcaaaaaaggttgcaggtgaggtattatgcagatcaacagagaagattacataatagaacgtgattatagaaagaaaagacttgaagagttccaagaggctatccaggaaaacttaaaaagattatctacagaaattataagtgagcttgtagatgaaagagagcgtcagaatcttacacagaaggatgtagcagatataacaggaatacttccgtataatcttgcgagatttgaaacaggaacaagagttccaacgcttacggtgttagaaaaatatgcttcagcattggataagcatatagaaataaagctgtgtgataatgaaaataaaaaatattgtaagtagataaaaaataaagagggcgtataaatggaaaattttgacaataaaatacaacatgtgtttctcataggggcaaaaagcttaggagcgtatggtggatatgaaacttttgtgtataaacttacagaatatcatcagaataataagcggataaaatatcatatagcatgtaaggcaaatggaaatggatgtatggatgaaacaaaattacaaggagtaagaatactatcagataatgaattcgaatataataatgcacattgttttaaaatcaatatcccatcaataggtgcagcacaggcaatatattatgatatagcttctttgagtaaatgttgtaggtatattgaagaaaataaaataaaaaatcctattgtatacataatggcttgcagaataggcccttttataaaacatttttataagaaaattcataaacttggcgggaaaatgtttctaaatcctgatggacacgaatggttgagagcaaaatggtcagcacctgtaaggaaatattggaaagtatctgaaaagctgatgattagatattgtgaccttgctatctgcgattcagttaatattgagaagtatatacataaagaatatgataaaaaaggaataaaaggcagtagtcctaaaacaacatttattgcatatggtgcggatttgaaaccaagtgaattaaaagatgatgatgatatgcttttgaaatggtataaagagaagaagttagtacctaataattattatcttgttgttggacggtttgttccagaaaattcttttgaaattatgattcgtgaatttatggaaagtaaaagcacaaaggattttgctatcatcacaaatgtaaatactaaattcttgaatgaattagaagaaaaattacattttaaaaatgataaaaggataaaatttgttggaacagtgtatgaacaggaattgttaaagaagatacgcgaaaatgcttatgcatatcttcatgggcatacagttggaggaacaaatccaagtttgattgaagcgttaggaagtactaatttgaatttattagtagatgttagctttaacagggaagtggcagaaaactgtgcattttactggaatacaaataagggtaatttatcaaatttaattaatactgtagatataatgaataaaaaagatattgagctcgttggaaaaaaagcaaaacaaagagtgaatacagaatatacttgggataaaatttgtaataagtatgataaagtatttactaataatcaattttaaaggaatgaagtaatgaaaattatttttttggcatttgcgtgtagaccagagagtggttcggaagatgcagttggatggaattggattttagaagctgctaaatattatgatataacagttgtaactaaaactgaatttaagaaagatattgagagtaagcatacaaatattaatgttttgtacgttgactctaatgaaaaatggcatgacatatctatatattatgaatatataatgtggcaaaaaaaagcatataaatatcttaaaagcattaattgcagtgctaaatatgattacttatggtatataacatttggaaacataattttaccagcatatgtatataaattaaatattccaattatatggggaccagtaggtgggacggatcaaattgtagatgttttttataaaaagatgaaatttaaagaaaaatttcctgtgcaaatagttagaaaattaattttaaaaactttaaatataaattatatttttaatagaatgtgtgacaaatcaaaaataattatcgtgagaacaaaagatacagtttcatatattcctcctcaatatagatataaaataattacacatttagaaacagcaatcaattctaaggatgttataaaatatatagaaaataaaaatatatttttgaataaagataagataaatcttgtatacacaggacaattaataggtcgaaaaaatgtttcgtccttaatagatgcgtttgttaaatcagcagataagaataacaatcttgttttaaatatagttggtgatggccctttaattgacgaattaaaggagcaagctagaaggaatgataagatagtattttggggaagatgtgatagaaaaaaaacattacaaattttagcagaatctgatatatatgtttttcctagtttaatagatacattaactttttctttactagagtcaatggttttggcaaaacccattatatgttttgatgtttcaggaatgaaaatagccttagatgattcttttgcaagaaaaattcctgtgcttaattataatcaatgtattgacgaatttgcaagatcaattcttgaattatcaaatgaacctaaaaatagaaaaaaaatgggggaatgtgcaagagaatatgttgagaaaaattataattggaatgaaataggtaaatttattcataatacaattagtgggggaaataatgaagtttagtgtaattgtacctgcttataattcggaattatatattggtgagttgctagaatcaatcatcaatcaaacctttttagattatgaggtaataatagtagatgatggttcaatggataaaacaaataatatagtaaaaaagtatatcaaagaacatataaattttcatttaatagaaagtgtaaataaaggtgtctcatcggccagaaatattggtatagaaaatgcatctggagaatatattgtatttgcagatgcagatgattatatggacgaaaatgctttaagtacatttaatgatattataaacggaagtgaattgggaattgctgaatttaagatgattccgtctaatcaaacacatagctataaactaaataaagaaaaaatgaatagagatgaaataattcatcaaatagccataggtaacatagatggctatttatggaataaagtctttttgagaaaaatattaagagagaataatatattatttgatacgaaattaactatatgggaagattttttgtttgttattaattatgtaagaaatatcagttatacaacaatttctaaaaaaattgtgtacaactataggattgtagatggtagtgcaactggaaaattcaatgttaaaaagcaaaatgcatgtttggaagcagcaaatgaaattttatttactgctattgaaataaataatacagaattaatccaatatgctagaaaattaaggtatgaaacatgtattcattattgtctaatgttaatgaaacaatttaagtataattgtgactttaaagaaaaggtgattttattaagagaatataaaaaaggagtaaaacgtaaaacaaaaaataaaatgtttgaagttttaataaatatatattatttctttaggagaaaatttgatgaataagcaatctttgatatctgtaataatacccgtatataatgttgaaaaatatttaaaaatatgtttggagagtgtggttaatcaaacatataaaaatttggaaataattatagttaatgatggttcaacagataattcgttaagtatcatgaataaatataaatccgataaaagggttaaaatatacagtaaagaaaatgggggactatcatctgcaagaaattatggtattgataattcacatggagaatttatttcatttattgattcagatgattatatatcaaatgattttattgaaaagttgtataaacaaataaaatgcgataatagtgatatttccatgtgtagatatataagagaagagaataaatttacacatacatatgtagcaaaaaagcttaattcagaagatgtgcttgaaaaaattttatatcaggatgaccaaacattatattctgttgctgcttggaataaattatatagaaaagaaatttttaatgatatacgatatccatatgggaaatataatgaagatatgtttatcatatgtgaaattatgaaaaaagtaaaacaaattagtatatgtgattttgttggatattattacagaataaatgctaatagtattacacaagaaaaattttcaagtaagagattggatgttgttgaagcctgtgatcatattataaatgctataaatggaaaaaagaatctagaagatgcagctgttaatttgaaatttagaagatgttttgaaatgtatgccaaaataattaaagctgaaaatagagaaaaatataaacaagaagaaattaatttgaaattagaattaaaaaaattatctaaagctattatatctgataataaatcaaaaatgtcaagtaaattagcagctttaagtgtaaaagtatcaataccattaacaaaaataattattttgatgataagcaaaggatgatttatgaaagatatatgtataataggaatttattttgggaatgttccgcctaattttaaactatggttaaaatcatgtgaatacaattctgatattgattttattgttgtgggagattttttatatgaaaaattcccagataatgttaagtatataaatatgactatgtcacaatttatgcttttagcagaaaaagaattaaattgtaaaatatataaagaacgttcatataaattatgtgatttaaaaccagtatatggttatatactaaaaaaatatattcaaggatattcatattggggtcactgcgattttgatttaatatttggagatttaaataaatttttaacaaaatataatctaacgaaatatgataaatttttgccattaggtcatttgtgtttttataaaaatgataatagtaataaatatttagaagatacattgacagagatgaatgctattgaaatatttaatagtaaatataattgtttattcgatgaaattggaattaataagatttataaaaaatataatttttttgatgaaataatttttgcagatataaatccagcatatagaaaatttctggaagttgaatatttaagttattatccggagatatacacaagatataaaacaaaagtaaagaaaattaattataaatatcaagcgttttactatgataatggatgtgtatataaaggttttgtaaatgacaaaggaatcgtagaagtgcgtgaatatatgtatattcatatgcagaaaagaaaagaaagagaagataatatatatatagataaagaaaatctaaactattttataattgacaagaaaattatagaaaaaaataatggaatacctagcatagatattataaaacaattaactccatctaacagtagcgtatatatagacaaaatattttatttggctaataaaatcaagagatatataaataaaaaaattaaaaaagttaattatgataatataataatcccaaaggatgttagatatgaaagtaagagatagtagatttgagatgttacgtattttttctatgatattaattataattggtcattatgcatatcatggatttgctgataagttagctgtattaaatttaggtacaaaactggctgtttttatagggagcataggtggacaggtaggtgttaatttatttattctaattacaggatattttttaattaataacactatttccttaaaaaaaataattaatattatgatagaggtttggttctattcaatatcaatatatttaattatggttattttaaaacttgccgaaataaacttgtttaatatagtaaccacagttttgcctattgtttttaaagaatactggtttgcaacggcatatattattttattaattgttgttggatttttaaataattatatatgtagtttagaacaagaaaagtataaaaaaatgttaataatagcatttttaatatggagtgttattccaacttttttatatggtgatatgtatgaaaatgaacttataagatttataattatgttttatgtaggcggatatattagaaagcataatgtacaaattaagaattgcttattgattatagttatgagtttttcatatgcttgttgtattgtttcaagtgtatttattaatattttaagtgaaaaatataaaatattttccggtaaagaattttatttatatggtggtaataaagtcccagtaatatttatttcaatttctatttttttattaatatgtaagtgtaaaccttatgttaacatatacataaataaaatctcttctactatatttgcggcatatttaatacatgataatccatatataagaagcttgctatggcccgatatatttaattatgtaaatagctcattatataaatttatttatatgggttttataattagtgcgtcaattttgttaattgcatatgttatagaaaaaataagacaatatatatttaatatatttataaaagaaagcgtgattaaataatgaatgcaaaaaacaaaaatataaatagctttttgtttgtattagcaatgagcgttaggtatttacaaacggtatttatagactattggccatcgtttttacagaatttcgatattcttataattatatttactattttattttatttattgcagattgtatttaaaaatgcaggtaaaataaattttaaatataaatatgaaacaataaatatagtaatggttattttaacatttgttatattaacaatatactatagtaaaaagaattataatggagtatggttgtcaagaactaatattgaattatcatacattatgatagctgttctattagccttttgttgttttaatttatttgattacttagagataaataaatgtatgaaacaattattagttatttttataatattatatctatttgaattgatatttaaagatatttcattatctgattttttgaatattacattaacggggtcatattcgcctacagaatctcagaagttgtcctcaacagcaatgttgatgttttattggttttatacatttagaacttctaataataaaaaatattttattatcagctttatatatttaatatgtgtttttaaacgtccactaatagtaggggcagtgttattaattgttttggattatatttttaatttaaacagagaaattaaaaataaatggatttggattgcaaaagctttgtttatagtagggacaatactttggacgtcaatgctctataataaaaatattaatataataaagttaaaatatggcattgatttaaatgtttttactgaatcaagggcatggttttttaatgcattagttaattatggatataaggcatcaggatatggtacaacgacaatagaattaggaaaagcctggtttaattgcggagaaagatatatagaaatggatttagtaaaaatatatatggaaacaggcataattggtttaatggtttttataaataattattttaatcttgttagaaataatttatataatttttttattatgttgactatatttgtaacattattattttcacatagtttaacagagccagcatattgggcgggaataatgcttgtattgggttcaaatatttattacaaagaatatataagcaagtataatagaacacatatctttaagccattaaatttgaaaattgttataaaaaaataaaaagaaggcggaaataaaatgcaaaaaaaacatatttattttattgattatttaagagtaattgctgttgttagtgttattttctcacatataatagccaatactaatagttattatgatattaatatatataattcaaatatgttttttttgtatgatttattattgaatttatcattaattgcagtgcccatttttttgatgattactggatatttattgcttgatgaagaacgttattttagttttaataaaatgtttaaaagttattttttaaaatgtatgttaataattataatatttggaacatcatttaattgtatagaagcaatatttaatacacattcatttaatattgaaagtatatttaagtcatttatagatgcagttggtggaaagagttggaatcatatgtggtatatgtacatgttacttgtaatgtatttacttattccgatatttcgaaaattagttaaaaatcttgatgataaagaatacgtttacttattgttaataattctgctttttaatatatgtttcaaattatctaaattgacggaatggacaacagaatatttccctattaaagggatttatattttttacttattaattggagattttattagaaggtataaaaaagaaatagttattaaatataaaaaaatatatatattaattggcatactcatagttggaatatgttcaatagtaaaagatatgtatcatattgaatttcttcaaaattttttagcatatgatggtttgtttttagctatattagctatcacaatatttttagtctttgtagaaaagggagatgatataaaatgtaataaactaataagtagtatttctaatgcctcttttggtatttatattatacatatgttttttgtaaatataattgtgaaatttacaaaaataaatttctataaatgggggattatgtcactatttacttttatgttggaatttatactaatctttaccattacatatggagtcactttaatattaaaaaaaattccgataacaaataaattattataaaagtaggtatatcaatgaaaaataaatcgttaggattaaatgctgttttaaatggagcgagaagcataataaatatgcttgtgccattaataacattaccgtatataactcgaatattaggtgctgagaatctaggaaaatataattttgcaaattctatagttgggtatttttctttgttagcaggattaggaatatcaacttattcaattagagaaggggcaaaatataaaaaagatgatattagaatatctcaatttgccagtgaagttttcactataaatattatatcaacttttatttcatatatatgtttgtttttattaacattatttacgtcaaaaattaataattattctggtcttatttttattattagtattaacattttattaacaaccgtcggatgtgattgggtattttccatatatgaggaatatctgtatattacaattaggggaattcttatacaaatattatatgttgtttttttatttatatttgtaagaaatcaagatgatttggttaagtatgcttgggtatctataatatccagttctggagcttatttaataaatgtttttgaattaaaaaaatattgcaatataaaaattgtaaaaaattttaatgtaaaaatgcatttgccagctattctaataatatttgcaaatacaattacagtttcattatatacaaattcagatattacaattttaggccttttaaaatccgattatgaagttggtatatatacggtgacagtaaaaatatataatatgataaaacaacttctggcagcaataattgttgttgcgattccaagattatcactttattggggattaggtgaaaaggataagtttgaaaacactgcaaataaaattgcaaatacgttattttcaatcgtgtgtccaataatgataggaatattttcattaagtagcgatatagtaatgctagttggtggacaagattttttggatgcaacattatctttaaaaattataagcatagctttattatttagtgcatttagttggttctttactgactgtgtattgataccatgcaaacttgaaaaaaaggttttatatatatcaattatttcagctactattaatatagttttgaatttaattttaataccatatggaaaacaaaatgcagcagcgtttacaactttgttagctgaatttatttctatgattatgtgtagtaagtatgtaagaaaaataataaaaatacatataaaaaaaattgatattgtgagtaatgtgattggatgtatctttatatatgtaatttgtaaaattttaaaaagcagtatacatgtatttgtagtatatatttttggttcaattgcaatatcaatgataggctatattttaattcaaatagttattggaaacagtatatataaaaaaatgttttatgaggtattaattagaataaagaaacattaatactgttatattaggtaggcagtaaatgaaattgtatataaaattataattctttgtgtaagaaaatttaatgacaatatatttatttgttatgaaaatagaataatatgaaaagagggggatataattaatgcaaatatagagaagtataaagctttggatggcattagaacatattctgcaataggaatagttttaatgcatgtttttgaaaactctgactattattgtattccagattatatatctataaaattagatttattaaagtggttagtttatctatttatgatagttagtgctttttctatgtgttgtggatattatgagagaataatgaaaggaaatatatcattaacggaattttatagccgacgatatagaaaattactcccattttttgctttttagtaataattgattgtatatatagttttagtagatacgcattattagaaagtatagctgatattatgcttgtattttctttattgcctaaccctaatatatccattataggcgtgggatggtttattggtattgtttttttgttttatatgctttttcctttcttttgttatactataaaaaatagaaaaagtgcatggttagctatgattatcagtatattttataatattgcatcatattgttatttttttgatgataatcatgttatatcaagttataaaagtcatacaaatattttgttttgttcaatgttttttatgcaggaggtattatctatttgtatagaaaaacaataataaatatatttaaaaagtattttagatatggaatattattagtaggtactattactgttgtagcagttttatttttatataaaattacagaaatttacttgccgtttgtttgtctctttgttttctcgacatggattatttatgcaatttcatatgatagtaaattattaataaataaatttaccaatatcatatcaaataattctttggaaatttatttaagtcatatgcttttatatagaatatttgaaaaaacaaaattattatacttgtttggatatggagttttatcacttataattataactattttatctataataggttctttgatattaagtgtaccttaaaaaaaaacggaaaagattgtgttgagggaaataattccgaattaatttcttatttaaatgaataaacataatatatttgacattcgtaaatgctaaatcgtttatgtaagattaaagatattagacgaaaagactaacaatggcaagtcatatgattcttggtgtgaataacgacaaaactgactaagagtattacgttagaatagcttataacaatgaagatattgttccaccatccgtataaagtcccaacttgccatttccccctataaatgttaaaatcaaatcacgttaagatgtgatatttgtttaagaaaatacactgattaatgcttggtaacatgtatctaaaaggggtgggtgacatggcttttttgaatattccgaagggaaggtcagattttgaaacaatccgtagagagggcttttactatgtagataagacagggctgataggtgaaatcctaaagtcatctggtactcaggttacattaataacccgtccacgtcgttttggaaagacattagggatgagtacgcttgaatgttttttagatattcaaaaagacagtcaaagcttatttgatgggcttgaaatttcgaagcaaaggaatatttgcgatgaatggatgaataagtggccagtgatgagcttaagtcttaaggctgttgaaggtaacgacttctcaacggcatatatgcagcttgtttatgaagttggagaactttataagaaacatgaatatcttatggaaagctctgcactgaatgaagaagaaaaaaagctgtattggaatattcgttatcagcatgcaggaaagattgaagtaatgcgttcactttatattctttcggagtttttaagcagacattataataagaatgtaataattctcatagatgagtatgatgttcctatggcgagagcgacaagcaatggctactataaagaaatgcttgaaatcatgaagggatttatgcaggcattaaaagataattcatatcttaaacttgcggttgtcactggctgtttgaaaatagcaaaggaaagtatatttacaggcacaaataattttgtttcaaatactatcacttcatccagattgaatgaatactatggatttgttcaaagtgaagtggacagaatacttgaagatgcagatataaatggtaaagaagaaatcatgaagaaatggtatgatgggtatcatttcggtgatgttgatgtctattgcccttgggatgttatgtgttatgttgatgacttacagaacaatcctgatgcaaaaccagatgaatattggaaagatacaagtgataatgcaatcattcgttcattcattgattatgctggtgtgagcattacaaagaagatggaaacgctgatgagcggtggatatattctacagagagttgacgagaatctgacttacgactatttacattcatcagaggagaatctttggagtatgatgtatttaacaggatatttaacgcaagtcagagactgtgatattgatgaaaaattgacagataatacaatagcattaaaaattccgaatcttgaaattaaacagatttttgaaacggaagtttttaggtggtttgaggataactcaaaaaagtggaataaaaaagaattatttttagctgtatggagtggtgattgcgataaaatcacaaaagaagtgagcacattactaagaaggactataagctaccacgattatggagaagatttttatcatgcatttctaagtggtatatttgctggtgcaggatatcaggtggattcaaacaaagaacatggtgaaggtagaagtgacattattgtttgtgatactataaacggtcacgtagctatttttgaggccaaacgtgcggcggctttggataatctggaatcggagtgtgataaagcattgaagcagatagatgagagaatgtatgccagagattttgaagatgcttatgacagcgaacatattcactgctatggcatagctttctataaaaagcgttgtcttgtaaagaaaaagtaatacaaagtacaaaaagtaagattataaaaataagattacgaaaattaagattacaaataaatatatttgctaaacccaaagcctttagagtataatatctctaagggcttttttgttatgtaataatatagcaattatatattttatatagagaatgtggcgcatgagcaggacggttgcaataggaagaactgatacaaaggggagtgtccgaagatagaatataatgctatggtgtggcatttaaagggaaacaggttgttataaagatgggtaagtaagataaaacccagagctggtgtctaaaattaagaataatagtctaaagcaaaaggtgctgtcacctcaacgattttcaatcgttaaagcggcagcacctttatgattagaatcagtccgaagctggatattgttaattacagcttctggttatccttcatatattcatcatataaaccgatgaccttattcataacctcaggaccaggagcaccgagtgtaagtctcttttctacacatgtcttaaggcttatagcttcatatacatcttcttcaaatacaggacttattttcttgtattcatcaagtgagaggtcatcaagagcgattcccttatctatgcacataagtacaagctgtcctacaataccgtgggcatctctgaaaggaacgcccttctttacaaggtagtcagcggcatctgttgcgttagtaaagcccttcttagcagagtcttccatacgtgcatcgttgaacttcatagtatcaatcatgcccttgaacaggcttacacaaccctttacagtatcaatagcatcaaaagtaagttctttatcttcctgcatatctttgttgtatgcaagaggaattcccttcatagttgtaagtatgctcataagtgcaccatatacacgtcctgtcttgccacgtacaagctctgctatgtcagggttctttttctgtggcatgatgcttgaacctgtgctgaatgcatcatcgagctcaatgaacttatattcgttagaattccatatacatatttcctcagagaatctgcttaagtgcatcatgatagtagagagtgcgcttaagaactctataacatagtccctgtcagacacagaatccatactgttaagtgttggtccgtcaaagccaagaagactggctgtcatttccctgttgagagggtatgtagttcctgcaagggcaccagcaccaagaggacagtagttcattcttttatagatatcgtgaagtctgcttctgtcacgcttaaacatctcaaaataagctgagaagtggtgagccactgttacaggctgtgccttctgcaggtgagtaaaacctggcatataagtttcaacattttcctttattattcttaagataacttccatgagttctcttacttcttcatcaacattcttaacttcgtcccttgtatatagtctcatatcaagagcaacctggtcgttacggcttcttccagtatgaagcttctttccggcatccccgatgcgctcaataagagtagcctccatgaatgtatggatatcttcatactcatcagtgatttcaagctttcctgattcgatatcagaaaggatgccctttaagccatctgtgatctgctttccttcgtcttctgatatgataccttgtgctgcaagcatagtggcatgtgcgatacttccctctatatcctgtttatagaacttctggtcaaatgagatagaagcattaaagttgtttacaagttcgttagtttccttagtgaagcgtccgccccaaagtttcattgtttacctctttcctgggattgtcgtattatcacatcattataatttattataacatcccaattaataatattctatcatagtcggtggcttttgaccccgacatcatataaatgcataaatgcagatttatatctttattaaatatagctgctgtttaatcagcgtgattgctttcatcgctgtcaagattatcaaaatcatcaagctcatcaagactgaagtcatcaagtggcataggtgaatcgtgaggattaatatcatcatcacatatagactgtgtttttgtttttcttctgtccatcagaatcacatcatcttcacatataagctcctgtataagtacaggccagctgtctgtgcttataacattcatacggcacattcttttaaagaaatacatacctatcaatataataatgcagagtgaagtgataatgcaacctaaaataaggttaacaggtgtatatttgagtgttatattatgttcacctgctggaacatgtacacttataaaagcaccatatatatcatttgtttcaacctttttaccatctatatatactgaccatcctttatcatatggaatagagcatataagagttgcatccttatctgcattaacagtgccttttatcttgttgttagagaattctgatacgttaagcgagttgttgttaagtatgttaaaggcttctttgaatcttgaagtttcaagtgtgtatacactggcattcatggatgtgtcagctgaaaccacaatcacatcttcaggagtagcgtatccaagatctatgatggttccaccttttttaaggtctttgtaggtatattcagaaccacgtatagtaacggttactgtgtcacaggcagtattcttagtgatcatataaaggtgtccggctttcactggttttacttcaaagccggtatcagtagagttctcatatgtcagtgtgaacacgttggatattcctgtaagattctttataagcgagttctggttgtctatgcctgagcctatagcctcgcttccttcccatccgtaagggtcgttgtatgtcatgtagccgataggaagagtgtaagtgtttttatatatgaattctccatcatcacctgtgtaatatgtccttagagggctttctgtaagtatacggtttgatatggcatatttaacggaaaacagactttcagttacaagagttgcaccgttatatttgtaagcattaaatgagtgctcaaaaccaagcttaccaaggaatttttccatagcaccattcgaggttgatgagaatgttgacatactgtggtagttatgccatgcaccatcattgttagaacggctgccgaactttttatccatgcggtagaaggatgagtcatcctctgccacagtagatgtgactgtttttacggcatcataatcaagcagataagaggtacggcttgtagttccgatgccggtagagtccatatttatagtacattctatgatacataaagaaaatgtaataaaaagaatgacaggaaccctgaaatcatgcttaatgtgtatgaccataagaagtgcgtatataagtataaaagcaccactaaggtaaactatagtaaaatcataagtttcatctactgcaaatacctgttctataaagagcatgatgccaatagctatccagagtgccgcaccaagctgtttagtcgtcatactgcggatatgtgtaaatgcttcatagcacatagtaagaagaaagaacacatatatgaaggactgtctgcatggaagactgttaggaaagtggaagccatgccagataaagttaggtatattcaggttaaaagctgtaagaaacgcaagtataagaactgactttcctattttttcccttaaatctactttcttgtccataatataaagagggaataaaagcagtactgctacaccacagtatatattagggtagtgttcaagtcctaagtgtaccggaacgtctataagatgtcttgtaaccgtgttaagtatgctaaagtatagtgtcagcttctttggaaattctatgttgttggatgctgaaagtgtgaaagcatagaattctggtaacaaaagacatgctgcaagtccacctgcaagtagtgaatatatagcaaagttcagtatttttttaaaatatatgacaggctttcttgttcccctgtatgcgataataagtacgataaagtataaaacaactgatatacataccatgatagctatatagtagttggtgtatatacataaaccaagagttatgcagtaaaggaaacatttgttttcgttaacgagtctttcaagaccgagtattatgagtggcagaagtacaagacagtcaagccacattatattccagctgtaagcagctacgaagcctgaaagagagtagaacataccaaacagtgcaatactgcattttctgttattaaaatgctttgttatatagtaagtgaatgtaacactgcttaaacacagcttcaatatgatgatggaattcattatttcaatcatatatttctgaggaaacagcactataaaccagttagatggactggcaagatagtaagcatatagggctgtgaagttggttcccatgccaatatcccagctgtatgtaagactttccccatgtcttagcttgttccacagctcagagaaaaatggtgcatactgatgatacatatctgatcttaagtagcagttgtttccaaaaggatatatttctcttgctatatataaggctgtcattatgataagtgggattataaaagcaatgatataagttattccaccacttggaatattactatttgttttgtcaaaaagacagaaatgtttcttagacttttttgataaatcaatagaattgttgttaagcgaatccaaaacgataccccctgttagttaattaaatacatcagtaagagccagatatccttttacccttacatcatcatatattaccaaaatataaaaatactgtaaataatattgatgaattatttattgttttagcttgtattatttcttattattatgtacaataaatgtgtatgcgaaggaaccttatattttttttataaggagtatacatgaacataattaaattatacaaccagtataaaacatatatcaggtgttttgctgtggccatcatagttctagtaacaggggcgctatattatggtatgcatggcagcggtaaagataaaagcggggcagatagggcttctgttagtagtgtggatagtgactctttggatgctgcagtccttagaggcacacaggaagataaagaactgatatatgtttatgtatatggtgaagttaacaatcctggagtggttggatgtaagaaggattccagagtgtatgaggttgtagagttatgtggaggctatacagcaaacgccgatgaaagctgtattaaccctgtacgtaaggtatctgatggggaaaagatatatattccatatgttggagaagactacagccaggggatttatgatgatgattcttataagacctcacaggagtatgctgcatcgttatatggtgattacggagcttcacagcagaatacgcgcatcaatatcaacacagcggctaaggagcagttagtcacacttccaggtataggaacatcaagagcagaggacataataagttaccgtagtaagaatggcagctttaaaagtatagaggatattaagaaagtgccaggtattaaagatggcgcatttgcaaagattaaagattatatatgtgtttaaacaaggagtattaacagatatggctggtaaggtattagttgtagatgatgaaaagatgatagttaaaggcataaagttcagtcttgttcaggattatagtgttgttgattgtgcatatgatggtgaagaggcactgaatatggcaaggaacaacgattatgacattatccttttagatattatgcttccaaagatgaacggccttgaagtatgccagcagataagggagttctccaacgtacctattattatgcttacagctaagggtgatgatatggataagataatgggtcttgaatatggcgcagatgattatatcaccaagccttttaatattcttgaggtcaaggcaaggatgaaggctatcttaagaagaaacaacagtaacagggataaagaaactgttaaaagcaatgtgcttgtagtaggtgatatgaagatagattgtgacagcagaagtctttttatcaagggaaaagagatatatcttacagctaaggagtttgacctgcttgagctgctcgcttttaaccctaacagagtatacagcagggatgcgttgttaaagacggtatggggtgcagattatccaggagatggaagaacagtagatgtccatataaggcgtctgcgtgaaaaaatagaggataactcaagtgagccaaagtatgttcataccaagtggggagtaggttattattttaatgtttaaacatattgatattggaacacataataagtcatttaaatcaggaaagcttttgactggtatccgcaggtgcatttttagtgcacgcttcaggattatacttatgatgtcagtattagcagttatatctgttatttctgttgtgctggcacttaaatattcttatatagaatctcttattaacaaaagaaaagagtacatcagtaacgaggctgtgcttatgtcggcagagtttacggattattctgacctttcagatgcaagaaatggtggaatgtatgagaatcttatgaactattctgcacttaaccagatgaggataagagttgtagacagaaagtacatggtaagccttgacacgtatgctgtggacaatggcaaaactatcattagttcaaaggttattgatgtatatgagagctctaaggcagcagcagattataaccgtaagtcgggcagtatagaggcggtctcaccggtatataacagtgagggtactgttattgcagtgttagttgtgaattttgatatttcagatatcagagttcttgcaggagatgcttttgatgggatttatgtagtgttgtttgttgttatcacatttataatagtcagctctatagtgatatcgtatttttatatgagacattacaataaagcattaaagatagttgaagctgttgatgttggttatacggacaagaggattgagattaagggctcaacagagcttagaagctttgctgcccattttaacagtataatggacaagaataacgagcttgattcttcaaggtcagagtttgtttcaaacgtatcacatgagcttaaaacaccgattacatccataaaggtgttagcagattcgcttaacacacaggaagatgtacctgttgaggtgtacagggagttcatgcttgatattgtaagtgaaatcgacagggagaataagattatagaggatttgttatgtatggtaaggcttgacagggcttcgtcggcacttaacatatcgtctgttaatatgaatgaactgcttgagcttgtactaaagaggttaaagccgcttgcagcaaagaagaatatagagctgttgtttgaaagcttcagaccggttgttgcacaggttgatgaggttaagattacccaggtaatatctaatcttgttgagaatgctataaagtataataatgtcgatggatgggtacatgtttcgcttaatgctgatcatcagttcttttatgtaagggttgaagattctggaataggcataccaaaggacagtcagggcaaggtttttgacagattctacagggtagataaggccagatcaagggaaacaggtggaaccggacttggtttatctatcgtcaggaatataattcttatgcatcatggtactattaagctgtacagtgaggaaggcatgggaacaacatttacattcaggatacctctcaactatgtagaagagaatgaaaactagtaatattcagcagggtaacaggcagaatggagaagtacgtggttaaaaagttcgtagtaagaataatgtgtatattaatatgcatcggtataacaatgtctatgcctgcatgttcatcagagagtaagaatgaaaagtatacaatatattatactaatagttcaaaggataagcttattgggagtacatgtatgcttgatacttctatgtctgttgaagataaggtgagaacgttgcttgataacatgggtgtacgttcttcaagcaaggatgaatatatcataaagccagataatgttaatcttttagaatccagtgttaaaggtaaaacagtatctttaaactttacaacaacatataagcagatgccatcacaggtagaacttttatatagggcagcagttgtaaagacactgacacagcttgatgatatttcgtatgttcatttttatgtggatggcaaggaagctttatatgaagatggaagtgttatgggtatgtttaagagctctgactttacaagctctgataatgatatcaggcagatggactggcgtaatgtacagctgttttatgcagatgagagtggaacaagacttgttaaagtaaaagaaatgttagcttacaataaaaacatgcctatagaaagaatggtggtacagcgtcttataagtggtccaacaacacaggatacttattcaacacttccagaggcagtaaagctgctaggagtatctgttgtagataaagtatgctatgttaatcttagtgaggagtttgcagatgaacttgtaaatgttgcatcagaggttgagatatattctatagtgaattcgctctgttcgcttgataacatagaatcggtcaagatatttatcaatggcgattattcaagcaaatttaaagataatatcagtcttgacaggttttataagtttaatcagtcgcttgttgagtaaaacagtattaatatattgttatctgctcatatgactttgtgtgttccggaaaggaacggaaaatatagtattgagaagacctttgtttattgcggctatgatacagcttattgccgcatgtgtatctttttggtgtataggaaccgggcagcaggatatgctgtcagtggttcttgttacatcatttgctggagttttgttatatggtattcttgcattatatataaggttatgcaggatatccgtcttttattttcttgtttttatattatatcccattacaacaatatcaatgatgttagcagcttatagcctggaccagagttatggacgcgagagctttacaggaactgttaagaatatagtttataaagaagattatatgatgctttatatgaaggataacagcctgaataagcaggggataatagtgtattcatattatacagatgattataatgctggtatcgatgatgagatagacgtatcgggagaagtcagtatgtgggagaaagctcataatcccggaaactttaacagccgtttatattatatatcatgtggttatccatataaatgtaatgcagacaggataacggttatacatagcggtaaagacagctttaatgcatggctgtacagtttaaagcagcggtttaaggctgtatataatacggtttatgatgaatatgataaccaacttatgaattctatggtgcttggtgataaatatgagcttgaagcagatgttaaagatatgtatcagaaaagtggtgtatcgcatcttcttgctataagtgggctgcatatttcaatagcaggtatgagtgtatataatatgcttagaaaaaggctgaatcagaagatatcggcactcgcaggaatattggttatattatcttatctgatatttacaggagaatcagtatcggcagcaagggcggtatgtatgcttgttatggcgataatagcagatgtaagggcaagaacctatgatatgctgacggcactttccatggcatctgttatgcagataatggacaatccatatataatatgtaatacgtcatatattatgtcttttcttgcaatgcttggtatagcactggtgcttccggttatatcatcagcagataagacacttgtattcataaaaaagaaaaatagaaaaaatcggacattgaaggatgaagttatatatcttttatgtgattcattaagtggctgtattgctatacagcttatgctgctgccggcattgttatatgtatcttatgagacttcatttataagtgttatattaaacctgattgtcataccgcttatgccggttgtgatgataagtggtatagtctcaggattagcaggacttgtgtcgataaaatgtgcatggtttatggcaggagcagcccactatgtgcttaagctttatgacatattgtgtaaagcatgtgcagatatacaggcaggaacatacgtcacaggaagaccacaggtaaggcagcttgtcctttatatgtttatcttagccgtatggatagcagctgattctgaatatgtgaaatattgtaccatatatcgtgtaagtaatatgagtaatgtacatgatatatggcggaatgtgagtaatgtgtgtaatgtacatgatatatggcagaatgtgagtaatgtgtgtaatctacatggcgcaggcaggaatgtgtgtaatataagccataatattaagagtgttattctaattgtgcttttaatactggctgctgtcaatatgagatatgttcatcccaagggactttatattatgatgcttgatgtaggtcagggtgattgcatatatatacgtgatgaaaatggtatcagttatctgttcgatggtggaagcacggatgttaaacaggcaggaaagtacaggatatataaaactctgcgttatatgggtatacggaggatagattatgctgtgataagtcatggtgatgctgaccatgtgaatggtattaaagaacttatagatatgagtggtgcttcatttactgtgggtgaagttgtcatgcctgatataaaagataaggatagtgaagaatcatatgctggaatgatagaatatgcgcataaagcaggcattaatatcagctataagaaggctggggatgtacttgtatgtgataacagcacggcatttaagataacttgtatgcatccgtgtgaatcgtacgattatgaggatgctaatgactattcggcggtttatatgatagagtataaagacttttccatgctaatgatgggagatgcaggcaagaaggctgagaaatgtatgatgaatgactggaaacagcataaagagcttaaagtttttgcacttaaagcaggacatcatggttcaaggtattcatgcagtgaagcttttcttgagagtattgatcctgcgatagcgcttatatcctgtggtaaggataacagatataagcatcctcataaagagatgctgacaaggcttcataatatggatattaagccataccggacagatgaagacgatgccataatgataaatgtcagtgctgataaaataaaagtacaggtttacaatgacagcagataaatggtacaatgttagctatgaaaactttgaatgaacatattaaaaaaggcgaatatcagaaggtatatcttatatatggtgaagaggaatatttgaaaaaccagtaccgtgacagaatgaaggcggctattatcggggatgacaccattaattacagctattttgaaggagatagcacgaaagcagaggatgttatttcaatgtgcgaaactatgccgtttttcagtgatagaagacttgttatagttagtgacagctctttttttaaaaatgcaaatgacaagctggctgattatataaagaagcttcctgattatattgttctgattttcgtagagaaaaatgttgataaaagaaataaggtatataaggcggtaagcagctgtggttatgtgaccgagatgaaatatcagacaccagcaatgcttaaaaagtggatagccggaatgttgtcaaaggaacattataaggtgacggaggcagcctgtgatcttattcttgaaaagacaggtgctaacatggagcttataagaaatgaggtcaataagcttataagctactgtgctggccgtgatgcagtcatgccgcaggatgtggaggctgtgtgttctacgcagacgacgagcaggatatttgagatgatagaagcggttgctggaaaaaacagagataaggcactttctttgtattatgatcttcttgagcttaaagagtcacctatgcttattttgtacctgatagtcagacagttcaacggaatattacaggctaaggattatgcagcatcaggaatgtcatcaagggaagtggcttcttatatgaagatacagccgtttatagcaggaaagtatcttgcgcagtcgaagtattttacggcaaataagataaaagaaatattaagggaatgtgcagatgttgaagaacgcatcaagcagggcagacttcaggaaaagcttggcgtggaaatgattataataaaatattcagtatagtatacataagataaaaagatttgttttatagcttacaacaggaaaaaaggacagatgcgagggtatgcatctgtccttaaataatatcctgtgataattaagctaaagtgttaacagctttagtaatgcgagatacttttctagcagctgtgttcttgtggaatattcccttagaagtagccttagaaatctcagctatagcaacaggaagagcagcttcagcagcagccttgtcaccagcagcaacagcagcgtctaccttctttacatatgtcttaactctagacttaattgccttgtttctctcagctcttacctgattagttattactctcttcttagcagatttaatgttagccaatccgtacacctccaaattttaataaaattcatagttaaatgtttcgcattaaagccggacacggacgatctaatgtaaacatactcatatatcttatagtagaaaatgtaatatgtcaactataaatttataaaaatgtttgtgaaatgattcattccgaataaaatattcaattttacatactatatgtctgacaggatgatggataaaaagatgaaagagagaggaaatgtgcatggaatatgatatggcaagaacggaccttgcagttgaacttaatgaaagcatttcaaagaaaagcggcagcttaaaggggataatagtgaacgaatccactgatagcgatgcagcgatcaaggtaacagagataaagattaccaataaaagagcagcagaagctataggcaggccacagggttcatatataactatagaggccagaaatattagtaaggcaggtgagtcttacaggaaaaagatagtagatatattgcttgattatataaggaaactgctagaaagtaatatagaaaaacaggctcatgctaatacaacgcttcttgttgtaggacttggcaacagatgtataacatctgattcacttggcccacttgttgtggatgggctggaggttgattatcatattcagacagggcagggaagagatggtagaatgtgcgcagttattccgggggtcatggcagataccggacttgaaacagcagatataataagaggcatagcaaaacaggtaaaaccatcagcggttatagccatagatgctcttgctgcaaggaatatatcaagactgaacactacaatacagttatctgacagagggattaatcctggttcaggagtgggaaaccacagagtagggatcaataaggataatataggagttcctgtgcttgcacttggtgtaccgactgttatagatgcatttaccatagcagtagatcttgtaagtccgttactaaaaaactgcacgaaagaggaaagggaagaattcttatcaaggatatatatggaaggtataagcgatatgtatgtgacacctaaggctatagacacagatgtacagaatataagtggagttatatcagaagcattgaatcaggtgctgcatatttaaaagaatatataaatattttataagaatgtaatattattgctttttgttaatacaattaaataacaggagattggaggggctatgaagagagggtacaggctgttatatatgatagctggcgtaatgatattattatctgcagtattttttgaaaaaaatataggacttgcctccttcatggaggatgtgtttatcagtggatgtgtgaatatgactatgccgggagcaacatgttatatgaatccgcagaagcttcttaagtgcacggtgtttgatgaacttatgaagacaactgttcctgtaagtgccatgcttccaggaaataacgatgactatattatgcttgctgataatgcgtgtgactatgaaaatatatatgaaaccagcgataaagcagaagagacttctaagaaagaaagcgtacctgttaaagatacagatgaagtaacaacgcctgctttgggcgaggctgatacaggttctgatacggatactgcagtacagaatgtgattcaaagaaaggaaataacaggaacggtttataataaaacagagctttcagattatggatttgttcataatcatttttatacaataacatctataactgagcttacagagagcatattaagacctgatgattttataaacagaaatcttgccatagataaaagcagcagacagccacagatacttatattccatacacattcacaggagggatttatcgattcagttgaagcagatgcaaaaacaactatagttggtgtaggtgattatcttacaaagcttcttacagaacggtatggttataatgttattcatgatacaacagtttatgattatgtcgatgggaagctggatagaagcaaggcgtatacatatgcagaaaacggaatagcaaagattcttaatgacaacccttcaatagaagttgttattgaccttcacagagatggtgtagcggatacgactcatcttgtaacacagatggatggaaagagtatggctaaaataatgttttttaatggccttagctatagtaagattaatggagatatagcgtatcttaataatccatacagggatgataaccttgccatgagtcttcagatgcagcttataggtgaggcatattatccgggtttcttaaggagaatatatgtaaatgcgtacagatattgcctgcatgagagaggaagatcgatgcttatagaggcgggtgcacagactaatacgtttgaagaggttaagaatgctatggagccgcttgctgatattcttgataaatgcctgtcaggagagaaggttatgaatgatacttaaataatatgcgctttagacaatagaatatttaaataatataacgctatatatggatattggaaatagatacatattttggtatattactacaaaaattctgcttattacaactaaaacagagggttttacatcatttttattgttttatacgattaaaaatatagtattgacaaacaaaagaaaaagtagtactctcatgttgttgataacattttagtttataatcattaatcgcaagcgattatcgtggcagttttcctgccggattattcccagttttaagcttaatatttcgtggccggaaatattaaaaagagaaggattaaaaagagaaggattattttattttacttgaaaggattatattttgcttatggaaaaaagtttatgccaggatgttatggagtattcagaatttgttgaaaagataaagaaaatgtcagaatcagtagcaggtacagaggggactgtgcaggttacacatgttattaagaataacggatgtgaatatgatggtttggttatattaagaaaagggtgtaaaatatcaccaaccatatatctgaacggatattatgaacagtattgcaaaggaaaaagctttgaaagtgtattttcaggaatcaaagaactttatctgtttaataaagacagaatatcagttgatacagacagctttgctacttttaatgggattagggatagggttgtattcaagctgataaattataacgcaaacagaaagctgctaagccttgtaccacataaaaagatacttgaccttgcgatggtgttctgctgtatgcttgaaaagaatgaagagggaaatacatcagcacttatatataattccaacatgaattactggaaagtgaaggaagaggatatatacagagcagcgttgaacaatacagcacgcattctgcctgctggcataacagagatgtcgaagctttttgaagcttatgatgaccatgataagatggatgcctgtatagattctcaggagattaaggactgccagctttatgtgcttacaaacgactgccgtattaatggtgcagcctgcatgctttatgagaatgtgcttaaggattttgctgacagcatagaaagcaatctgtatatactgccttcatctatacatgaggttattatacttcctaagtttgctatgtttaataagcaggagcttgtgaatatggtcagggaggtaaatgcggagggagttgccatggatgagatattgtcatatacagtatatgaatatgacagggaaacaggcgaacttagcatgtaggaaaacctggaatgcaggcggacttaatatgtatgcgtacctggcatatataaaaaccggccatatataagaacctggcatatgaaatatatatgccaggcataaataaatgtacatgatgggagtcgaacccacggcctttcgctccggaggcgaacgctctatccaactgagctacatgtacatggcacacagccaatactcataatacactattttgcttatcagggcaagcggataaaagctttataatttttctttttgattttattagtgttatttgataaaatgattgcgtgaattgcaaagcaataaggcgattaatgcaatgtattggattcgaaaggaaagttatatataatgcgtattaataaatatctgagtgcacagggggtatgttcacgccgtgaggctgacaggcttttagaggctggaaggataaccgtggacggtgttactgccatgtgtgggcagcaggtggatgataatagtgtaatatgtatagatggcagcagaataagcgatgaaaagccgcaggatgtactcatggcgtttaataagccaagaggaatagtatgtacaacaacagataaccagggaaagaataatatagttgattatataggatatgataaaagaatatatcctgtaggaagacttgataaggattcggatggacttatacttcttaccaataatggtgaaataactgataagatattaagatctgttaacggacatgagaaagagtatgtggttaaggtcaacaaaaaaataacagatacatttttaaagaacatggcggatggagtatatcttaaagaacttgatgttactacaaagccatgcagcataagccgcataaataactatacattccgcataatacttacgcagggacttaacaggcagataagaagaatgtgccaggaatcaggttataaggtcgaaagtcttacccgcgtaagaataatgaacatagagcttggcggacttaaaactggtgagtacagaataatagaaggtaaagaaaagagcatgctttatgaaagcttatgatgaagcagagaagctgtgagggcttaaagataataaaacattatatgacggagcagaataatgaataagttagatagaattaaagagttagttgtattacttaataaagctggaaaaagttattattcagagggacgagagataatgtccaactatgaatatgataaattatatgatgaattaaagaagttagaggaagaaacaggctgtgtactatctaacagtccaacagttaatgtaggatatgaggtacttagtgagcttccaaaggaaagacatgagtcaccgatgctaagtcttgataagacaaaggacagagaagtgctaagagactggttaaaggaccagacaggacttctgtcatggaagctggatggacttacaatagttctgacatatgaggacggaagacttagtaaggcagtaacaagaggtaacggagagataggcgaaataatcacaaacaatgcgaaggtgtttaagaatgttccggttactattccatataagggaaagcttgtattaagaggtgaagctataataacttattctgatttcaacaggataaacgaggagcttcctgagatggatgcaaagtataagaatcccagaaacttatgcagcggttcagtcagacagcttaacaacaagataactaaagagcgtaatgtcaatttctttgcatttgcacttgtatcggcagacaatgttgattttaagaattcaagaaagtgccagttcgaatggctgaaaagtcagggctttgatgttgtagagtataaggttgttgataaaaataacattatagatactataggatggtttgaaagagctatttctgataatgattttccatcagatggacttgttatcatatatgatgatattgcatatggtgaatcactaggaaggacagcaaagtttccaagaaatgcgatggcattcaaatggacagatgaaacggcagacacggtactacggcagatagagtggagtgcatccagaacaggtcttattaacccggtagccatatttgatccggttgagcttgagggaactaaggtgtcaagagcaagtgtccataatataagtattatggaaggtcttaagcttggtataggtgatgatataagagtgttcaaggctaatatgattatacctcagatagcacagaatcttacagaaagtggcaatattgtaatacctgatgtctgtccggtatgtggacagcctacaagaatctgtgagataaatgatgtcaaaactctttattgtgataatcctgagtgtcaggcaaagcatgttaaaagctttgcgcttcttgtgtcaagggatgcacttaatatagacggactgtcagaggcaacgcttgaaaagtttatacagagaggctttattaaggataagactgatatattccatcttgacagattcaaggacgagatagtagccatggatggctttggagaaaagtcatatgccaatcttatagacgcggttgagaaagcaagagatacagatctggtaagagtattgtatggacttgggatagacaacataggattatcaacagcaaagcttattgtaaggaagtttaagggtgataaggaagcacttatgaatgctgatatacaggaacttacagatatagatggcataggtgaagttatagccgattcatatgtaaaatattttgcagatgagaaaaaaagaaaagaatatataagacttttaggtgaagtgagcttaaaagaaatggatgatacgcaaaactcacaggaactttcaggaaaaacattcgtaataactggcagtgtgactcattttgcaaacaggaaagagttaaaagagcttatagaaagcatgggtggtaaggttaccggttcggttacaggaaatacctcgtatcttattaacaacgattctatgtcacagtctgcaaagaataaaacagcagctaagctaaatgtacctgttattacagaagaagaattcatcagacttgcgggattagtggatatgctgtaatataatgtgagatataagaacggaggaacattatgccaattaagatacagaatgatctgccagccaagcatgaactggaagaagaaaatatatttgttatggatgaaagcagggcgctttcgcaggatttcagggagctgcagatagcaatccttaatcttatgccattaaagcaggatacggaacttcagcttttgcgtgcgttatctaacacaccattgcagatagatgtgacatttatacagacagaatcacacatttcaaagaatacatctcattcacatattaagaagttttatgaaacatttacagacataaaggataaaaactttgatggtcttataataactggtgcaccagttgaaaaactcgactttgaagaggttaactactgggatgaattaacaaagattatggagtggtcaaaggagcatgtaacatcaactcttcatatatgctggggtgcacaggcaggactttattatcattatggtataaagaaggttcttcttgataagaaactttcgggtgtttacagacatcatgtccttaacagaaaggaacctcttgtaagagggtttgatgattattttatggcaccacattcaagatatacagaagcatgcagagaggatatccttaataataagcagcttaaggtgtttgctgattcacaggaggcaggcatatatatcgttataggacaggatggaaagcatatatttgttatgggacatccggaatatgacagaatgacacttgaccaggaatataagagagattatgataaggggcttgaaccagaacttcctgtcaactattatcctgatgatgactgcaacagaaagccggtgttatcgtggagaagccatgcgaataatctatatactaactggcttaattattatgtataccagacaactccttatgatcttaacgaaaaggcggaaaagaggtcttttaattgatagatgaaaaagaaattctcccatttaactttttttcgtatggtggtgtttatagtggtgaccataatgggatgagatatatgattaaaagaactggtaaaaagccggatttcactttgaatgcgcttgtgtggagaggtccatatgcatcatcagctgttaatgcagatgatataacaaaaaaagagtttgaatattcagaggaaggaagaaaagctgctatagaatggatacaaaagatgtatacagacagaaaggatgaatgggataatgccccatccatcaatcaggctgtattgtacgatggcaggaagaatacataatgataaatataataatatatacaaggcatgaagctatacattttgctataagagctgttgtgtaagtgatgttttgtgatagaaaaggcagcatgataaatgctgccttttctgttataagaacagaggcgatggatattacactcatgcttagcggacatattatattgcttattacgtctgttttgaaatgatatatagtataaagctttatatagttaagcatacatacaacaatattgcttattataaggccgtatatatatccacatatcccaatgcgtggaacaagtattataagaaatcctatcctgataataagaccggttatgtttgcagcgcaggtaaaggaggttttgtttattccgtttaatatgcttgaaaggcttacctttaagtaaagaaaagggcatacgcatgcaagtataatggtgtatgtgtatacatcaggctgcttaaatataattgcaccaagcctgcttatgtataacacaaacagaatacagcacataataccaaggtgcatacacacgcagatagtgtatgatatagttctggttatattatcagactggtttgtggaactatctttggatatctttggggtgagcataactgcaagggaattggttattgcgccaggaaacattataagaggaatcaccattccaccgatgattccataagtgcttacagcgttttcgttattcatgccatacagcataagctgtacaggaataagaatagcttcaccactttcaagaagatgaactaaaagactgttaagattaagcggtaaagcgtatagtgcaaggttcttgattaaagtatatatttttccttttgttgtgggattaagcgatgataagttcactcttttgtaatgctttctgaattttttaatatataatgccaaaacgcagaatattacagcacataattcgcctgctatattgccatatatggcatctgtaatattaagggtacggtctgattgctgtataaaaatatagtaataaaagataactcccaatattcttacgagctgttctgctatctgggatgcagcggggataaaggcagacctgcagccgtagtaataaccgcatatacagctgtgcactgctgacagcggtatacttatgacaataattcttattagttcagtacaatctgtgtttaacatgattttttcagctattgttccagcatatatataacataatgctgaaaatattactgacatgggaatagataagaaaagaccagatattaaaggctttaagctttgctggtctgctgcggtataccttgatatggcagaattaaagccgcatatgcatacagagaaggctattccgcataaaggagtaatgagctgcagcattcccataccatatgcacctatatgtgtgtttagaaatattctgtaataaaacccgagtatccggcagaaaagaccggcaagtgttaaaacaatggttcctttaattagtggatttttaatagaattatttatggaattatttatggaattgttaaaggaattatttatgcgattattcatgcagcctccagtttatatttttgctttgatatatgggcagatgtcatattaatccatattaatctttaacatagtatgcaccggatgaatataatattataaatatattggaaaagtgcgattatatgcacggaaagagttctatgttatatcttgataatgcagcaacaactccgcttcttccagaagtccgtaaagtgatgatgaattatatggtggataactttggcaatccatcttctatatataaaataggcagaatgaacaaaatagcagtagaagaagcaagaaagagcatagctgagactataggagcatgtacagatgatattttttttacgtcaggcgggactgaaagtgataactgggttcttgaatcggcagcagaatcagcaacgggatcagacagtgcgcatattattgtaagtgctatagaacatccagctgttattaataaatgtatacagcttaagaaaaggggctgtgatgtggattatattaaaactgataaaaatgggattattaataccgaagatcttatatcgaaaatacgtgatgatacaaagcttatatcagtaatgcttgtgaataatgaaataggaacaatacagccggtaaaaaatgtatgtaatatagcggcggaatatgcaatacctgttcatacggatgcggtagctgcatatggacatatacctgttaatgtaaaggagcttggggtagattatcttagcgtaagtgcacataaaataggaggagcgaagggcacaggctttttatatgcaaaagcagcaaatataaatccatatatatgtggaggagggcaggagaaaggaaaacgctcaggtactgagaatgttgcaggcattatgggacttgcaaaagcagcagaaattgcacaggagaaacttgacagcagaatagaggaagaaaatataacaaaaaactatataactaacaggattttaagggaaataaaaggctcatcgcttaatggagactacaaaaaacgcatttcaggtaatatgaattttgcatttacaggcataaatggaggtgaacttgtaataatgcttgataaaaatggaatatgcgtatcagctggttcagcatgtcatggtaattcgggtggaccatctcacgtactaaaagctataggacttgatgatgaagcagcacagtcgtcaatacgtctgacacttggcaggggacttacaaaaaaagagtgtgattattgtgttgaatgtataaaaagagcagtgcaggaactaagaagcaatgcggtatgatggagcagtacagaaagataaatatgggataatagagaataagcagagaacaaatagagagtaagcaggggttatcacgatgaatgatcagatatgatatcccctgtattctgtctgctgagctgtaaacatagaattatagccttatgaattcaggttggcgttttttaaatatagtataatatttgaatcctgcatttgtaagaatgtcgtaaagaacgtcaaatctgtatgcaatatgttctgtcttatgggcatcagatcctgtggtgattatttcacccccaagttcgtggtatctttttattatatccggacagggattaggattcttaagtccatatttaagtccggatgtgttgatctctatgcctttacccttttctataagcatacgaagtattgtatctatgtaatctgagtaatctttccagttatatgccgtatctttcccaggagcataacggactatatagtcaagatgtccatatacatcaaagttgctgcacaccttaagagagtcaatgattccctcatagtatgttgatatgccctcttttacagatatagtctgccagaactcatcatagtatggatcatttccatatacaagatgggatgagccgatgataaaatcaagaacagagtctttatcatattcgtttacacgtccggcaactgatggcatgagtccttgttccacgccggtactaatatctataatatgagaatatttttccttaagactggttatagtatctacgtagggcttgaaatcaagcataaacataacctcaccattttcaggtgggtaatcaaagtcgttgtggtcagtaaaacatattgattttaatccgagttttacagcctgtctgactacattttcaggtggattgtctgaatcagatgaaaaggaagtatgcagatgatagtcacaaagtctgttattataattgcttaaacacataataatcctcatttccacgcatttgtactcatgattgtgctgtatgcgttgttattgaatttataatcgtttattaaatcaatatagcatagtgatatatacttgctatactgttttaataaatgtttttaataaaatacattgtgttaattagcatgtttgctaatatgtgctttttatatacacagtaataaaatgctttttcggttaaacctcttgaaaatatttcttttgattgttattatgtaaacgtaattttacattctttacataaaatgcacattaattttattaagcaattaagatttataaggattgcatgaaatataatatgtgcaggacaggagaaaaaagtggatattgagttagttggcaatttgtttatgtttgcaggcggcataggtatgtttctttatggaatgaacattatggccgatggtatgcagaagtcagctggaagtaagatgaaacagcttattgggtatctgaccagaaacagattactggcggttctggtaggagcatttataactgcgattattcagagtagtggtgctactacagtcatggttgtaggttttgttaatgcaggacttatgacacttgtccaggcagtaggagttataatgggtgctaatataggtacaaccattacagcatggattgtttcgcttggacagttaggtgatgcagttaaagtgttaaagccagagttttatgcacctttgcttgtaggaataggtgctattcttgttttatttagtaaaaaaccaaagaagaaaatgttaggggaaattatagttggtataggtcttttattcttaggcttaagctttatgtcacaatctatatcaccatatacagatgcacctatattttcaaaggcatttgaggttgtaggaagtaatcctttgctgggtatacttataggtattattgttacagcacttttacagagttcatctgcctctgtgggtatattacagacacttgccattaatggtgttgttacaactaatgcagcagtatttataacgttaggacagaatatcggttcatgcgtgactgcgattatatctagtgcaggtacaacacgaaatgcaaaaagagcagcatgtatgcatcttctgtttaatattgcaggagctgtaatatttggaacagcagcatttatattattcattctaagaccttcacttgcagtacataatataacaagtgttgagatttcgttgttccatacatttttcaatattatatgtacaacaatcatgatgccatttggcgggctgcttgttaagttatcaggtatgataataagagaaaaatcacaggatgaagaaaatgccacacttgaggcaagcgacagctatgcggctgagctttcaagacattttgataatagaatattagaacagccatctgttgcagttaacagggcacttagtgaagttgtcatcatgggaaatcttgctcttgataacataaagtattcagctaaggcagttattaacaatgaccaggatatgatagataaggttatagaaacagaacataaggttgatctgtatgagaagtatcttacagagtacctgataaaggtaaacaatctgtcgataacagaagaacagcatcttatgattaacaatctgtttcatgctatcatagatatagaaagagtgtctgatcatgctgagaatatgtcagatctggcaaagtataaaatagagaatggcatcacgttttcacagcatgccatggaagaacttaaagcactttatgagaaggtggttgtcagcttctcagaggcagtaaaggcaagagaaaaactaagccgtatagcagcagagaatgtatgcaggatagaagacgaagtagatgccatggaagaagaactgcggaataagcatattgaaagactctcgtcaggcttgtgcaagccatctaatggtgtcatattccttgatacactttctaactttgaaagaatgtcagatcatgctaataatcttgctgattgtgtgcttgaagaacttgaacagaaaaacagataaaaacattttatagaatattttgtaaaaaatagtaatttacacttgatattttaaattagtttatgtagaatagctttagttgattttttattaacaatctttatattaggaggatttatttttatgtcagtaaaagttgcgattaatggttttggacgtatcggtagacttgcattcagacagatgtttggtgcagagggttatgaggttgttgctatcaatgatttaacaagccctaagatgttagctcatcttttaaagtatgattcatcacagggaagatatgttaattttggtgaagaagatcaggtaacagctgatgatgaagctggtacaatcacagtaaagggtaagacaatcaagatctacaaggagccagatgctaacaactgtccttggggtgaacttgatgttgacgtagttcttgagtgctcaggattctatacatctaaggcaaaggctcaggctcatatcaatgcaggtgctaagaaggtagttatctcagctccagctggtaacgatcttaagacaatcgtttacaatgttaaccatgaaacacttacagcagaggataatatcatttcagctgcttcttgtacaacaaactgcttagctcctatggctaaggctcttaatgattgtgctacaatcgaatctggtattatgtgtacaatccatgcttacacaggtgatcagatgattcttgatggaccacagagaaagggtgacttaagaagatctagagcaggtgcttgcaacatcgttcctaactcaacaggtgctgctaaggctatcggtcttgttatcccagaacttaacggaaagcttatcggagctgcacagagagttcctacacctacaggttctacaacaatccttaacgctgttgtagctaagaaggttactgttgatgaagttaacgctgctatgaaggctgctgcaacagaaagctttggttacaatgaagaacttatcgtatctagtgatatcgttggtatgagatttggttcattattcgatgctacacagacaatggttaacgaacttccaaatggtggatgccaggtacaggttgtttcttggtatgataatgaaaactcatatacaagccagatggttagaacaattaagtactttgctgaattaagcaagtaattaaaggttgaaatacctataaggttgattatgtttaactagttaataataccggagatgagaattcattctccggtattttaataagtgtgttgtgtaaaaagtattaatgtatatttctgcttatagaggcagatgatatataagtacttttgcatagaatatacattttataattatagtattataaaaatattatggaggatttgattatgcttaataagaagtcaatagatgacatcaatgttaatggcaagagagtattatgcagatgcgattttaatgtacctttagatggtgacagaataacagacgaaacacgtcttgttgctgcacttccaactatcaagaagttaatagctgatggtggaaaggttatcctttgctcacatcttggaaagccaaagggagttgacaagactttctctttagcacctgtagctaagagactttcagagcttcttggacaggatgttaagtttgcagcagatgatacagttgttggtgacaatgccagagcagctgttgcaactatgaacaacggtgatgttattcttcttgaaaatacacgtttcagagcagaagagacaaagaatggtgaagaattctctaaggatcttgcatcaatcgcagatgtattcgttaatgatgcatttggtacagctcatagagcacattgctctaacgtaggtgttacaaagtatgttgacacagctgtagttggatatcttatgcagaaggaaattgatttccttggaaatgctgttaacaatccagtaagacctttcgtagccatccttggtggatcaaaggtttcatcaaagatttcagttatcaataaccttcttgataaggttgatactcttattatcggtggtggtatgtcatatacattccagaaggctcacggcggcaacgttggacagtcattagttgaagatgattatcttgactatgctaaggaaatgatggcaaaggctgaagctaagggtgttaagatgcttattcctattgatacagtagtaacaaaggaattcaagaacgatactcctttccgtgtagttgaagctggatgccaggaagatgatgatatgggtatggatattggaccaaagacatgcgaactttacaaggatgctcttaaggatgccaagacagtagtatggaatggacctatgggtgtatttgaattccctaactttgctaagggaactatcgcagtagcagaagagttagcacagcttacagatgctactacaattattggtggtggcgattcagcagctgctgttaataaccttggctttggcgataagatgacacatatttctacaggtggcggtgcatcacttgaattccttgaaggcaaggaacttccaggtgttgttgcagctaacgataagtaatgtgtttactgacataaacatatagcagaatggttatatcatataatcgtgctgcactattaggcaaaaagggactgtgtatattatatatgcagtccctttttgtgcaaaaatagacataattttggctacagcttaatacaatatatgatgtagtcacgataatggaatataaatattgtatttatttcaaatattcacattattagtggctttttgtaaatttgtatgatataattcatatatcttaataagcattcttaataatttttatatatttgttatgaatgtattatagttactgtgcagagttgaagaaagagtatattgtgtattagatgtaagaatacggtaaagggtgagtactcatcttattattaatttaagatataaccctgcgttaaacagtaacatattgtatggaggcgtggttgtaatatgagaaagaagatagtagcaggaaactggaagatgaatatgactcctaaagaagcagtcggacttgtaaataagcttcgtgataaggtggctggaagtgatgtagaggttgtattttgtgttccagcgatagatataatacctgttgttgaggcagttaaggatacagatattaaagttggtgcagagaacatgcattatgaagaaaaaggtgcatttactggggagatatcacctggaatgttagttgattcaggagtatcatatgtgatattagggcattcagaaagaagacagtacttcggcgaggatgatgattgtatcaacagaaaggtaagaaaggctatagaatatggtattacacctattatctgttgtggagagactatccagcaaagagaagagggtatcacgttagattttataaaaaagcagattaatgcagcatttacacaggtttcgcctgatgatgcagctgattgtgttattgcctatgagccgatatgggctattggtacaggcagggttgcaacatcaaagcaggcacaggaagtatgtgaggctataagatgtaacataagagagctatatggtgacgatgtagctgctaaggtgagaatactttatggcggctcagtgaatgcttctaatgctaaagagctttttgaacaaccagatatagatggtggtcttgttggtggagcaagccttaaaccggatttctgtgatatagttaaatacgagggagcataatatctatacatattgtagttggtcagtatgattaacttgttaaataagcggcttgttaataagcaacttgttaaaaatggttttgaaaaaattgcaaaaaagcttttttgggagcaatcataagatatagcagtttgcggatgtcttgtggttgttctcttttttgattagtaaaacattaattgcatatttaaaataattatgctatcatactacaggtgaaataagatattgatattagattcgtatattgggcagctttgctacatatatggggtatcaacgattccagttcatgtagtatatgataccggtatacgttagaatggaggattaatatgagtaaaaaaccagttgtattaatggtattagatggttatggtttaagtgacaaaacagagggcaatgctatagctatggcagatactcctgttatggataagctgatgaaagaatatccttttgttaagggtaatgcttctggcagttatgtaggtcttcctgatggacagatgggtaactcagaggtaggacatatgaatataggtgctggtagaataatatatcaggatcttacaagaataacaaaggcaattgcagatggcgatttctttaagaatgaagaacttcttgcagctatggagaattgtaagaagaacaattcagatcttcatctttttggtcttttatcaagtggtggtgttcatagtcatatatcacatgtatatggacttttagagatggctaagaagaatggtgtatctaatgtttatgtacatgcattccttgatggaagagatactccaccagcatctggtaaagatttcgtggcacagcttgaagaaaagatggcagaaatcggagttggtaaggtagcttctttagcaggaagatactatgctatggatagagataataactgggacagagttgagcaggcttaccgttcacttacaacaggtgagggaaagcaggctgaaagcgccgtagcagctatggaagcttcatatgcagagaatgttacagatgagtttgttgttcctacagttattacagagaatggaaagcctttatcagttgtaaaggagaatgactcagttatcttctttaacttcagacctgacagagcaagagagatgacaagagcattctgtgatgataaattcacaggctttgaaagaacatatattccaactacattcgtatgctttaaggactatgatgagactattcctaacaagcttattgcctttaaaaaggaagagattaagaatacatttggagaattccttgcggcaaatggaaagaagcagcttcgtcttgctgaaacagagaagtatgcacatgtaacattcttctttaatggtggtgttgaagaccctaacgtggatgagttcagacttcttgttaattcacctaaggatgttcctacttatgatcttaagccagagatgagtgcgccagaggttggtatggatcttgtagaggctattaagtctgataaatacgatgttatagtaatcaactttgccaaccctgatatggttggacatacaggagttattccagcagctgttaaggcagttgaaaaggtggatgagcttgttggaaaggcggtacaggctgttaaagatgttgatggtgtgttatttatctgtgcagatcatggtaatgctgagaagatgatagattatgaaacaggtgctccacatacagcacatacaactaatccagtaccttttatccttgtgaattatgatgattcatatacacttagagatggtggaagcttatgcgatatagcacctactcttatccagattatgggtctgaatcagccagcagaaatgacaggtaagtcacttcttattaaaaaataatgatatcagttaaatattagttgcacatttattatttatttggtattatatgattattgtgatttttgcaatttaacaggaggtttgatatatgtttggcatgtcggtggctgatacaataagagtagtcttaatggctatatttatattagtatgtatatgtttaacagtggtagttcttatgcaggaaagcaagcagaatggtctttcaggtgcgatcagtggtgcagcagacacatactggggcaagaacaagggtcgttcaatggaaggaaagcttgtaacatttacaaaaatacttgcagtattatttgttattattgctatcattttaaatattaatttctaatttaagtgtttacatgaaacgctcttaagatataatatatcttaagagcgtttttgtataatcgtagttaatatgataattaaataaagctggtaaaatataatacggaatagaggtggataacaatgaagacagaaattttcaaggaaagaaagaagaatatagcagatcttatactgaataatgaattatatgttcctatgaaaaccaaagagatagcaatacttcttaacgttcctaaagataaaagattcgaactacaggaggtgcttgatgcactagttgctgaaggaacgattggggtcagtaaaaagggaaagtatatgaagcctgacaatgttgcacttattggagtgtttgaaagtacaagcaagggctttggctttgtatctgtagaaggacaggaaaaagatatatttataaaagcaagtgatacaaagaatgcattttaccatgataaagtcaaagttgttgtaacccttccccaaaaaggcgatagaagagcagaaggaaaaattatagagattgttgaccatgaggttaaaactctcgttggaacatatcagaagaataagaatttcggattcgttgttcctgataaccagaagataagctgtgatatattcgtatcaaaggagcatgagcagggtgctgttacaggaagcaaggtagttgtaaagttaactgattatggtacacatactaagaatcctgagggaaggattacagaggttataggacatatagatgatccagggacagatataatgtcgatagtcaaggcatatgacctgccggaggagtttccagacggcgttaaaaagcagctaaagagcatacctgacgaagtggacgaaaaggataaggcaggaagaacggacctcagggatgttgtcatggttactatagatggagaggattctaaggatcttgatgatgctgtatcattgacaaaagatggggatatgtatcatctgggtgtccacatagcagatgtgagccattatgtaacagagaacagtgcactggataaagaggcgcttaaacgtggaacaagcgtatatcttgtggacagggttattcctatgattcctcaccagttgtctaatggtatatgttcactaaacgaaggctgtgacagactggcactaagctgtcttatggatatagattccaaaggtgctgtagtaggtcatagaatatgtgagtcagtcattaatgttaacagaagaatgacatatacatcagttaagaagatacttgaggataatgatgttaacgaaacagaaaaatatagagagcttgtacctatgtttaagcttatggaggaggcagctgcacttcttagaaagaaaagattcgctcgtggttcaatagattttgattttccagaatcaaagatagtgcttgacgataaagggcatcctataaagatagagccatatgatagaaatgtagcaacaaagcttatagaggattttatgcttattgctaatgaaacagtagcagaggattacttctggcaggaggttccatttctttacaggacacatgagaatcctgatcctgagaagatacttaagctttcaacattcattaacaatttcggctattcaatgcatataacagatgagatacatcctaaagaacttcagaagctgcttgaaaaaatagcaggttcagatgaagagaatcttataagcagactcactctgcgttcaatgaaaaaggctaagtatacaccagagtgtgtgggtcattttgggctggcagccagatattactgccattttacatcgcctataagacgttatccggatcttcagatacaccgtatcataaaggaatgtctgcatggtggtatgagtgaaaaaagaaaagaacattatgataagatacttccagacgtggcagaacagacaagcgcaactgagagaagggcagatgaagcagaaagagatacagacaagcttaaaatggttgagtatatggaacagtttaagggagagaaattctcaggtgtcatatcaggagtgacgaactggggcatatatgtagaactgccgaatacaatagaaggaatggtatctgtaaatgatatgccaggtttctatatatttgatgagaaccattatgagatgataaatgaaacaacacacaagacatataagctgggacagaaggttgatgttgtgactatagggactaacaagatagcaaggacaatcgactttatgtttgcagaggattatgatagcagatataattagaaagtgttatcagcacctgcattattgtggggcttatcatgctttgattataaggaggtataaaatggcaaaggatagtgccagtggcaacagacttattgctaacaataaaaaggcatattatgattattttatagaagataagatagaggctggtatggagctttgtggaactgaggttaagtccataagacagggcaaatgttctatcaaagaatcatacatacagataatcaatggtgaagtatttgcgattaatatgaatatcacaccatatgagaaaggcaatatatttaacaaagacccgctgcgtcctaaaaagcttcttcttcacagaagtgagataaacaagcttgcagggcagttatctacaaagggttatacacttgttccgcttcaggtatacttaaagtacggcaaggttaagatgcagataggtcttgcaaaaggtaaaaagaactatgacaagagggattctattgccaagaaagaccagcaaagagaggcggctaaggactttaagattagaaatctggggtaagcttagaaggtgttaacatagagcttatattgaaattgttaaaatataaaataaaaataacggcattgtatatcgttttttaaactatacaatgccgttattttgttttagtggacctgaggggagtcgaacccctgtccaaaagcccatccgctgttcttctactatcatagtcagttatttgacattcccttatgcatacgggaactaacacccttatgcacttagtagcttcataatacgtccataaccgcaaagcttaagctatgtcgtttctcacatgttcgaagcctgggtcctaaagtgtgagtgccctaggtcagactgctgcaacttaggcagcgtatgctaaattatcttcagcgtttatatttaagtttgccatttaacgcattgcatacggatagcttcaccagtttcaaaacccctgtcgaaacctttacaagcccatgtattaaatagtagcctttaatgaccatataatatataacattatatggttattaaagtcaatatattcttataaataaataattaatttttttataaagttaaaatataatgatgtaatgtcaaaagtaaattagtaatagctatttaagtaaaaatgatttagtggtaaaataacattactaaaattcttgcaatacacaaaaataaagagtgacattcaagaatattatgaatgaaatgtgcgaaaatgcagcgatgcagaatggaggaatattataatatgtcagcagataaaactaacgtaatgagaattcttgatcagaagaagattaaatataaagtacacgaatataaagattcgggtgcagtaagtggtgttgatgtggcagcagcacttggacaggatcctaagagagcttttaaaacactggtgaccataggtaaaagtggtaaccactatgtttttatggttccagttgcagaggaacttgaccttaagaaagcagctaaaagtgtaggtgaaaagaatatcgagatgataaagtcaaaggaactgcttccgcttaccggctatatccatggaggatgttcaccagttggtatgaagaagttttttaagactatgatagataagagtgttatggatattgatgatactatattttttagtgctggtaagataggttttcaggttgaaactatgtatgatgagcttaagaaagtcataagagttgaagaggcggatattgtcgttgattaaaataaagccatgtgtgttttataaaaggcataaagcgatgcttggcatcagataaatcttacatgtaaaagcaagagaggaggcgggtatatgacagaagaaaaggataaaagaaagtttatggtaggaggttatgaatttacttccaaagaggatgcacagatagcaaaggacgagctgaatgctattaaatatgtatcgtcgaagacaaacagcaaggatcccaagcaggtgtacagtctatataacaagattatagaaagaaagcttttttctacacagataggtatgaattaccttaaatcattacagacatttttatataaaagtagtgagataccgaatgataagattcagcctattcctattaatactgacacacaggatgagattaatataagaagggaacgtagtgaattcaagagtgaattaagagatttgtcgataaaggttgccagatataagaataattttacaagagtcatgataataaatgtgattcttgtaatcatcatagtggcaatgtttattatactaaatacaagctctaatccaaatattattaattacgaggtaaacctgcagaataagtatgcacaatggcaggagcagcttcagtcacaggaacagtcgcttaacgcaagggaaaatgaacttaataacagaaaataaaattcatttataaacacattttattaacagtaagaacacattttgaacatatttattatctatcatatattgtataaagagtgtaaatgtagcagatacaatgaataatatcaatgttacaggaaatatgacgaattctacacataggaaaagattggagataattgtatggatagtttgaaagttttaatggtcgatgatgaaagcaggatgagaaagcttgtaagtgactttcttacaaggaaaggatatcaggttatagaagctggtgatggtgaagaggctattgataagttttatgaggataagaatatatcgcttgttatacttgatgttatgatgcctaagatgaatgggtgggatacatgcagacagatacgtaagaattcaaatgtacctatcattatgcttacggcaaagagcgatgaggcaagtgagcttaatggctttgactgtggggctgatgaatatatttccaaaccatttagtcctaagattcttactgccagagttgatgcacttataagaaggtcatatagcatagacagcagtgaaatgatagatgtaggaggcatagttatcaataaggctgcacatatagttaagattaatgatgaagagatagaattaagctttaaagagtttgagcttcttacttattttgtggataataaagggattgcattatccagggaaaagattcttaacaatgtatggaattatgattatttcggtgatgctagaacgattgatacgcatgtcaagaagttaagaaaaaaacttggcgataaaggtgactatataaagactatatggggcatgggctataagtttgaagtagaggattgataatgggaaaacattcgattaggtttaagattacagttttgtttgcaggtataatatgtatacttatagttatgctgttgctttttaatataactttttctgaaaagttttatatgcaggataagcaggaagcgatgctgaatgcttatgaaagtatagatgatgcgtgtaaccagtatagctcaggttctatatctgacacagaccttagaaataatcttgaacaggtgtctacatctaaaggtatgtcaataataatagtaaatagtgactggacaactttttatgtaagtactcatggtgatgagatgatgcttgaaagattaaaaaagagcattttcaataatgatatatttcaagggatgccggataagtcaggatcaatgcaggagcagccagatgaaaacaggaacggtgacataaatgctggtaagaaaacacttcctgaaaagattatagatatgtcgggcaatggtgccagtgaaacaagagatattttatatcagagcgataaatatacagtgcagaaggtatatgacagccgtctgcttgatgattatatagaattatggggaacacttgataatggtaattttatccttataaggacacctatacagggtataaaggataatgtccatatttcaaatacatttataacttatataggtattgtaacgcttattataggaattattgcagcatttgtattatcttcatatatatcaaaacctattaagcagctgtctaatatagctgaacgtatgtcagagcttgattttgatattaagtatgatggaaaagataaaggtgagatagggcttcttggtaaaagcatgaataatatgtcacagaagcttgaagagaatatatcgcagcttaagacggcgaatcttgaactgcaaagggatatagataagaaggagaaacttgagaagatgaggacagattttctttctaatgtttcccatgagttaaaaacaccaattgcacttatacaaggatatgcggagggattaaaggaaggaataactgatgatcctgaaagtatggacttttattgtagtgttattatggatgaagcagccaagatgaataatatggtaaagagattgcttacacttaatcagatagagtttggcgaagatgaacttgttatggagagattcgatattaatgagcttgtaaagtcggtagtcaatgctaatgagttaagggcaacgcagaaaaacttaagtattacatatgatattttagatacacctttgtatgtatgggctgatgagtataaggttgaagaagttgttactaattatctgtctaatgctatcaatcattgctgcaatgaaaatataataaagataaaagtaggacatatagataaagataatgtaagagtgtcagtgtttaacacgggaaataatataccagaggctgacatagagcatatatgggaaaagttttataaagttgataaagcaagaacgagagaatatggtggcaatggtataggactttctatagtaaaggctatagtcgaatctatgggtaagacttgcggagtcaataatctttctgatggtgttgagttctggtttgaccttgactgtaaattgtgatacaattctaatagttataaggttgaatggagattgttatattatgaagagattagctttggcagcgttatgcatggttggtgtgtttgcattgtcaggttgcggtgataatgttacattaacagaagagcagaatgatatgatagccgaatatgtggcaggttcattacttaaacattcatatgataatgaatggaaatatactaagttaaacagttctaatactgggcatacaagcagtttgggcaatgccagttctacggctgctggtatgacgacagcaactaaggcaggaacagttacagcaacaactgctgccgcagatgtaaacacaacagcatcaagcctttcacaggcacttggtttaagtggtgttgaagttaagtataaggctgtttctataggtgaaagatatcctacagaggcatatgcagtatgtgttccagcagatagtggatgtaaggtagttgcagttgaattcactattaagaatacagggtcagcagcagtaacagcaacgactaaatcatcgtcagttactatgaagcttaacataggcggtggaacatataaccagtacaagtctatgcttaaggatgatatatgtggacttgacggagtgagcattaagccaggtgatagttatacagcagcagcgatattccaggttccagcagaatctgcggttaagtcttctgatatgaagatggaagttctgtcaggttctaagacagtggaaacaatcacactgcagtagtgatggcaccttaaaggatatggataaaattatagaattattaattataaattacattaaaagtactccctttaagaaagacaagtgtaatataagacttgtctttcttaaagggagtactttttgttagaattcatgcaaggatgatatttaagctgttctttataagcatttttctgggatatttattttaaaatgtattcttttttgtacatagctgcctcttcatcagtaagtatgtgggcgaatgaggctcttttatcaggacaatacccaggaccatgtccattatattcagcataatatacagtatcatgagcttctggtttgttccagtcatgaaagccatcttttacaacctggtcggaatattcacagtttaacaatacgaccttagcgtgaattctccatggacggctaaggtagcaggtctgtggtggacagtttcctgtaaaagtgcagctgttaaatacatatccatatttctggttttcatatgttgatggtgcggtataataactgtttattgtttcgttgcggtttaaggcatacagagtgcagtttttaaaataagccgttgcacttccaaatataaagtctatttctccacatatatagcagtcttcatataactgctttgtaggtattcttggagcgaattcagttggaccgataaaacctcctggctctttttctttaaatggaagaggaccggtaaaaagtgtatcctgatggcctaacatacggcaatttttaaatgtaagattatcaccttctgcatatactgctattgcctgtcctacctttttgccaaaacctgctgagttttcaaaggtaagattaaatgcactgaaattgttggcattgacaaagaaagtataagacctgaaggtacctcttttgctgccattttccatagtcataagagcataatatccctctgtgataatagtgtgttcgctggactcaccaataagagttatattgtctttttttatttcaacacgttctttatagataccatttttaataaaaatagtttcgccaccacatgcaggattgatagaatccacagcagcctgaacggagttgaagtcgccagtgttgtctttagatacagtaatcataataacaaattccccttttatataaaagtatttttgaacaccacatgctttgtaaaatgctgtctttaagctacaaccgcatctggattttgatatataatatcacattaaacactattatagcatttttttttaaacttaaaatgcttttatagacaattattcgtaaaaattgtatacttatcgggaaattattaggaagtggaagagattatgataaaaatagttgaagatataaaagatgttgatatatatatgtcacttagagataaggttgagtgggtaaagcttacgagaagccaggcacaggcagctttagataacagtgttaaagtatttacagtgtttgatgatgacatgcctataggaatgggaagagttgttggagataaggcggttatcagttatatccaggatcttattataatacccgagtaccagggtaagcatataggaagtatgcttattgaacatataatttcatatgtaaagtcgcttacatatgataactcaaggatgatgctatgtcttatgtgtgcaaaaggaagagagcagttttataaaaaacataatttcatagcacgacctactgatgcacttggtccaggaatgatacagtatatatatgctggggaagagtgtaagtaaggttatcagatgagctgcgatattacaactctagtagatcgttttcgaaataatgtactagatgtgcggtttatgctcattgttaacctagaaaataaaatagttgacaatatgagaattaaaatgtaaactgataaaatgatgaatttattaatacaggcactatgtgcagaatggagacaaaagtgaaagagaaaaagtttacagtttatcagttgtgttttatggcattaatggcagcagttacatgcattttagcacctatgtctataccgataggtcctattcctatatcattaactaatcttgtagtttattttacagtgtatgttataggtactaaggcaggtgtgtgcagttattgcatatatgttcttcttggaatagttggacttcctgttttttcaggttatgtgggtggtccggctaagatagcaggtccaacaggtggatatatagttggatttgtgcttatggctcttataggtggattttttatagaaaagtttaaaagaaattttgctttgacattagttggatgggtattaggaacatttgttgactattgccttggaacagtatggttcgtatatgttgcacattgctcattgttatatgcacttaaggtttgtgtatatccttttatagtatttgatcttggaaagatagttatagctacattgttaggccatgctgtaagatatgctcttgttaaggcaggattattaaacaatattaaggctgatgcgaaggcagcataaaaacagtttatttagtgaaaataattattttgaataacagaagtgaataacagatagaataaggcttgttgggtgttttaagaataaggaaccaagatgttacttttatatattcttaaaataccaaacaagccttaattgtctgttaattgtctgttgtttaactattattcaactgatattcagctaaacagcggtattttatgcgagtaatgtcttaacatattcagcaatagcctcatccttgcagttagcaaagaaaagctccttaaactgcttacccgcaacagcacccttaacgaggtcctggtcaagacctttaagaacacttataagatcctggttaagagtaacctttcttacttcatcaagaatctttttatttctctgttctggaacaactctttccttaggataaccaccacctggttcgccttcgaataacttttcaaatatatatgtaagatttaattcagcaccccatccaaatcctttagcgaaaggaagtgcgatagcattgccatcgttaatctgcatgaacatataagcatctgaaggatcaacaacatgtccgcaaagaacgttagggaatgagttaagtgcaagcatagcaccttcacctgttccgcatcctgttactacgaagtcacatgcaccagagttaagaagtatagcagctaatataccattctgtacatatgtaagctgttcattatcatctgctgaatacataccatagttatcaactgtatgtcccttgctttcagccaccttcttaagattagcatagatcatttcattcttggcagcctggctgttttcattgattaaagcgattctcattataaaaacctcatctttcctgataatatattgattgatgtcaatactataatgcataaatgtgtgagtaaaaacatgctgttattagcattatagtggttaacaaaaatcataataactatacgaaaataaataatatttgtcaaattgataaaatataaaaagtatggtaaaatccggattgctataagaatcaaaggtaagatgaggagaaatgtaatggaacataataaagatatacaggcagcttttatggatgcactaaatgcacttaaggaatacgcaaaggtaaatggtaatatagtaggtaaagaagatgttgcaggcttctttaaagacatgagtcttgatgataataaatattcaatgataaccggatatctgatggctaatggaataacaataaagggagaagatggcactgataatgagtttttacatatgcttgagagtactgtagacgattcggtaaaaaacgatgagaagggaattgcactggagaatgaatataagtccacagaggatgatgcatttacagaaaaacaggttacagacaaagatggtcttattactaaaataaatatatcagaggaagaggtaaagagtctgccagaaaaagaggcggctatggctgcccagatgatagctgataatatggattattcagaggatgatatatacatcgaaagatataaaaaagaacttgaagctatccagccggtatcagatacaacaagagcgtatctgcttgtcaatatagtggaggataatgataaagagtcacttaagatattatcagaatcatatcttgaaaagatactggaatgggttgaaccatatagatgcagaggtgttcttgctgcagatcttgtacaggagagtaacctttcaatgatggcttatataggacagaagctatggcttaataactatgaatggaaggacaggataaaagagggaagtacaagcgatatattagaagtactgaaagctatggataaggaggtcagatatcaggcagaagagagtatgaagatgctgatagatgaacagatggacagcaataagatatctggaaaggtgcttaataaagtcaattatgtgaatgactgggctgtaagacttagggaagaactgggaaggaagccaactgttaaagaagttgcagagcgtatgggcgtttcagaggatgttgtaagtgaagccttatcattgtcagctgataagatagaagatataaaggttcagaatgaaaagtaaaaaaggctgaaaaaatatagaataataaaaaaactttacataattaaaaaagttttacataatatattgtgtagaaacgatttatgtagtagaatgtagacagtaaagagagcaggaaagacctgctggctgaatcagttaaatataatatatttcctggggcgtgcgagaacctcacttattttgatcctacatttcatcgacgggattcctatatctccattctaatgtcgggcctcctaagagtggatggcagcggtctggatgcggttacccacctagcattgctaggagtcgaaaacgtggggaacggcgctttgggattactgatttgacattataagttgtaagtatctttatataagtatttatataaagaatcttacagcttttttattttctgtaatatataagagtacaagagcatatatataatgtcaggagcagaatttgttctttatatattaacaatagttaatgaaaggtatagcttctggtatggttaagacggttgttatcagaaaacggaatataataatgcatggcataataatacttgtactagctgttgcatccattgtcctaaggacatatctgacagataacagccgcaatcaggattatataacatatgcacaggctgcaaagatgatatcatatgcacagatagatgattgtgatgcgttttcccatgatatggaatggtacaagacttatatggagtatgtcaacataaatggatacatgaacgctgcaaatcctaacagttatgtcaaatataaagatgtaagtatgctggctcgtagaataaatgcagatattgattgttttaagtctgaggggatagaatcatatatagatatagaaaatgataaccgacctgtaaaaaatgatgtttttataagatgctttcaaaatctctgcaagtattttaagtatggagatgaaatagaacttaaacagatgggtgtgtcaggagtgccatcagataatgtaagtgaagagtggacggtgtgtacaactaaaggcacatatatatatgacggtgttattatacagccatatgtagatacaacgattgaggctcttgtaagacaaaacaggcttttatgtgttgttgataaaatatcagatgatgttaagtacaggaatgtgctgcttaagacttatgaaaatggatatgtaactgtcaatgtatatggaatgattaaaaaatataaagtacataaagtggagggctttattgagaatagtcttgcagatatagatataagtaatgggaagcttaaaggaatagatataaaggatgataagataagcggtaaagtactatcctttaatgacagctatattgaaatagagggttacggaaaagttcctgccgatagtaattttatgatatatgatattacacagggcgataaagtgagtggttatgactctataattgtagggtattctcttgaggattttgttgtggcgcaggggaaaatatgtggcgcggtaaagggaaggaagcttgttcagacaaacataagagtaatgcttaagacgtcaggctataaacagctttttcatgattctgtagaatttgtttctgattcggtcatacatgtttcttatgatgataatgttattgacatcatgcagggagaacatatcgttattgataagaatgatgaaagattcaccacaggaagaataaaattatgtacagatggtggaactatatgtatagaatcagttaagagaggtcagggcagaccggagtacagtggcactatagagcttgcgttatacgagaagggaatagccgttattaatgaacttgatatagaagagtatttaaaatgtgttgttccaagtgagatgccggtatcatacggagtcaatgcccttaagtgccaggcagtatgtgcaagaagctatgcgtatacacagcttgaaaacaattattacggtgagtatggtgcacatgttgatgacagtgtggcgtttcaggtttacaataatacctatagaaatgaagatgctgatacggctgtagatgaaacaaaaggaaaggctgtatattatgctgatgaaatagttaaaacatattattattcaacatcatgtgggtattcgacagatgtatgtgcatgggggagcgatgatagctgttatccaatgtatggttcaacacatataggaagcggtggtgatgatgctgatatgagtgataatgcagagtttgaacgttatatagaggaatcacatgattgtgattatgatagtggtttcccactttatagatggaatacgacaataagtgccaaagatatatccgataatattaattcaaagcttgcatatgcatctggcaggtcatgtgtatatatttacaatgagaacaaagaacttataccaggcagcgtaagcagtgtcggcaatattcaatctattgaagtggttaaaagaggctgtggaggtgttgttaagcttcttaggttaaaaggaagtgaggctgaatgtgtgatttccggagagaatacaataagaactgtgcttggaagcagtggggctgttataaacacactaactggtgatgcacattatgacatactgccaagtgcatttatagtgataaagcctgtatatgctggtgatgataatgttatatcggcatttaaaatatatggtggaggttttggccatggtataggcatgagtcagaatgctgtaagaaaaatgtctgaaacaatgggttatgaagaaatacttaagttcttttataaaggagttgaaataaaaaatgttgctgcctgattatgtaagcagcaacattttttatgcgttttattttctggtggtgattttattcctgccggtaatacggaagggtttaaatattttcttttctataagggtattgaattctgcaccaaagaaaagaatgattatgcatatatacatccagataagcagaagcataaaggttgtaaggcttccgtatgtatatgaatattttaccatataggtaatgtatagagaatatagttcggaaaataaaaaccatccaatactggctataaatgcacctggtatttcttctataatatgttttttcttatttggtataaatgtgtacataactgagaaaaataaagtcagcaaagcaggcactaaaaacagcctgtttgaaaaaattgcatttattactatgaattttccgccaagactggcaagacggttctgaaggaatgcaatcagatgttcaccaaatacgataattaaaaggctggcagctattgacaataaaagtataagtgcgtacagacttgaaaatattctctggataaaccagcttctgttatattcacagttatttatcttgttaagacatctctttatagtcataaatcctttgccggctgaccataaaagaccaattgctgttaaagaaagcaaagcaactgaggatgagctttcaatgtctgtgaatatatttataagcattggatgaaattcctgcggaattatgttctcaagcagatctaaaaggtcagaagaagtaacaggaaaataatgtattatattaataagtgctattatgaacggcataaagctcaacaaaagatagtagcatgtctgcgcagcataagcagttattttatcttcgttgattttctttgctgtttcctgaacggtgaatagtattcttgcaagtttcatatatactcctgtttgtgttttgttatgacattatatgttattttagccaaattatcaataaggtctgtaataacttgcatttacaacggcttttatgtaaaataaataagttaaagataagaaaggtatggttgttgtaatggggattagcgttaaattagaggcttttgagggcccacttgatcttttgctgcatcttatagataaaaacaaagttaatatatatgatattcctattgctgatattactgagcagtatatggaatatgtaagaaagatgcaggaagagaatcttgatattgtaagtgagttccttgtcatggcagcaacattacttgatataaaatgcaggatgctgcttcctaaggaagttgatgaggaaggaaacgaagaagatccaagagcagagcttgtggaacagctgcttgagtataagctgtttaaggctatggcagaggaacttaaaggacagcagcttgatgcaataaaaacttattatagaaaacctgacataccagaagaggttagtggatacacaccgcctgttgatttgaatgaagtggttggggatgtgaatcttattaaactgaatgcaatatttgcagatgttatgaaaagaaaagaagacaaggttgatcctgtaaggagcaagtttggaaagattgaaaaagaagaagttactatgtcagaaaagcttgtggatattaaagcattcatgatggagcataaaagtttcagcttcagggagctccttatgaagggggcatcaaaggtttcggttattgtgacattccttgtagtgcttgagcttatgaaaactggtttcataacagtgaagcaggaaggaacctgcgaagaaatatatatagatgtgactggtaatcctgaaatgattgaagatatatcagaggactaggattatatgtgtaaaaagtgcggaaatggagattgtataatgaacataaaacaaacagagggagctatagaagcaatactttttacgatgggagagtcggtagaagcagaaaagattgcagctgcgatagatcacgatgttgatacaacaatcagaatgattcataatatgatggataattatgaagctgagggaagagggataaaaataatagaacttgatggaagcttccagctgtgcaccaagcaggagtattatgatactcttataaaggtttgcagtcagcctaaaaaatacacattgtcagatgcggcacttgaaacattgtcaataatagcctataagcagccaataactaagatggagattgaaaagataagaggtgttaattctgacagggcagtaaacaagcttgtagagcttgaactggttaaagaagttggacggcttgatgcacctggacgtccaatgctttttggcacaacagaagagtttttaagaacatttggcgtacagtcaatagatgaacttccagttataagtgaggacatgattgaacagtataaagaagaggcagaatatgaggttttaagtgaaataaaatctgaggaagaagatgacgatggccagcttaccttaaatatctgatgtttaaaacagtaacacagacacataaaataaattaaaataaaatggaggtactacaatactatggaaagattaaatgcatggaataagtatgatgaagatatgaaaaaaaaggtttttgattttgctgatgaatacagaagattcatatctttatgtaaaactgaaagagaatgtgtagaagaaggtgtacgtatattaaaggcatctggttataaagaccttaaagacgttatagctgctgatgaaaagcttaaggcaggagataaggtgtatgctgttaatatgaataaagcaattgtagcctttaatataggggaagattcaatagagtcaggcatgaacatattaggagcacatatagactctccaagacttgatattaaacagaatccattatatgaggaaacaggacttgtgcttcttgatacacattattatggtggtatcaagaagtatcagtgggttgcaacacctcttgcacttcatggtgtagttgcacttaaagatggaacaacagttaaagtagttatcggcgaggatatggatgatactgtagtgggcatatcagatcttcttattcatcttgcatcagaacagatggacaagaaggcagctaaggttgtagaaggagaggcacttgatattcttgttggaagtatgccactaaagcaggagagtgctaaaagtgataaagaagactgcaaagatgcagtaaagaagaatatattggcattattaaaagaaaaatatggtatagaagaagaggactttatgtcagccgagttagaggcagttccagcaggtccagccagagattatggtatagacagaagtatgataataggttatggacatgatgacagagtgtgtgcatatccatctcttattgcacttgttaatgctgacatgccaaaaaggactggcgtatgcatacttgtcgataaggaagagataggaagtgttggagcaactggcatgcagtcaagattctttgaaaatatggttgcagaggttatggacagatgtggtgaatatagcgagcttaagttaagaagagctcttgcgaactcttacatgctttcatcagatgtaagtgccgcatatgaccctaattatgcatcagtttttgaaaagaaaaatgctgcatattttggtaaaggcatggtgtttaataaatacacaggggcaagaggaaagagtggctctaatgatgcttcagcagagtttgttggaaagttaagaaaagtcatggatgatgcggatgttgcattccagaccgcagagcttggaaaagttgatattggtggcggcggaacaatagcatatattcttgctaaccttgatatgaatgttatagatagtggtattgcggtacagaatatgcatgctccatatgaagtaataagtaaggcagacctttatgaaacattaaagggatatgaagcatttcttaagaatgcataagaaaattctaagcttgtaaaatataaaaaaatagatgtatattttaaagaaaggtattgtacagatgaagtggaacagatattctattaagacaacaacagcagctattgattttatcagcagtgcacttgcagatataggaatagagggaattgagatacaggataatgtgcagcttacacaggaagaggctaagactatgttcgttgattttattcctgaacttccacctgatgatggaactgcagttgttaatttctatatagattcagatgaagatgacggcactcttgtaaagaaagcagaacaggagcttgaagatttaagaatgtttgttgatataggtgaaggaactatcacaagctcagaaaccgaagataaggactggattaataactggaaacagtactggcatacatttactattggcaatctatatattaagcctacatgggaagctgttacagacgatatgaagggtcacccggttcttagtattgatccgggtactgcttttggtacaggttcacatgaaacaacaagaatggttataaaacagcttgaaaagtatgttaagcctggagataatgttcttgatgtaggatgtggaagcggaatattatcggtagtagcactaaaatatggtgcagcacatgcttttggaacagaccttgatcctaatgctataattgcatcacatgagaattcagaacagaataatattaaaccagaacagtttgaagttatagaaggtaatattatagatgataagtcggttaaggatgcctgtggctatgaatgttatgatatagtatgtgcaaacattcttgctgatgttttggaacccctttcagtaaacatacatgaacatatgaaggagggagcttattttataacctcaggtataattaatactaaagagaatgaagtagtggaaagttttaaaaagaatcctgaacttgaaatagttgagataaaccatgacggtgaatgggttaatgtgactgcgagacgcaggaacaaaactgatatgcgcacaaaacatgcgtagaaatgaggaatattatgtatcatttttttgcagagcatgaaaatatatcagatgattatattgatatacgtggtggagatgtcaatcacattaagaatgttataagacttaaggtgggagatgaggtgcttataagcagtggagagaattatgattatctttgcagtatagagcatataagtgatgatgttgtaacagcaaaaatcattgaaacaagagaaaagatgaatgagcttcctgttaaagtatatctttttcagggacttccaaaggcagacaagatggaacttataatccagaaaatggtcgaacttggggtatatgaaatagttcctgtttctatgaaaagaagtgttgtcaggctggatgaaaaaaaagccagaacgaagactgcacgttggaatgcaatatcagagagtgcagcaaagcagagtaaaagaagcataatacctcatgtatcagaggtgcttagctttaagcaggcattagaaaaggcaaaggagcttgacatgcttttacttccgtatgagtgtgccgaaggtatggcttataccagaatggttgtatctaagattaaaccaggacagtctgtaggaatatttatcggacctgaaggtgggtttgatggagatgagttaaagcttgccagggaagcagaatgtaatataataacacttggaaagcgtatattaagaacagaaacagcagggatgatgctgatgtcagttattatgtataatatggaagaataatattagctattaggaatggagttaacatgcaggcatatcttgataattcagctacaacaaagtgtgcaccacaggttgttgatgtgtgtgtgaaggttatgcaggaggattatggtaatccttcatcaaagcatatgaagggcgttgaagctgaaaattatataaaagatgctaaagagactatagcaaagacattaaaatgtcaggataaagagatactctttacatctggtggaacagagtctaacaatatggcaattataggaactgccatggctaataaaagaaaaggtaaccatgtgattgtgtcgtcagtggaacattcatcggtaaaggagccttttaatttccttgaagagcaagggtttaaggttacttatcttaaggtcgatagtaaagggatagttgatattgaagagcttaagaatgctcttgatgatgaaactatacttgtatctgtcatgtatactaacaatgagataggagcggttgaaccaattgaagaaatcggacatatagttaaaagctacaaccctgatatagtatttcatgtagatgctatccaggcatatggtaagtttaagattatacctaaaaaactaggtatagatcttctttcagtaagcggacataagatacatggacctaaaggcagcggctttttgtatataaaggataagacaagaatcaaacctataatatatggaggcgggcagcagaagggtatgcgttccggaacagaaaatgttcctgccatagctggactttcggcagcagttaagcttatatataatgaaaattttgatgctaagattgacaagttgtatgaactcaaagattattttatatcgcagcttgaacagttagaagaagtacagattaattcattaaagggaagagaaagtgcaccacagattgtaagtgcaagctttaggggcgtgagagcagaagtgctgctgcatgcacttgaagacaggcagatatatgtatcatctggctctgcatgttcgtctaataaaccagggcttagcaatacacttgttgcaataggtcttgataaagacctgttagatagtactataagattcagtttttgttatgatacaacaaaggaagaacttgattatactatagagatacttaaagaattattgccggtattaagaaaatatacaagacattaggaaagggagatgaataatgtacaaagcttttttgataaaatatggagagataggcgtaaagggaaaaaacagatatctttttgaagatgcacttgtaagacagatcagattcgcacttgctaaggtggatggtgactttactgtatcaaaggaaaatggaagaatatatgcaacagctggaagtgaatttgattatgatgaaacagttgaagcgttaaaaacagtatttggaataataggtatatgcccggttgtccagatagaggataatggtttcgatgatcttgcagaacatgttattaggtatatagatgaagcatatccggataagaatataacttttaaggttgatgccagacgtgcaagaaagaattatcctatgaattctatggagattaacatggaaatgggtggaagaatccttgaaccatttccagaaatgaaggttgatgtccataatccgcaggtgcttttgcagattgaaatcagaaagaatattaatatatattcgatagagattccaggaccaggcggtatgcctataggaacagcaggtaaagctatgcttcttctgtctggtggaatagatagtcctgttgcagggtacatgatagcaaaaagaggtgtccagatagaggcaacttattttcatgcaccaccatatacaagtgaacgtgcaaagcagaaggtagttgatcttgccagacttgtgtcaaaatatgcaggtcctattgtacttaatgtagttaactttacagatatccagcttgctatatatgagaagtgtccgcatgatgagcttactataatcatgagaagatacatgatgaagatagcggaagaacttggtaaagaaagcaaatgtatgggacttatcacaggagagagtataggacaggttgccagccagactatgcatagcctgtattgtactaatgaggtatgtactatgcctgtttacagacctgttatcggctttgataagcaggaaatcatagatatatcagaaagaattggaacatacgaaacatctatacagccatttgaagactgctgtacaatatttgtagcaaagcatccggttactaagccaaatcttaatataataaagcagcacgaacataaccttgatgaggttatagaacagcttatgaaaacagctattgaaacaactgaaaaaataatagttaaataaaaacaaaaataaaaaatggatgccacacttatgtgtgacatcctgtttccaatataacttaacattactatcatgtgtgaatatgaattcatgatgaagaaagctatatataccatatcatataaaactgattatacgatataaggctttaatactgcaagtattgtgtcgatatcattctcagcatgaatgttaagatcaattggcttagaaagatcaagactgaagatacccatgatagattttgcatctattacatatcttcctgatacaagatcaaagtctacgtcaaacttagtaatatcgttaacaaatgacttaactttatcgattgagtttaatgaaatctgaactgttttcattgagctacctcccacatagaataattacttatgtattaattataatgtttaaatgggttatgtcaagaataaagtgagtataaaaaatagcacagtatatatgtgcggaaatgaggaaatgttgaaaaaagcagctatacataatcttgggtgtaaagttaactcatatgaagctgaatcaatggagcttatgcttaagaatgcgggatatgagatagtaccatttgatgagaatataattgcggatgtatatattattaatacgtgttcagtaactaatatagcagacagaaaatcacgacagatgcttcataaggcaaagaaaatgaatcctttggcggttgttgttgcagcaggatgctatgtacaggccgacgaggatggcgtaaggagtgatgaagcagtagatattgttcttggaaataatatgaagattaacattgttgatgtgcttgaagaatatttcaaggataacagccgtgatgattatgtgcttgatattaacaataaagaaacaacatatgaagaacttaaaatagataaagtgactgaacatacaagggcatatataaagattcaggatggatgtaaccagttttgctcttattgtataataccatatacaagaggaagaatcaggagccgttctgccatagatatagtagatgaggttaaaagactggctttaaatggatataaggagattgtactgactggtattcatctttcttcttatggaaaggatacaggaaaggaaacgcttcttgatgttataaagcttgtgcatgaggtagacggaattgaacgtattcgtcttggttctcttgagccaagaatagtaacagatgaatttgtaggtgaaataagtaaactatacaagctgtgtccgcatttccatctttcactgcagagtggatgtgataaaacacttaaagcaatgaatagaaaatatacttctaaagaatatcttgatggatgtaatatattgagaaaatattataaaaatccagctataacaacagatgtcatagtaggttttccaggagaaacagatgaagattttgatataacaaaagcatttcttgaaaaagtacatttttatgagatgcatatattcaaatattcaagaagaaaaggtacagttgcggataagatggcggatcaggttgatgacagagttaaaacagtgagaagcaatgagcttatacaacttgaagaaaaaatgtctcttgaatatagaaagctatatgagaaatcctgtatgaatgtgcttatagaagaaaaacagcttgttgatggtaaagaatattatactggatacacaatgaattatatcagagtgcttgtgccagcaaaacagttagaaaacggaaatgaatgtatagtaaataacatatataaggtaaattgccttgggcttgatgcatctggaaaatatatgtatggtgaagtggtatgtgattattgaaatataggctgttaagaaagtaagttcagaaatggcacaaacaattttacataatttataaaaatttaataaaagggtggaaaatgctatgaccagattaagaaagaatgaaaaaggtatgattctggcaattgatatgggcaacactaatattgttataggttgcgtagatgataatggtgtactgtttgaagaaagattatcaacggatttttctaaaacagaattagaatatgcaataggattcaaaactgtattggaattatataatatagattcacatgatataaagggagcaataatgtcatcagttgttcctcagctttctaatattataaagtctgctgtagaaaaaacaataggaatatcgcctttaatagtaggacctggtataaaaacaggacttaatattcttatggatcagccaagacaggttggtagtgaccagatagtagatgcagtggctgcacttaaggtatatggtgcccctgctattattatagatatgggaacggctacgactatgagtgtggttgatgaaaatgagaattatataggcggcgtaatactcccaggtataagagtgtctgtagattctttagtttcaagaacagcacagcttccaagaattgcacttgatgcacctaaaagtgtcatgggcaagaatacaatagattgtatgaagagtggagttgtatatggtaatgcttcatgtattgatggaatgatagacagaatgatagaagcaaatggatttaataagaatggaactaaggctgtaacaatagtggcaacaggtggactttcagaagtgataattccgcattgcagacatgatattaaggttgatccaggacttcttttaaaggggcttagtataatatatgataagaatgtggagtaagagcatggattttacagaatggagatagttatgttaaagggtaaaaatgtacttttgtgtgtaactggcagtatagcagcatataaaatagcagagcttgcaagcagtcttgtaaagaagcattgcaatgttgatgttattatgacaaaaaatgcgactaatttcattaatccgattacatttgaaacgcttacaggtaataaatgtatggttgatacgtttgacaggaactttcagtttaatgttgagcatgtgtcacttgcaaagaaggcagattgtgttatggtggcacctgcatctgcagatataataggaaaaatggcaaatggcatagcagatgatatgttgacaacgacagtactggcatgcagatgtaagattatggtttcaccagcaatgaataccaacatgtatgataatgctattgttcaggataatatcaaaaagcttatacattatggaatggaaatcatagagcctgacagcggatatcttgcatgtggcgatacaggaaaaggaaaaatgccatcaccagaagttctggaatggtatatattaagagaaatagctaagaaaaaggatatgaaaggtatgaatgtctgcgtaacagcaggacctaccagggaaattatagatccagtacgttttatatcgaataattctacaggaaaaatgggatatgcgattgcaaaggaagcaatgctaagaggagctgatgttactctgatatcaggaaaggtcaatattgcaccagttccatttgtaaagctggtagatgtcatatctgcaaaagatatgtatgatgaggttataaaagcagcagaagattcagatattgttataaaggcagcagcagtagcagattatcgtccggctgtggtaagtgacaataagattaagaaaaaagatggtgatatgtctatagaacttaccagaacagaggatattattggtacacttggcaaaaataagaaaaaagaacagtttttatgcggattttctatggaaacagaaaatatgcttgaaaattcaaaggcaaagcttgataaaaagaatctggatatgatagttgccaataatgtgaaagttaaaggtgcaggatttggaacagatactaatgttgtaactataataacaagaaatgattgcagggaattgccaatcatgtcgaaagaagaagttgcagatgaaatattgtcttatataatgcagctaaaaaagaaacattaaaataaacatgagatatatcccgttaaagccagtaataaagccgctttgacggggtttttaaattgtttatcttattaaaattaaaaaaaatcgaaaaaagttgaaaaaagttgttgacatatgtagggtgtggtgatattataatcaagtcgccgcgatacggcagcgacaaaaacttaaagaaacactgatgaatacagggttctttaagaactgaactttgataactgaacagaaagacaaccttgaaaattctttttagaatttcgagatgacaagatgtttatgatataaacatctacatcttttgtgaacatcattcaagcaattgaatgaatccttaaacacagtataaggaaactattaaagctagttagttcaaaactaaccggatttaaaactcgtgtttttagggacttggcaagttgcgcaagcaatcttgcatgggtttctgaaagaaacacatttttatgagagtttgatcctggctcaggatgaacgctggcggcgtgcttaacacatgcaagtcgaacgaagcatttacgacagatttcttcggattgaagttgtttatgactgagtggcggacgggtgagtaacgcgtgggtaacctgcctcatacagggggatagcagctggaaacggctggtaataccgcataagcgcacg

SEQ ID NO: 331 - DNA, 69349 bp, Unknown
  gut microbiota DNA sequence
tactgcatcattattacacactcaacgtgtaccgtattcccaaactgatctaccggctgtactttttccaccttatatccatattccaccagcagtttaagatctcttgccaatgttgctgaatcacagcttacatatactatcctgtccggagacatgcttactatcgtgtccagcagttttttatcacagccctttcttggaggatccaccacaactacatctggccttgtcatatcatattctttactgtctgttgaatcgttatcagattgtacgcctgtctgttttttataaaatgctggaacaacttcttctgccttgccaacaaaaaactctgcattatctatattattaatcttagcattattctttgcatcttctatggcctgtggtactatctcaactccatataccttaccagctttctttgcaaggaataatgatattgttccaatgccacaatacatatcccatacgctttcatttcctttaagccctgcaaactcaagtgccttgttatataaaacctctgtctgcttagggttaacctgatagaatgaaagcggtgaaatctgaaactttatatctcctatataatcctcaatatatggtcttccataaagagttatacattctttgccaagaatcacattcgtatcttctttgtttatgtttacaaccagtgatgcaacattaatcttaagcttctgtatagctttaaccagtccgtctgctgcctcttttcttagcattttcttagtcacaaggcataccataacctcatctgtatgatatcctgtccttataagcacatgcctgactgttcctttatgtatattttcattgtaagcacgtaccctgtattccttcatccattcttttacagcgttaagtataaatgcattatctctatgtccaagcatacagtcatcatcaggacatgcaataatcgaatgtgtatgtcctgcataaaagcccatgacaatattgccgtccttatcctcacctacaggatactgtgctttgttccggtatctgaaaggtgtatccataccaagtatctcacacatttcatagtcagcaccttctgtaagtccacttattcttagcaaattatcttttacaagcttctgtttatatttaagctgtgcattataattcatagcctgtatctggcagcccccgcactgtctggcaatcggacatgctggttccactctgtccttagatggtttaattatatccatcagtcttgcatagccataattctttttagctttcattattttaacacgtacaacatcaccgattactgtatccttcacaaacaaagtataaccgtctacttttccaattccttcaccagatacacctatatcttcaatagtcagctccacacaatcattcttactgtatgacatccttatctccatttccacttatcttatatttttctatcttttttcctgttttactgcattttcaatctgctcgttatagcattacaatgatgtcatggtcaaaagatgtcctaaaagcttgttcttcttatattagaatccagccatctgttaaagccaagccagtcattggtatccttcgcttcaaagcactcccttaatgtttcaagctttgcatctatattatctgccattgaaagtgctactgcttctgctattgcaggctttttaggtgaaccatattcaagctcaccatgatgtgataatatacaatgtcccatctcatttgctattattggtgggaaatctggtatattctttatcttttccataaccatctcatatcccataacaatatgtcctaagaaattcccctcatctgtataatcatttcttgggaattcagaaagctcctttacctttcctacatcatggagcattgcacagcttataagaagatctctgtttaaaaaatcataattcgtgctaatcttatcacacaaccttgtaacactaagactatgctcaagaagtccacctaaaaaaccatgatgtactgtctttgcagctgatgtattcttaaatcttttgataaatgcttcatcatccacaaaaaaagctgtaagaagctgttttatgtacacattttctatactattgacatagccaagaagttccttgtacatatcttcaatatcaaaccttgaagctggtatataatctgactgtgaatattcattttctgctgccacacgtgctctttctatcttaaactgaagtgcaccattgtaacttgtcacctgtccacttacatatacataatcatttacatcaaagtctcctattccaccagaattcacatcccatatcttggaatctatctgccctgttttatctgcaagcattacattctcatattctttgcctgtctttgtaagtgctgttgactttgacttgcataagtatacatcagatattctgtcgccatctttaaaagtttcaataaatcgcataattaaattctccattcctattacaaataatcattatttttctttagcttatcttagctcaactgatacgtcataggacgcatcaaagtatcctgattttccctttctttttatggatacattaataacctgtcctgccgagctgtcatatatcttatcattaagtctttgtatagaataacaaggcattttgtttatgccctgtattatatcgcctggctgcagtcctgcctgatatgctggtgaatcattatcaacctttgatatatatattcccattggaattccattcttttctgaaagctcactatccacattctgggctactattccaaaatacatctttccctgcctgttaatcatacactcaatcatacatttaaggtcagatattcctattgctttaagcttggaatctgaattcacctgagatattcctacgacattgccatctgaattaaataaaaagccataatcatccttcatgcatgaaagattagtctcaaatatctcataattgttatctatagaattggccacggttctgttcgttatagtcccataatcaatagcaccacttgttccatatatcttccctgtagctattaccatatcacctttgtttagtacataagagttgtcaagatccgcaaccttcatatactggctatcagcatctgtcacctgtgtatcgtatatgcttattatacttatacccgtcagttcatcagagcatacaagctccgccttatattcatcagaatcctgcacaacaaccgcatattcttctacagccgcagtatatgtctgtgaggttaatatcatatatctcccattcagatgtcctacaagcagccccatcgtagaatatccttcaacattattttccagttttacaaaatcatcctgtatctcttctgacacatatggcgtatcactatcattgtcattataatgacctgatacatattccctgactgtaacaactgttctttgcacatcagataccttgcttcttaatgactgtatgattgcatcataatcattcttaatctgtctctgatcttctatctgctgcgtttcaggatcaggatactcatcccttgtaaattctatatgatcaacaactctgtttcttacagctattttatccatgatcactggtataactatcttatctgcaacagcatatataacgcctatagctattataagaagaagtattttcacagtcttgataagtcttctgtatttcacctttgggcttggcactatcctctctgtatacagcggatattcctgctcatgtccgttatttttgtgttccatattattcctcagcgctcatactcacgaacccgcgctatcgcgctctttcgtcctgcttcgcatgactgttcgttcgttaatggcgcaagaaaagtaaatgtctgcttcgcagccgcttccttttcttttgcgctcattatatcataggttatcggttttttcttcattattctttttataataacttatatttatgaacaaactatgtcaaagctattaataagcgttccttttttgcatatttattactatatcatatagttttttatgcgcaaatgctgtaaaatacatttataaaaaataatatatcggagtactacattgaataaaaaaactttaataacacttgaatataataaaataatatcagcccttgtgtctatggcatgttctgatggtgccagacagactcttaaggctcttgttccaatgaataacattgatgatatcaacgcagctcttgatgaaacaaacgatgctctcacaagagtttaccagaaaggcagcgtagatttctcaagaataaaagatatacgtgcaagtcttgcacgtcttaaggttggaagctctcttaacgctcttgagcttcttaacatcagcatgcttcttgagtgtgctgctcatgttaaaaactattatgaaacaagaaatgattctatccagcctatgatagatattcttgaccctcttacacttcttggaaatgccatcaggaaatgtattatatcagaggatgagataagcgatgatgcaagctctacactgcgcgatataagacgcaaaaaaaatcaggctgctgaccgcatacacactgaacttaataagcttttgaattcaccatcaacaagaacatatcttcaggattatgtcataacaacaaggcagggaagattctgtcttcctgttaaagctgaatacaaatcagctatgccaggtatggtacatgaccagtcagccacaggctcaacactttttatagaaccggcctctgttgttaagcttaacaacgatattcgcgagcttgagcttaaagagcaggctgagatagaagttatacttgcagacttaagtgaaaaggcttcttgtcatactgatacacttttatctgattataacattcttacacagcttgattgtatatttgccaaagccctgctatcaaggcactataactgcagccgacctgttatgaatactgatggtcgcattaacataaagaagggaagacatcctctcattgaaccacataaggttgttccgattgatatataccttggaacagattttaaccttcttataataactggtcctaataccggcggtaaaactgtttcgctaaagactgtaggtctccttactcttatggctgaggccgggcttaacatccccgcacttgaccactccgatatagctgtatttgatgatatatttgctgatatcggtgatgaacagagtattgagcagagtcttagtacctttagttcacatatgactaatactgttgatatcctaaagaaggctgacagtagaagccttatattgtttgatgaaataggtgccggaactgatcctactgaaggtgcagccctcgcaatatccatacttgataatcttcacaaacgtggaataaccactatggcaacaacccactacagtgaaatcaagatgtatgcgcttacaactaatggcgtagaaaatgcatgctgtgagtttgatgttgaatctcttcgccctacttatcgtcttcttattggtattcctggcaaaagtaatgcatttgcaatatcaaaaaagcttggcttgtctgatgaaatcatagctgatgcttcaagacgtcttgattcagaagatataagattcgaagatcttgtaacagaccttgaacaaagccgtgtaactattgaaaaagaacgcgaagagctggctcagtataaggaacagattaagaccctaaaagctgaactcacaaagaaaactgaaaggcttgatgagcgtactgataaaatcataagaaaggccaacgaagatgctgctcgcatacttcgtgatgccaaggaatatgcagataagactattaatgccatgaataagcatggtatgtcagtcaaagagcttgaaaagcatcgtagtgaaatacgcgaaaaaataaacaaccgtcaggaaaaacttaaacttgaaccagttaaacctcagaccataaaggctcatgatatatctgaattcaagcctggcatgcatgttaaggttctcactatgaatgttataggtacagttacacaggtacacaagaacaaaaatcaggtttctgtacttataggaagccttaataccaagatggacataaaaaatcttgctatccttaaaggctataaagacccagaagataataaagcagcagcttcaaagtctggcagcggttcaagtaaaatcaaaatgtcaaagtcttcttctgtttcatcggaaataaatctccttggttataccgtagatgaagcaatagcagtacttgataaatatcttgatgatgcatatattgcgaagattccacaggtaagaattgtacatggtaaaggcacaggtgcactgcgctccggtataacctcttatcttcatggaataccttatataaaagagttccgcttaggacagataggtgaaggggccgaaggcgtgactattgttacatttaaagactgacatactatgatattttatcgcaaagaaaaggagaccccttatggttactaaacaaaaaatccttatcgtggatgatgatgaaaatatagcagaattgatttctctgtatcttactaaagaatgttttgaaacaaagattgtatatgatggggaaagtgcactagatgcacttccttcattcaagcccaatctcatccttcttgatcttatgcttcctggtattgatggttatcaggtatgcagggaaataagaaagaataataacacccctataattatgttatctgcaaaaggtgagacatttgataaagttcttgggcttgaacttggggcagatgattatatgattaaaccctttgaaaccaaggagctggttgcccgtgtcaaggcagttttaagacgctatcatcttcctcagtcagcaataactcctaacgaatcttccaaatgtgtaacttatcctgaccttgttgtcaatcttgataactattcagtaacctactataaaaaatcagtagaaatgccgccaaaagagctcgagctgctgtattttcttgcttcagctcctaaccaggtatttacaagagaacagctccttgacaatatatggggctatgattatataggtgatacaagaactgtggatgtacacattaaaagaatacgtgaaaaaataaatgaccatgacaaatgggcaatagaaacagtatggggtatcggctataagttcgtaaccagataatgctttatatacgtattcatgcatggctgttatgcacttaagcaccatacacacatttaagatgggagattagtgtgaaaaataagatttttcacacgcaagaatggagattattatgaaatacaatatgcttataaagcagattttactatatatagtcgttgccataaccagctttgcagctgttacaactatatgctatagacatgattataacagaatatataattattattccaataatctttatcagcaggcaacagaaatatctgttgaatatggtactgactttcttgcctctaatcgtatgccggctataagaactaatcttaacatattatcccatcttaataatacacgcataatgtttattgagcctgaaggaaaagtactgcttgacactggatatacacacaaggcatccaaagaagactgcctttatgaggtggaagactttgactacggaagccttaacggagagcactctcaccttggcaacttttttggtctgttcaacgaaaatatgcttagtgtgtattctcctataaccagtgatttttcaattgttggatatgttgtcataaaccttcctgaaagtgtgcttaccgaccgtgtttaccagacatttaacactaactatctgacacttgctatttctatgacattatctttatctatgctcatattatattttgtatatatacatgcacctataaacgaacttactaaagcaactatcgaatatggaaaaggaaatctgtcttaccgcatacagtctaaacacaacgacgaaataggacgacttgcggcatcacttgactatatggcacaggaattaaacgaaatggataaattccagcagaaattcttatctaacatatcccatgatttccgctctcctcttacttctataaaagggtatcttgaggctattgaggatggcaccatacctgctgagatgataaataagtatataaacattgttctttttgagactgaccgccttactaagcttacaagtaatatccttacgcttaatgagcttgaccctaaaagcgtacggcttgatataagcacatttgatatcaactctgttattaaacatactatagaaacacttgagggaacatgtaagaaaaaaaacatcaagttcagccttacatttgctgggaatattgaaaatgtaaaagctgataagcagaaaatccagcaggttatttataatcttattgataatgcaataaagttcagccacgataattctttcatatacgtaaccgtcagggaaaaaggtgaaaaagcacagatatccataaaagattccggaagcggtatatctaaagaggatattgacaaaatatgggacagattctataaatcagatgcttcacgaggccgggataaaaaaggttctggtcttggactgtctattgtcaaagaaattatccaggcccatgaagaacatatcgatgtcataagcaccaaagatgtaggaactgaatttatattcacactcccactagataaaaagtaaatactataccatctgttaagccactggaaaacctttagctgtactactactattcatccttccaatgaagcttatgcagatgtccattaaggcgcatgtctttaaaatcatgctgccttaatgcttcatatgccactattgcaaccgaattcgacagatttaaagaccttatatctcctatcataggtattcttatacatgtatcttcactagaaacaagaatatcctctggaatacctgcgctttccttaccaaacattatataacagtcatcttcataatgcacatcagaatatgttttatgtgccttggttgttgccatatatattttagcacctggattctttttcagaaaatcctcataatcgttataaaccgtaacatccagtttatcccagtaatcaagccctgctcttttaaccatcttatcattaatgctaaatcctaatggttctatgagatgcagccttgctcctgctgccacacatgttcttcctatatttccagtattagctggcatttctggttcatgtaacactatattaagcatattatttctttctgttagtcctttctcttattccgtcttaatagctatatcaagctcaagtgaaagtccatctcctgcctgtataggaacacatatattctgtgcatatgtctgtgttatcgtcatagagccctgacatacagtcggtggtgttatatctatcacaattccctttgttgaaaatatggttgctgcattacccataatcatatttccaagttcacttatagcacttgttgccatatcgtcaagctctgttacaggcattcccatcatcattcttgaggctacgttaagtgcattggcatatgaaaacgccataagtacctgccccttcatctcacctgtaatacctatcataatcgcaacagtttcatcctcgaactcagttttcttaacatatggttttcctatactcatatctgtctgacatatgtctttcataatgcttgttgctgccataagaaatgggtttatcaaatccgcactaatacctgccatattctgttcctcctgtctgtatttaaactcgattaacatttaccttaatatgtaaaaccagctgctattaacctggctttcatatagatggctaagagaatacgacattgaatcatcatagcttatttataaagttctttatccttcttagtccttctttaagactatctagtgaatatgcatatgatattcttacaaagccttctccactttcgccaaacgccgttcccggaactactgctaacttctgatcttcaagaagtctgtttgcaaactcttcagatgtcattccgaattttttaatagatgggaatatataaaatgcaccaaatggttcaaaacaatctatacccatctctcttaattcatgaacaagatatcttcttctctgatcgtaagcagtaaccatcttttcaacttccatgtcacagtttttaagtgcctcaactgctgcaaactgactgtttgtaggtgcacacatgatagcatactgatgaagctttatcatctgttttataatatagtccggaccacatgcatatcctaatctccatcctgtcatggcaaatgccttggagaaaccattaatcataatagttctttccttcatgcctggaaggcttgctatagaacaatgcctttcatcaccatatgtaagctctgaatatatctcatctgatataacatataaatcattctctataataactggtacaagctccataagctcttcccttgtcatgattgcacctgttggattattagggaatggcataataagtatctttgtcttatccgtgatatgttcaagaagttcttcctttgtaagcttgaactggttctcttccttaagattaacaaacactggtactgcatctgccataacagcacatggaaaatatgagacatagcttggctgaggtattatgacctcatcaccaggatctaccatacatcttaaagctatatctatggcttcacttccaccaacagtaacaagagtttctttcagtggattgtatactacgttatatttccttgccacatagttacatatttcttctcttaattctttcagtccggcattggatgtatagaatgtacgtcccttttcaagtgcatatattccttcttctcttacattccatggtgtatcaaaatcaggctctccaacacctagtgaaatcgcatccggaatctcatttacaacatcgaagaactttctgataccagatggctgaatatcaataattttcttagataaagcatttctcatggtgtcaccagcatcctttcatccttatattcctcgtctaatacagttccataatctttatacttcttaagtacaaaatgtgtagatgtacttaatacagaatcaagtggtgcaagcttagtattaacgaactgtgcaacagacttcatagttttaccttcgattataactgtaaaatcgaatccaccagacataagatatactgatgtcacttcatcatacttataaatagtctcagctatactgtcaaagccaagtcctctttgtggtgtaactttaacctctatgagtgcagtgaccttctcttcacctgttttatcccaattgataagggtattgtaaccacatataatatgttccttttccatgtctgcaatctcattcgcgacttcatgctccgcgactccaagcataaccgccatatcgtgaatgtctattcttgcatttttttctaacaagttaaggattttttctctcatatcattataccctttcaattaattatagttttaatgctgcacttcttatctatacatagtgcagccagttttactcaacactgcgatacagttcatcctgtttaggaagatcaagaaacctctcctcatctttgttatgaagtatgcgctggcttccttttataacctttcctataacctgtgcctctatattacagcttttaagtatatttataatatcacaatcgttgtctgatgtcattaacaaacatcccatggattcaagctcatatggattgacattaagcagctcacatatttctattatttcctgtctgactgatatgcttcttatatccacatcaagtcctgtatgcccatattcgctcatatcccataaagcaccgaatatcccaccttctgaaacatcatgcatataacagtttatattattcttccttaaaagctcaacaacatcacctatatacagttcttcatcgctgccatacgcctttgcggtatagtcatcactataccttgcctgtacaatatcagaattacggtctataagctgtcttatcccgctcatccctatatatccagtcattataatgctttctccaggctgtggctgctttctttgctcttgtcttacacctactgctgtaactgtaaccatgggagatgtcacattgccacttactgttgtatggcctcctgttattgacactcctgttattgctgactgtctcgtaagctgtgctataacttctcttaaacgtatttctcttgaatctttatccatgacaatgcagtcactgagtccaaccggaactccacctgctgcatatatgttattaacagcctttatcacaggcatataaccactggctgttgccataagcaatgtatccctgcaatctgatgatatatcagcctggcatgctaactgtacttctcctgcatcctgtcctatatcaagtcttttcacatactttccacgtacagtattaacaggttttaataccgacctggatagaattgtatctgacacttttcctgtcttcatataatcatccttttcatatttttctcttgcacatatatttaattgcaactatactatgatgtaagggtcacatggtattgcagctcttacctatatagatggattactgctatgtcagctttctattctagataagtgctgaaactgccattggaagcaccatcgcaagtataagaatgactactataaccgctgcaacaacccttttagttttgttattctttaaattaatcatgatatcctcttttctgcatacatcaaggagtttaatatgcattttatattgccttattttataataatattagttttaattcaactttatattaaaaaaagtgatacttcacagaaaaataacattaaaaagttctgggaacgcgagcaaaaagctaacgcaacaagaaagaaagatataagtactttaaaatatatcgaatgggacacaactcttcctgttaaagaaaataacactttactgtcagatattctaaaaaacaacccggaggctgacagcgcatacaataaaatcatatctgttaaggataaaaatataattaaccttacagaatattcaaacactgatttaaagcttaagtatggcgttgctaatcttgaggctcttacagagtatgaagataattacacactgcttataaagaatcttgcggtccttggacatattcttaaagagcaggatgatatcactgatgccacacattatcttgaatatagtatacgcattggttcagatatccgctcatgctatgctgatttaaaggatatatatataagccagaatcatacagaaaaagtagacaaactcagacagtatgcttccatgattaagtctgtcaacaaagagctgattataaatctgcttaatgattagcatatagaaaaaggcttgctccattgcaaagcaatgaagcaagcctaataatctcaaaaatccaacaccataaaataatgtgtcctacttaccatattctgatataatcctgtctatgtttctagatgctatgctcttagtcatctcttctacaggaatatccagaactatattgtgtttcttaacaagtgctgtaagataattcttctgtgcctctgttatcgggctatccttcttaacattatatactagctctgcagccgtctcaaacccggaatcatctgcttttatctgatacattttccagtatatggcacttgcactaagtgcatcatctaaagccctgtgtgaactgccaggatcgaccttaagatactcacatagataatcaagcttcttatgctccagctctggaagtatccttcttgccattttaagtgtatctatgcctttaacactgaatgtaatattattattaatcgcagctttctttaaaaagctgtaatcaaatattatattatgtccaagtatcggataatctcctataaagtcaagaatattcctgatttcatcttctatccttggtttatccgtaagctcattgttatgtattcctgtcaactctacaacacgttcaccaacagttatcccaggattaataagcgtagaatatgtagcagccacattgccctgctctacttttgccatacctatttctattatcctgtcatatgccggattaagaccagttgtctcaagatccagtgctatgtaactatctatcattctttttcttctctttcagatattcttcaccaattacattacctataatccccagataatctatatcaacctctggccattttttcagctgtctgtttctgttaaaagatataacacagaaattatttttaccgttatttataattgttctgtcaacacacgcaacaacctgtatcagctgtttgatgcccatcgtatcatacgctttaaacatatgtggtgctttacgttcatagagaataatattctctattgtctttattccatcatccctgaaatccggtatataattatcttcctttaaaaattcaccattttcctcaagttctggaacagtaccagctaacacatatctcttgtcatcatacatatcatataaaaatatactgtctatctcaaatgctgacataatcatatcaagacattctctagaatcccttgtcttacatatatactgctggataaaatcgttaactatactaagttttctgtatttataaaaaaccttctcggttgtcgctacaacctcatcactcattatatagctttgatgaaggtcaggatgatatatgatatatctgttttttcccttttccttagcaagatacagcattttatcagctatcagaaacagcttatcaaaatcacttgcatcatcaggatatgaggcagtacctattgagcatgtaatcttgttaatatcccttacatcatcatgatacagccacgatatattattctttatagtacgaagtatgcttcttatagattcatcatcctcaaaatgctccataacaataaacatttcatctccgcctatacgtccacacataccattgtgaccgacagcttcccttaatatctgtgcaacatcacgcagcacctcatcaccaaacatatgtccatatgtatcgttgatggttttaaaatcatctatatctataatggcaatcgttaccttatgattcactctcttatctatgagttttttagcataattggtaattgcttttttattaagaagctctgttcctgcatctcttagctcatcctgtacagaaacatcttcagctggatattctttgttttgtgtaagacttatagcccccgctattatattctcaccatcattcctatgtattcttttacccttaaatgtataccagtatgctgcttcatcataatctgcaagcttcatctttatatctcttgtaaaataagactcgcccgatgctatagccatgcacagaccttcaaaatcctttatgctatgactgtcaatcatgctgttatcaagcttctcactgctccatacaccaagttttccctcatataatactatcgtctgacttccattgcctggtaatattattcttaaagaatctttgcttatattatacgtaaaaagataatctcctataatacttaagaattctgtctgtatctctgatatctgtttaagctcctcattctgtctttttaaggtatacatatctgtgatttcaagattataataccttcctgatgtcttatcatgatatggttttataaaaacacgcatccatctgtaatcactatcacggctttttaatctgatagacacatatacctgttctccctcatctacttcctttattgctgtttcaaactttactacatcttctgggtaaatagcatgtgtaaatataagattcgatgtttcaccaagaaacataaaaagactttcatctgccttaacaatgttcatatactcacttactataatgtcagcgttaacattataatatttagcaatcttttccataacagcctccggtaagctaatcatcactcttgtttgttaaaaaaatgacaagtcaaaatagaaacatagctatgttaccctttataccttgtacatccttcttatcttatgttcattaatattttctctgattttattaaaaaaagcgggtgatgggaatcgaacccacgtatctagcttggaaggctagtgttctaccattgaactacacccgcataatgtatatataattatatataagtgcctagaaccggaatcgaaccagtgacacgaggattttcagtcctctgctctaccgactgagctatctaggcatattgtgatcatctattaatcatggtggtcatattaacctcatatcactgacacaagcaataaacactctctatcatcaaatacttgaatatattatcatacttacaccatactagtcaactgcatttttcaagttattatcttctctgttattatcttcacgttattatcttcgtttttaagttattatcctatagttattgtctgactgttttttatatgatgtcagggcagcccctgacaccattaatataatccttaagctgttttaagcgttcatacctaaacagcttatatttctcttttatttttcttttgttttcttttatttctctttattcatatacttttcatacatatcaggtctgaactgctgcgttctttctaaggatttcttatgtctccactcttctatctttccatggtgtcctgaaaggagtacatccggcaccttaagccccttatattctgccggtcttgtatactgtggatactcaagcagtccatccgaaaagctttctgtctgtgctgactcttcattgtttaacacacccggaacaagacgtgatacagaatcaataacaaccatggctggcaattctccgcctgtcaggacataatcacctatagaaacataatctgttactataagctctaatgccctttcatctatgccctcataatgtccacataatataacaagttcttcttcctttgcgaactcttctgccatactctggttgaatgtatgcccctgcggagtcatatataccactcttggtctttttttgcattctgcagcaatactttcatatgcatcacacaccggtcctgcctgcatgaccatgccggctccaccgccatatggataatcatcaaccttcatatgcttgttctgcgaaaagtcccttatatctactgcctctacacacagtgcacccgattcaatcgctctacctgtgatactcgtatttagtccatccagaatcatctgtggaaaaagtgtcattacatagaatttcattatttagccgctcctgctaacttattcaggaaaaatggataataattatgattaagattatatccacctgttgaatattttgtattcagataacctgaaccatctttaaatgaatctgctatatctacaaacacagcacccattgttgttgcatcttctgcaagcttcttattcgcatcatttatgtctgactgtttaatcttaactgatgattttgcttcaaagctttctgtaacaggaagtaatgaaacaacatatatctttgccgatggaatgttttctttaagtgctgctactaagttctctattctttctgcaacatccgttcctgatcttgttccatagttaaggtcattaagtcctacaagcaggaatattttggatggtgttctgtctttaacatctgatatataattatgagccttatctgttgtaagattattatctgacacgatattgcctgtaccaagatatccgtaatcctgtataccttctataatcatatctccaaaaagaactgtgtccgcatataaatcatttgttgaatattcttcttcatccgcaggatctgttatctttacaacacttcctttagaagccatagctgctgttgtctgtgttgtattatcatttacagaagctgttgtctcctgtgtactgcctgctgtggtctgtatttctgttttatctgcagaagctgacattgttgtgctgttgttattcttattatccggttttccactgccatccggttttccaacactgcatgctcttaatactactactgctgctattactataactataaccgacacagctccgattattggatttttatacttattccataatctcattttacggttaagctgtatcttctttccatcattattatctgctgccatatctgactccatttcttaatttcctaccagcgaagttttcttaacactactgccgatgtttttcttaatcctatatcaagcattccatccttaagcctgtatccctgcctgtctatagtatatccaccatcaaatgtcaccattatctgttcaacatccgcatccatgccaagtccggtttcccatacaggaacctttactcttgtttcatcttcgccgttgttaacaaccacaacaactgcatcattcatattgaatcttccatatgcaataacattgtgttctgaacaaagctgcttatacgaacctgttctaagcacttcattctccttatgcatctttataacatccttatggaactgaataagctccttatcctcatgtccccatggatatgttcttctattatcaggatctgtaaatccacatacacccgcttcgtctccatagtatattgttggtgcaccaggccaagtcatctgtataacgaccgcctccataaatactgccttatttacattctggttagctgcatccggtcctaaatctgcaacccttcctacaacgtgattagttcttgtaaggaatcttgaatgatcatgatttgacagttcattcatggatatggcaaagctctgtccacccattcgtgccatattatgatgcattgcaccaaagaaataagcaggattgcctaatgaatccgggcgcatttcatcgctatgcttttccattcctgtaagaaaccatgtcacaggctccatgaatgcatcatagttcatgatcgtatcccattcgtctccctgcagccagtcatatgaatctccataattctcagcaaggattatagcttctggattggcttccttaacagcctttctgaactttttccagaactcatgattatactctttgctatatccaagatccgctgcaacatcaagtctccagccatcaacattataaggctctgatacccattttttacctatatcaagtatataattctcaagctcctttgattcctcatagttaagcttaggaagcgtatcatgcccccaccagccgtcatatgaaccattatctggccattgattaccataaaacttaaagaaactgtgatatggactctcgtatttttcatatgctccacactcataaacatcatcgcttgagctgtatatatgctctctgtccatccatttgttgaatgaaccgcaatgattaaatacgccgtctattataaccttcatgcctctttcatgaatctgtcttacaacttctgcaaaaaagctgttactggcttccagattctccctgcttgcaactctgtttatatagcgtgttgcatgtgtattgttctggtcaccatcactaagaagctctccatcatcttttcttatcactccaaaatgtggatctatataatcataatcctggatatcgtatttgtggttggatggtgaaacaaacaaaggattaaaatatataacctcgatacctaaatcgcttagataatcaagcttatccagtactccttttaaatctccaccataaaattcccttactcccatagatgcaggatacttgtcccagtcttttacctgacagacatgctctcctatatagctgtactcattatccagtacattattagacttatcaccatcataaaacctgtctgcaaatatctggtacataacagctcccttagcccatgaaggtgttttaaatcctggcatgatctgaaagttataatatatattaagttcttttatcgcccctatctgattgtaatagcatacgacctttcctgtctcaaccttaaaataatagtaaagcttttcttcaccaactttaatgtctgcttcataataatcaaaaagaccctcagccttgatccttgtcatagggtattctacattatttacatatatatacgctttatctacattataacgtcctgttctcagtcttatctttactgtatcccccggcataggctctgccggacttctataatcctctgtaacgtcagaaaacaaagctcttgtattgatggtaggtcttgcattacacatatacaacaacttcttttcccacgatgcaagattttcaactgctgcgcttattatcatagaatctgctccttgacattaatcacatataattttatatcattgaaggtatttattcaactataagatatatttattaagatttctttaattcatccaccataatactttcttcagccttattattataaagtaaaaaggacagtctggggggactgtcctttttggagaaggtatttcacttattatggggtgtagcaaaaaatatataatgtattgggggtttttacattaattataatatcatacaaagccccataagtgttcacaaacttcacaataattgcgatatttttttgtgcatactgcacattgtgtgtttataaatcaatacaatatgtggattttcatagctctatacccatattattctatacccttattgctctatgctattacattatcagtaaaaagtccttcaaattcttctcttgatatcttttctttttcaagtaaaagctctgaactctttttaagaacatccatgtgctcagatataagctttttagccttaacataacactcatctactatatccttaacttccttatcgataagtgccgcaacatcttcaccatatggtcttgtatgtgcaagatctcttccgataaatacctcatcactatctgtatcataatttatgagtccaagcttctctgagaaaccatactttgtaaccatatctcttgctgtctgtgttgcctgttttatatcctgtgaagcccctgttgttatatcatcaaacacaagctcctctgccacacgtccaccaagacttactataatattctgaagcatcttgccctttgtattaaacatctcatcacgctctggaagcggcatagtgtaacctgctgcgcccatgccggtaggtatgatagatatcgtgtgtacaggacctacatctggaaggagatgaaacagtatagcatgacctgattcatgatatgctgtaatcttcttttccttgtcagagataatcttgctcttcttttcaacacctattcctatctttataaatgcctcttctacatcagcatttgttatatactttgacttctttcttgctgctcctatagctgcctcattcaatacattttcaaggtcagcgcctgtaaagccggctgaagttcttgcaagcttctcaaggtcaacatcatcaccaagtggtttctttgccgcatgtacctgtaatatttcaagccttccctgtacatctggtcttcctacaactatctttctgtcgaatctgcctggtcttaatatcgctggatcaaggatatctattctgtttgtggctgccataacgatgatgccttcattcacaccgaaaccatccatctcaacaagcatctggttaagtgtctgctctctttcatcatgtccaccacccatgcctgttcctcttcttctggcaacagcatctatctcatctataaatataatgcatggtgcattcttttttgcttcttcaaacatatctcttactcttgatgcaccaacacctacaaacatttcaacgaagtcggaaccagatatgctaaagaacggaacattagcctctccggcaacagcctttgcaagaagtgtcttacctgtaccaggtgcacctgtcaatataacacccttaggtattcttgcaccgagtgatgtatatcttacagggtccttaaggaaatcaactatttcttcaagttcttctttttcttcgttaagacctgctacatccttaaaagtaaccttgttatcttcaccgcttaccatacgtgcacggctttttccaaaattcatcatcttagcgttgccaccgccaccgccggcctgtcttgtaaacatcatcataaagaatataagcactacaagactaagaccaaaaggaagaattgatgtaagaaaaacactctgtcttgttacatccttaagtgtataagatatatttttatcaagtaatatttcctctacctgtttaacatctgatacatatacattcttaacattctgtacaccgcttactttaacagataactcaccagtaggaacctctgagttctgtcttataacgacactttctactttacctttattaacatcatttacgaattcaccatatgtgtaatcacctgcccccgaattcatgcgtgatacatacataataaacatcgctgcaataacaactataaacagatagactcccactccggaaaatcttgaacctcttttattatccattataactctccattcttatgcattttcctgattaatatcagatgcccgctgcctgatatgatatgctgcagttatcagctctaacgcattattccccatcctcaagatgtacaacacctataaatggaagatttctatatctctgatcataatcaagaccatatccaactacgaattcatctgggatgttgaatccgttgtactttacatctatatcaacttctctcctgtccggcttatcaagaagtgtacatatacatatatcttctggattacgttccttaagcataggcataagcctatagagagtattaccagaatcaataatatcctcaaccacaataacatgctcgccttctatagattcatcaagttctttctttataactatatttccacttgactttgttccacttccatagcttgaagtctgcatgaaatctatctttacaggaacggtgattcttttagctaactcacagcaaaagaatacgcttcccttaagtatacatataagctttacttccttcccttcataatctgcgctgattttctcaccaagctctgatatttttgcctgtaactcttcctctgatatcatgacacttatcttatgcatatctgccatatttagttcctctctttcatattaatcaatatctgaagcacgcagctggtttcatcatccacaaggcagctctcacaccttcttacgccgcacgcccataacacatgattcttatcgcatacaagaagtacattatccctgtatgctgatggtatctttctatctacaagttctttttttagttttttagtacttccatccttagataccacaatattatcctgtggttttctgaatcttatatccagtaatttattaattttatcataatcataatatttagcatagacattatttgatttatttatgagaattttaccactagtttctgtattttcatcattcttaaaagatatttttttatcaacaagcgaaaatgtaatatcagatacatatttctccccatatcctgcaatatatatatccttgtcaacactaatctttaacgcttcgccattcacgtcaagactgcttatatctactgctgccttatacgtatcttttaaatctgttatattctttttaagaactatataatcatattctctttctgcctgtatgccatatactgaatgtatcttttttcctgtctgcattcctgaaagtgcagctatatcagcaacattaacagaatatatatcctttgcccttccagccagcctgacaagacatttataaataaccctcttaacaagcagcatatcagccttattaagcttatccagtgctatccttataatgtcagtttcattattgtttccacctgtctctttgtgatcctgtatactctcatacacacattcctcatacagcctgtctgtctgcctgtctatatattcatctgcttcccttatatcttctgccatagacgatatattatttaccgctcttttattaatatgctcacacatatatggaagtattacatttcttatagcatttcttgtataatcattatcataattagtaatgtctgtgacatatgactgtcctcttgctgttaagtaaccttctatctggcttcttgttatacacaataaaggtctgcaaatgttatcacgcaccggtactattccacgtacaccctttaatgaagtaccccgcgccatattcataataacagtttcagcctggtcattcatatgatgtgcaactgatatcatagatttaccatcatatgcatattttttggctatctcattaaatatcctatatctttcaagccttcctgcctcttctactgtaagattattttttcttgcaatccccacacaatctatatgttccacgtaacagtcaaccccgtgtttttcacataatttctttgtgaattcctcatctgataatgcttcctgccttatcatatgattaacatgaacagcatgtatacatacatccggctgatattttttaacataatcacatagcatgagtaaaaggcagactgaatctgctccgcctgaaactccggttatgatatgcttacaatcatcaaacatatgattgcttcttatataactatatactgcccgctctgtttttactgtatgtttatccatatctttcctctttatatacctttatttacttatcctgctatcatatgtaagtggcaaaagtattttgtttcttacatcattatcattttgtatatgtatcaaacagcccgaagacaagaaccgtacaatcatcaaaaaccttttcatgattatatcccattgacttttttaatatttcatcagctattgcctttggcttcttcatcctcacactgttgattatctcgacaagcttttcttccttgtttacacatggaagattatctaatacgccatcgcttatcattataacataatctccgtcatatagcttcttgtccgtgcaatcatagtcaacctgctctaaaactcccataggaagcgttgatgactttattatttcaacccagccttctctttttataaatgttgataccgctcccatttttatgcagtgcattatacctgactggcagtcaacaacactcatatccatagttacaggattccccatgcctccaccattgatatatgctgaattgataaaatctattgctgttttttcctcaaatccggcatctatgcagttttccataagttctataaccatacggctctctatgaatgctcttttaccacttccacatccatcagctatagctgcaacaacttttccacaggaaagattggaaaccatgaaattatccccattaaatccacttttatccttacattcccttgccacacctgaaaggaatctaaatctgttctcctgatgatatacatattgctgacattcttcattcacaacaagcctgttgttatggtctgaataatacccgccaccaaatacatctgatatgatttttcttatctttctttctgatgtgcagcccttcccaagtgtccttgcctgtacaacaacctcattttttccatttttgcttttaagtatatttacttctctgataacaatacctgatataagtgctcttgatgacatatcccttagcaggcctttagcaggcttgtctgcttccagctgcataagtgtacaatcatcaagaatatctgcaactaaaaacagctgcctcttaaagcttggactttttgcctcatcacctgaagcacattcatacgtttcccctaatcttctgaatgtttttgctgtttctgaaagcctgttaactgtatatgtcatacacaactcatcacatctactcataataatctccattcttgcgctgcttttcagcgcatctcaagtttgtgcgaagctcaaatcttgcgtgtgaaaaatcttatttttcacactaatctccccttacgatacttcatatacttttccatttaacagacatcattatatacacatacatataaaaaaaaatgtcatattgtgttaaatgcccatcaagatataaatatcaaaaaatattttactcccagccgatgtaacaacaataaaagcacatgtacataacagtgctttctgctatatactatgtgcttatattcatctacttctttcctctgaatattatctcatcaggatacacaagaccaaacttatctttagcaacttcctcgacaaactttttagtctgtatatattttttgtattcattaagttcatctgtacgtttctgttcactatctacctgtgcctgaagctgtgatatttctttttcatattcaacattcttagcttcaatattcttctttccattccataacagtatgccaagtccgataacaacaagtatagcaaacaccatacctaatatagctgaacgcttttgtctctttctacggagttcccgttctcttcttgtttcaaatttcatatataccgctccaattctgtatacatctttatatttatctaagactgcttattactaatgtcattatcataattatcgtttatgattttctttttagtatgtttaatgatgtcagatttaaaaggtattttgctcttaatataccggcaacataactttacaggaaacaacagctttcctgatatcattctaaccatagataaaatgaatttcaatggttttattatgattatactgactatttttataaaaaaggatataagcttaacaccatattttatgtaatatctgcttaatgccttaacataaagccctgcacccataataaaacccgctataataaaagcccttataaccccatcattaacataaaaacatatagaaaatatttttattgatacatatatccagtatgccatatcctcaagaaccatgataacaagcatattatgttttactattcttctaaatatccttattgtatcatactccgctgcaaataccattccccaccagagtgtcctgcaaagcgtactgccctcccatacaatctctgctgtcatagattatactacctaaacagcctgtttataaggggctcaccctttttacccgctgtactattctgcgaataaactattgagtctattcttccatctacatccagttctcccttttccactgacagcttatttacgtgaagtgcatctccttttatgacaataactccataatctgattctaacatgaccttaaccggttcaaatgatataacatctgtaatccctgtgaattcaactttttttctatcctccatatgaactgtatgaggatgtcttacacgtcttgtttcctccatcatccacaactcccttcaatcatgaacaagcctattttatatctacttgtctaatatattggggaatatatgaaaatatgactttgattcttaaatatattcaaacatttctttagcttcttctttttttacagtatccttcacatctgttactttcaccttaacattcttattgccaaaggatatctctataatatctcctgcttttacatcagctgatgccttggcaaccttatcattaatcataactcttcctgcatcacatgcatcattagctactgtacgtctttttataagtcttgataccttaaggtatttatctaatctcatagcctgtctccttttccttatgcctcttaatctttatatttcctttgttttattcatgctttattgtgcattgaaaaaaggaagtgccactgtttatggcatagcacctcccatatatcatgccatgtcacagattcataagcatttccgtatataacaaagccttgaacctatgcgtatgcatagtatagcctatatgcaatactcatggcaagtacaatcagctttccatatgtttcccaagaaaatcagctgcaactttcactatacatttttcccactctgtaaacttatatccgttatctttagtaaacataataacagaacctaatacatcgccagcacatattataggacttatcacctcttctttgcactcataacccgatacaacagacacatatgatgcatctgtacagcctgccataacactttttctttcgtccataacagcattcagttctcttgatatctgttttccaagaatatattttttttcgtttcctgccgctgcaataacatgatctctgtcagttatagctgctgtcatacccgtattttcagccagtgtttttacgtattcctctgccatagcagttatatctcccatcggcgaatacttcttaagcactatctgtccatctatatccgtatatatttccataggatcagtttcccgtatccgtaatgttcttctgatttcctttggtatgactattctgccaagatcatcaatccgtcggacaatacctgttgccttcatataacataagcctccttttcctgactatatgcacattttttaccataattatgctgtatgtgtagtatgtggaaaatgtaatgatttatacattttgattatttttattatttacagatttttattatttttactttttgacttgattttacattttatgctatcatcagattaaaatatcagctttaaaatgctttttaacaataactgacgtttaaaagttttgattcatgtcaatgcttagtaaagacctgaactaaaagcagcttatattgcttcatatttcatttaatattaatattaacaggaggccagacttatatggttatagattttcatactcacagctttccagacgaacttgctgaccgtgcagtaggacgtcttgcacaaagcggaggtatacctaactatctggatggacgtatagactctatcaaagcttctatgaaaaaggcgggaattgattactctgtattactacccatagcaaccaagccagaacaacatacaactatcaataaaatagccattaaaaccaaccaatccgccaaagaaaccggattaatatcatttggtacaattcatccagataccgctgactataagactataataaataatcttgcaaaagccggcatcccaggaatcaagcttcatcctgtatttcaacgtactaatatagatgatcccagatatcttagaattatagaatgtgcaaacgacaacgacctcatcgtaactatccactgcggtatggatataagctttccaaactgtgatgaagcaagtgttgagcgtctgtctaatatgataaaagaagttcctccacacaagcttgtattagcccatatgggcggctggtccatgtatgatgaagtatgcagccggttaatcggaactcctcatgtgtggcttgacacagcttttgtccttaaaagcactcctgacaacaacttcctgtccaaagagaagttcgttcagatgatccgtgcccacggtgctgaccatatcctatttggaacagacagtccatggtctgaccagtctgagtcacttaagctgcttagaaccagtggtctgacagctgatgagcttactgctatcgagggtggcaatgctgccgctctgcttaaagacatcattttataaaaagtcaaaaaacctccagagcctttattttaaagacctggaggtttaattcatatctatatatctgctgctgtcatatacttttacccaacgatatcctgtgcatgcgccagtgctgcatcaatattggcacagaaattctcttccccaacttctgccgcaaatccagccttctccatcatagacttaggctgttcctgaacgtgggataatacaagtgttatgccacgcttcttacatacattatgtatattcttaagcgaacgcaatgctgatatatccatagctggaacacctcgcattctgattatgactacttttatatcagactccatatgtatgtccataaacttatccgccgctgcaaaaaacattggtccgattacttcatatactaaagtcttatctggaaccttctttagattgatactttcaggatcattattctcatcaatatcttccccgatatatttccagcttcttacctctgttacatcagccattctcttaagaaagagaagtgctgccataacaatacctacctctattgcaacgactaagtcaaatacaacagtaagtatcatagttgtaagaagtacaagaatatctgactttggtgagtgctttacaagattaaccatttctctccagccactcatattatacgcaactatgaaaagaatagctgctatcgctggcatcggaatccatgctgcatatggcataagcactacaagcacaataaggagagtaactgagtgaaccatacctgctactggtgtacgtccgccgttctttacattggctgctgttcttgcgatagcacctgttgccggaataccaccaaaaagtgctgacacaatattacctgctccctgtgcaacaagctccatattaggcttatgtcttgaacctatcataccgtctgacacaacgcatgaaagaagactttctatacctgcaagtaccgcgatagtaagcgcatccggaagaagtgtcataatcatatcaatattgacacttggaatacttaccgctggaagtcccttctttattgtatacaggcttccgattgtattgacatcttttaatggtccgatgaatttaaccatgagaactgatactataactgcaataagtgatggtggtattttatcaagtgccttaaaccttggccatatgataagaattgcaagtgcaacaacaccaactacaaatgccttaatattaaatgttcctatattagctataacagccttcagcttatccatagtctcaactgccgcagttcctgctggataagtaagcccaaggaaatccttaatctgtcctataactatcgtcacagcaataccaaaagtaaatcctgttgttatcgtatatggaataaatctgataagattaccaaactttaaaaatcccataactacaagtataataccagccataattgtggctgttattaatccatccataccatttctagctactatacctgccactattgttgcaaatgcagctgtgggacctgctatctgcaccctgcttccgccaagaaatgatattacaaagcctgcaaatatcgcagtatatatgccctgctccgggcttactcctgatgcaagggcaagcgctattgataaaggaagagctattatagcaacaataataccagccacaacatcctttacaagctgaccctttgaatatgttttcatcacgtcaaatatctttggtacgaattctttcattataatctcccattctcccattcatataaaccatataaatttttctttatctaaaaaaaataatattgggacaatgtattatacaccgtcccaatatatttatgcaaaataatatatactatatactacttctcaacttctgatatctgactgcatacaaactctataaccttctgtgaaagaatctggtatccaatctcagatacaacctcgttaccaactgcatctgtaatagcagcaaaatcatcatatccataatatgttgcaagatcgttaccatatgatacgatttcatcttcatttacgtggatatcgttatctgcagcaattactgtgatcaccatcttctctaaaaggtatgactttgcctggttatcaacatattcgttgtatgcatctattgaatcaaaaccatacacctttgttttatatgaatcaagatctgacgcaccatagtatgaaccataattattaaattcgttttcaatgttagtattaaacacttcaacaagtgactgtacttcatcatctggatatgtcacgctatcaccaatctgttctttaatcttttcatatgcagtattgaatgttgcctgcatatatttgtcattggcattagcctctactatctttcttacttcctgcctgaactctggaactgttgttcctgaaagattaagagtatccttgttttccattacccattcatctgttatctctggatatgtagtcttaactatagctgttactttaacagtgaatattacactctttccagcaagctcagatgtatagttatctgggaatgtgcatggaatatcatactcctgtccaactgtaagtccaacaagacccttatcaagatcactgatgaaatttcctgaacctatagtatatgaagcatctgttgctgttccacctgagaatgcttcaccatcaagcttacctgagtaatcaagtatgatgctatcaccgttagctgtaacgccacttgtaacattttctgtttttgcctgtgaagcaatgatattctggttaatataatcatcaacatccgaatctgatacattaagcactgacttatctactgtcacttccattcccttaaactctggcattgtaaagttctttttatatattgctgcatctgcagatattattgaatcatactgtgcagcagttatatccttatgtactgtagaagttggagcttctgtctttttagagccacatgctgcaagcgatactaccattgtagcagcaagcataaggctaactaatttctttttcataaataatcctcatttcattattcttggcatgttattcaagccagcttgtttcacaacattatctgttataacataatccagtacaaattaaaagtgaattcacatttttttcaatatttggtatactcttttaggtaaatataataatataggaattggaataaaagaaaacatgaagaatattttgtataaacaaaaaaagaagttatcctgcctgattctgtctactgtgcttataacagcctgtatacttcctcttacaggatgcgggactgaattaaccctgacaactccaataagcataactgattacaagctaaacacttatgtgcagatatcttcttataccaatgtcaataaaagcattatcttggaagctatatcgttatgtgatcattatgaacatattttttcacggactcttgcagcgagcgaactgtataaagtcaacaataaagaaacatcaataataagcgatgaactatatgaacttattgaaacaggtcttgaatacagccggctgtcagatggtgcatttgatataaccataggaagtgtatcccgtctatgggatttcacctccgactcaccttctgttcctgatgcttcacttataagcaatgcactggaatatgtagattatacgaaggtcacccttaacactgacacagcaggaacacactatatagatatgcccgatggcttctgtatagaccttggtgccgtagcaaagggatatatagccgacaaaatcaagacttttttagttgataatggtgtaaaaagcgctataattaatcttggtggcaatgttttatgcattggagaaaaaaagaaaaataccgattttacaatcgctgttaaaaagcctttctctgatacaggtgaatatatggaactgttaaacatcaacgattcatctgttgtatcatccggaacatatgaaaggtatttttattctggtgacggaactttttaccaccatattttaaacccaaaaaccggatacccatatgaatcagagctttgtgatgttaccatcatatcacatgaatcaacaaccggtgactgccttagtacaacctgttttgttctcggtgctgataaaggaatggagctgattgaaagccttgatggcatagaagctatatttatgaaaattgatggtacaaagctttactcttcttacgcatcctcgtatgtgcagaagtagaacagctaagtattggtattatacttgttatggatattttatcataacatcaaaagataattttattaaaaggagttatatatgatcagactaatcctactgataattgttttgttaatatttgctttattcagcctgcttgcacttcctatactgtggcttgccggcaaaaagaatccacttgctaaagaaaaagcctcagatgcaatagcaagatttatgttcagacttattcttcttatatgcggaacaaacatcaccgctatcggacttgaaaatataccagctgataagcctgttttgtttgtaggaaaccatcgtggattttttgatgtaatcatatcttatacatttattaaaggcagggctgcctacgttgcaaaaaaggaaatgtcaaaggtacctatactacgcagatggatggctaatataaaatgtattatgcttgacagaaacaatacaagagctgcacttaagtcaatccttactggtattgaatatattaaaaatggtacctctcttgtaatattccctgaggggacacgtaacaaaggtgaaggtgtaatggaatttcatgctggaagctttaagcttgctgaaaaatccggctgtcttatagtacctgttgtgcagaacaacacttctgctatatttgaagatcatgcaccatttcttaaaaaagctcacactattatagaattctgcgaacctattgatatgtctctgatgtccgctgaagataagaagaatgtgccagaatatgtacacggacttatacttaccaagtataacaataatcagaaacttgtataaaatattaatgtttaatatcttttcatcactctttttacgtgatataatactaaagttattaatgaattactgaaatatatatgcaggaggaaataattatgccagtatgggcgatagttttattggttattattgcaatacttgttgttgctttagtagctcttattattgtaggtaacaagcttcgtaagaagcaggatgctaatcaggcacagattgatgctgccaagcaggttatgtcgatgctgatcatcgataagaaaaaaatgaaattaaaagaagctggtcttcctaagattgtacttgaccagacacctaagtaccttcaaagaagcaaggtacctgttgtaaaggcaaagattggtcctaaggttatgactcttatggctgatcctaaggtatatgaccagattcctattaaggctgaagttaaagcagaggtcagcggtatatacatcactggtatcaagtcagtacgtggtggaaaaatagttgttgaagaaaagaagaaaaaaggatttttcaagaatttcggtaaaaagaataagtaatttcacgttatattatttatcataagatgatgtgagtgtcaaaaataaattttgccgctcactgatatatatataaaagctgctgtggcattaactatatcaatgtcacagcagcttttttacatattactttttagcatcttacattttaatatcttacataagtaacttaatataaaaatcttcaatacagcatgcagctttactctataactttatccgtctgcgtcggtgcatcccactctcctgtatgctttgtcttattttccgttgttttttctgttgcctttgtagaggtggatgtattatctgctgttgtcttttgtatctgttctttcgttgttgcctgaactctgcttgttgtctcctgctgggtagatgtttcctgctctgctgccgttgttgtttccggttgtgtttctgtctgctttgttatcacgttagaggcagtcttaaactcaaccttctcctttcctttatggattacctccataaaatccctgaatatgctaagtgtctttacagaactctgtgtcttaggataatcgtaacctgtccatacagccatagtataatactggctatatccacagaagtatgcatccttgttactattagtcgtacctgttttaccagctacaatagcatctgatggttctgcaccaacacctgtacctccagtaactacggatcttaacatatctgtcataaggcggcatgaattagtatcatataccctcacttctcttccggatgtatctactatcgtccttccagatgtgttagttatctttgtaacacacgtaggctgccggaacattccatcatttgctatagtggcatatgcacctgccatttcttctgtcgaaacaccatatgtgaagcctccaagtgcaactgcgttggtgttcttatccatccataccttatggaatcccatattaagcaggaaacctatacccatcttaggcgtaatgtcgtctctgtatattttccatgctactgtgttcttcgacttcatgacagcagttcttagtgtcatctgccctgcatatgagccgtcagcattattaggtccaccatctatcctttcatcagtaactatagtatccggtgtatttccctgctgtaaatatggtgtataaacaactattggtttaattgagcttcctggctgtctgtagctctgatatgccctgttaagtgtatatccatcaagctcctggcttcgtgaaccaactattgcaacaacattaccagtactgttatctatacatgttgcggctccctgaaattcatatacaccatcatccgataatgttttatatgaagcaaggtttttatctatcgaatcctgaagtgcctcctgtgcctctggatctatacttgtatacacagtatatccaccgccaagaagcatctgctggcatgttgaataatatttctggtaaagttcttcatattcattatattcatcttcggaattaaagttgtttctcataacgaatccacagtacttcatcatttcttctgtagcacaatgtcttgcatatgtttctacagaattgttcttcgttgataccttttctcctgagccagatacagttatctcttcatcaagcgctgtgttatatgtcatcgaatctatataatctgcattatataactctttaagtataagattccttcttgtaagcgtagcatcatagtttgtcagcggattgtacttagtcggattatttggtattgctgctataaatgcctgttccgataccgaaagttccgcagctgattttccaaaatatcctttagctgctgcttctacaccataatatccgttactgaaatatatgttgttaagatagaactcaagtatctgctcctttgagtatttcttttcaagcccccatgcaaggaatatctccttgatctttctatcccacgttacttcctgtgtcagaaaaacattcttggcaacctgctgtgttattgtgctggctccctggactatagtatcacttttacggtttgctatcagcgctcgtataatcgctttaatatcaatacctgaatgattataaaaatccctgtcctccataacaacaaacgaatctgcaagcgtagctggtatgttatcataatctatataatacatatcctttgatgctttcatggtacaaagctggtcaccattcttatcatatataactgttgtctttccattcttaaaagtatcaacactactctcatctgccatctgctttgcatctgctgcaagcttagctatctttacaagctttggtcctgcatatatacctgcaccagccagtaacacaactataattgctattactattctttttattattctgcgtctcctgcgtttttttgaattaattcgtacaggttttttaacttgtgcgtttcttttctgtgaagttctgctttctgatgaattcgccatatacatatcctctttaattcttgtaatatgttacaaatacattttcccattgtgtaaataacttatttgcatctgttaaggaaactgtctgactcatacctgatgctgcatccgtataagtcacattcttagaatcatatgctgttattataacatatgaatcattcccactttttcctataaccgggcagccattatcaatgaaattaagcattttgtctatagatactcccttaatacttattccacttactcctggtatactgctaagcacttcatctgctgtctttgtcttaagagcttccgatatatctgactgtcctccggcatatgcagcaactgcctgcaatgcgctggccagtgcgccagatgactgtcctgataatgataatcccttaagttctcctgtagtatttttatatcttttccatattgtattagcgttataatccgctactgagccataggtaccatacgcaagggctatagctttggatatatccgtcgtactgttctgaaacttaccatatccatatacataataccttccatcacccttgaattcttttgccagttcaagaactgcatcctctctgtatacaacatcagaagaagtcctgaactctacagttgttgatgacaaagcttttgtaagctttattgccagctcctgctttctgttatcactcactacagaatctaacgccagtccgtctgtttttacattctcatctttattgataagctggtctatgcttgttccttcataacctgaaccagacttcactattcttgtaagattaatacgcatatctgaaacacttgcatcacttacatatataccgttttcctcatactcttttataatctcatatgaagaattcatgatacatactttatacattgcaaatgttctgtttccgtcatcttttattataatgtcatccttatgtgccacaccatatataaaatcattattgatatatcccagacattttatatagtcgccatcatcagcctgtattatgtgttcactatcatctgacatgttgaatactcttatactttcagttccatatagcttaccgttaatgctgtatgctatagagcttccatcctcagataccgcatatgttccatctacaagatctgatacaactgtcataacctctttgcttataagatcgatacaatacagtgagtcatccataagtatataaaatgtattctcgtctgcaagataagctatgtttcctatattctgcgataatatatcatatggtatatcaactggaatatataatctttcttcaaccttattatctatatatgaatatctgcagagcgaaacacctgattcaccttcatgttcacctctgttcatatatccatataccaaaaagctgcagtcaccactatcctgtacatttagtatttttatgccatgttcattataattctcacgtataccatctgtttcgtctgtattaaaagagaaaactctcgtatatatattatcatctgtattgaagcaccataatgaaccctcatttacataatatgcatattttgccttttcatctgaagcatactctgctgttgatgatgattgtattccaagattaatctttccagccgatgtaagatcgttctttccatcaaatatctggtttgcttccctttcatagttaagcagataaaatcctgaattagtctgccttattctatagtactcataaacattatatgaatcataagaatcatattcgttaaccgcacctgccctatagtttaaagttataatagcaacatccttgcttatttccttaactttaggtacaagctggctttctatatatggtgttatttctccccagccaacctgtgataacgaactgttaatatttaccttaccatagttactgttgttgccacttgataatgtttcaagatacttctggatttcattcagtctgcctggatttaatgtgcatgcattaaaatattttacaaactcaaacttcttatccagctcataattctctcctgtaactattcttgtataataatatatttcatcatgtgctgatgtttttatcattatctcaagtgcatactgtacattatcatctataagattctttattccaagagttgctgttattttattgtcatctctgttaagtgtatttaccttagtattctcaataagcgaattatccgacaggcttcttactttgtatgaaacctcctgcacatctgccccatagctatatattactatatcaagctttctgttctgtgctatcggtgtaaggctgtcattagtaagtgcctggttaatagctgctgtatatccatgaagtggattaaattccgttccttcatctgtcagcattgatatgactggtaatgtagcctccgtcatagtcgttgccgatggtgtaaccgtctcaagtcccatagataaaaatgtaacaaccatagtcgcaataaacaatacgcctaaaaaaatatatttggagctggaccttttatcagttcttctcattattctctccattcctgttattttacagatttaacatttcactcataactctttataacagctttgaaatagtcagctctatacctagcgccttctgcatatcctctgcctgtttttctgctttttcatctgtttttcctgtttttacagctcttataagcagattcttaggagtgtgttccatatcaataaattccaaaatctgagtatcataacctctcgcctttaacatattggcacgtgctgcatcggttattattgcagacattctttctttaagtataccataatccataactggcgacagaagcgtactgcttatagtcctgttagcctcatgctgacagcatggtacagacagtataaccttcgctccccatgctacagcctttgcaagcgcataatctgttgctgtatcacatgcatgaagtgtcactaccatatctacactgtcaacatccttatatgttgctatgtcaccaacataaaaatccagtctatcatatccatattttgttcttaactcattacaatgttctatgacatcttctttaagatcaagacctattacccttatattataacccttgagctccttcagataataatacattgcaaatgtaagatacgacttaccacatccgaaatctattatagtctgttctttatccttatccagtcttggaagtatgtcttctataaactcaagaaaccggttaatctgcctgaacttatcatagcgtgttcttactatcctgccatcaggtgtcataaccccaaggtctatcataaatcctactggtgtgccttcctggattatatattttttggttctgttatggcttaactccttttgtgcctttatttccttcgctttcttatacttacatgtacatgttccacttttgcttgaaagaatagttgccaatgaatctgttctagttatctgcgcctgcttaaactcttcttccatatacttttctatacgcttcttaacatctttctgtgtataattagtatgcagcacctttcttccaacaaactcagatacctgatactccagtgtatctttaataataaccggtcttatctttaccttctgtgcttttgtttcatcttttagttttctgctgcttatagtcatatctataaggtttttatctatacatatatcaagtaattcttttatattcacaagctttcttccttttcttatatggcataactgccagaacttattttagtccctccattatacaatgaagagtaagctatcgcttctggcaatccttacatcattttaatctctttgtgttatttacacaagtaataatatccgttttaataatcttttaaaatctattttccaatatataccggggaagacatgtacaccaacgttttatcctctgtctcatcatattccattgaaatatttacatttatttttttcttaccaagcatgacatagtctttttcacttctgtcatatgcatataccacaaacatatccatggtctttcttgactgtatttcctttgctttaagctgttttaacaactcattacacagatttttcctatcagttatatctattctgccatctactgctcccttaaggcatacattaacaacacaatctatgccatattcctcacatactgtttccactatttttttatactgctctgtaccttctattcccttatcaagctttatatctatggcaagataatacttattctggcttgataatatccttatatccacatccccataaactgagtcctgtatcaatgcatatgaatcatcttcttcatttgcatgcttcactattttatatgcattaagccctatatcttctgctatatccgtaagaagcattgttttagcatcatctgacaggtagctttcagttatcaccccataagcagtaagctctgatgaaacatccctgtacacattgttgcagaatatgctcaccatatcctttctgctgttaactgataccgcccttactattccaggtgaaaacacacgcacagctgtaaatatccataaaactattgccagtataatactaagcctctgaaaactatatcttttcacatatttgtctttaaccaatatactcttatacatataaaaacctcccatcaaccaataataatattctctgatattattaccagttaatggaaggtatatactcatgatgtattttagtctttagcataacaactgactataatacttcattattaatcaactgctccaagtcttgcaagggatcttctaagagcaagctctgccctgtggacatcaagattactttcctttgcagcaagtcttctttccgctcttacctttgcttcattggcacgattaacatcgatttcatccggccactctgctatttctgcaagtactgtaacacggtcttttagtatctctactattccaccatgaacagcagccttctttacttcgccatcctgatgaatctttaacacacatggaacaagcacagctgtaagaggtacatggttaggatatacacctatttcaccctcacttgtgcacagctcaacaaatgttacatcatcattgtaaaacaccctttcaggtgtatttactaaaagcttcattgtatctgccatatcaattctccttatcaagatatctgagtttacaatctttattgcttatcttctactttgatacctttgcaagtacatcgtcgatactgccgcagttaaggaaataactttctgggatatcatcatacttaccttcaatgatttccttgaatccctgaattgtctcacttataggtacataacgtccttcaagtcctgtaaactgtccagctacgaagaatggctgtgaaaggaatctctgtacctttcttgctcttgatacaaccatcttatcttcctctgaaagttcatccataccaagaatagcaatgatatcctggagttccttatacttctgtaatatctcctgaactgatcttgctaccttataatgttcttcaccaacgattcttggatcaagaattcttgatgtagattcaagtggatctacagctggatatataccaagctcaactatagaacgtgaaagaactgtagttgcatcaagatgtgcgaatgttgttgctggcgctgggtcagtaaggtcatccgcaggtacatatacagcctggactgatgtgatagaaccattctttgttgatgtgatacgctcctgaagagcacccatctctgtctgaagagttggctgataacctacggctgaaggcatacgtccaagaagcgctgaaacctctgaaccagcctgggtaaatctgtagatattatcgatgaaaagaagtacatcctttccacccttatctctgaagtactccgccatagtaagtcctgtaagaccaactctcattcttgctccaggtggttcattcatctgaccgaataccatagttgtcttctcgataactcctgaatccatcatttcgtgataaaggtcattaccctctcttgtacgctcaccaacaccagtgaatactgaatatccaccatgctcagtagcaatattacgtataagttcctggataagaactgtcttacctacaccggcaccaccgaaaagtccgatctttccacccttctgataagggcagagtaaatctactaccttgatacctgtctctaacatctctgtattagtagcctgctcaacgaatgaaggagcctttctatgaataggcatatgctctacttctggagctggcttattatctataggctctcctaatacgttaaacattcttccaagtgtctgctcgccaactggtactgatataggagcacctgtagcttctgcatccatacctctaacaagaccatctgttggtccaagggcgatacatcttaccgtgtcgtctccaagatgctgtgcaacttccacaacaagcctgccgccgtcattggtctttatgttgatggctgaattgatttctggcagattaccttctgtgaatttaatatcaattacagcaccgataatctgagtaatcttaccaatattattctctgccattgttacctccatctataattattataactatccgatagcattcgcacctgctatgatttctgtaagttcctgtgtaatagaagcctgacgggctctgttatacttaagtgaaagatcagaaatcatctcatctgcgttgcttgtggcattatccatagcctgcatacgtgcaccattctcactggcaaccgcctctataagcgcaccatatataagactgcacacatacttaggtatgataaggttcaaagcttcatcttccgctggctcatagttcataggtgttgtatcctcaccgctgcttaagccatctgtatctactgatacaggaagaagcttaataagcttaggctcatgaactactgtattcttaaacgaagtataagcaagatatatctcacctatttcaccagctgcaaatctttcaagcagcttatcacatatgcttcttgcatctgtataaagaggttcattgataacatcagaatcatcttctgatatattataccctcttcttgcaagataatctcttcccttggtacctatagcaactatatctatatcttcctttggaataccactctctgtaataagctttgttaagtttgtattatatcctccggcaagtcctcggttagctgttattgttataacggccttcttagaagactcaccaggaacaagatacttgtgattgatgttacatgaccttgcaagcatattgcatatcgtctcgtacatcagatctgaataaggctttgtgctctctgcctttccctttgctttctgaagtttaacagtggaaacaagcttcatagccttagtaatctgaccagtactctgaatactgtctctacgcctttttatatctttcattgaggccatagaatttacctccattcccacatttagaacttaaatgttttcttaaactcttcaatagcacttacaagcagcttttcattctcttcagtaagttccttagtttcctttatagactctggaatctgaggatacttagtatctatgaattcaaacaaaccttcctggaaatcaagaatcttatctactggtatgtcaataacatacttcttagttacagcatatataatgataacctgatattcaacaggcattggcttatactgtggctgctttaacatctccatgatacgctcgccctgtgcaagcttctccttagtatcggcatcaagctctgaaccaaactgtgagaatgaagcaagctctctgtactgtgcaagctctgtacggataggagcagcaatcttcttaatagccttaatctgtgctgaaccaccaactcttgatacagaaagacctgcattgatcgctggtctgaaaccagagttaaacatctcagtttcaagatatatctgaccatctgtaatagatattacgttagtagggatatatgctgaaacatctcctgcctgtgtttcgatgataggaagggctgtaagtgagcctccgccgtactcatctgacatacgtgctgctctctcaagaagtcttgagtgaagatagaatacatctccaggataagcctcacgtccaggagctctctttaacagaagtgaaagtgttctgtatgctgctgcatgcttacttaagtcatcatatacaacaagaacatcttcaccgttttccatccactcttcacctatagcgcatcctgagtaaggagcaatatactgaagaggtgcaagctcacttgctgttgatgctactactgttgtataactcatagcaccatattcttcaagagtcttaacgatacttgcaactgttgatgccttctgtccgatagcaacatatatacaatgtacgccctgacccttctggttgataatagtatctatagcgatagctgtcttacctgtctgacggtcaccgatgataagttctctttgtcctcttccgataggaaccatggcatcgatagccttaatacctgtctgaagtggaacacttactgactttcttgtgataacgcctgaagcaactctttctatctttcttgtcttgtctgtgttaataggacccttgccatctataggctgtccaagtgcattaacaactcgtcctgttaatgcatcaccaactggaacttcaactactcgtccagttgttttgacagtatcaccttcgcttatatttcttgaatcaccaagaagaacggcacctacattgtcctcttcaaggttaagcaccataccatatacttcaccagggaattcaagaagttctccctgcatggccttttcaagtccatggattctagcgataccatctgctacctgaattactgtaccaacttctgatacttctagttcggcagaatatcttttaatctgttctttaataactgaactgatttcttccggtcttaaattcattagctttatgcacctactttctattagattcaagctttatgccagctggatattctttaaattcctggcaagctcatcgattttatgttttacactgctgtctacgactctgtctccgattcttatgaccatgcccgctataagcgattcatctatatcataattaatcttgaaatccacataatcagttgttgcaagcagtctgcttacaactgacagcttctgatcatctgtgagaggtctggctgtggtaacgaaagccactcctatcttcttgtactcatatactctctttataaagtactggagcgtgcttactatcttgtcctgtctgtccttagacaccataacagttaaaagtcctgtaatatccttagatacgaacttatcgaatacattctttataagttcttccttatcacccttttctaccttaggtgaccttaatatctttaccagatcctggttatccttgaacacatctatcacaacctgtgcttcttcacatagttcgtcgatcttagattcctggatggcgagctcaaataaagcctcaccgtaagttgtttctactaatttcgccatgtgttctcacccatttcattcaaagtctgttcaataattgcattactttcgctctcatcaatagatttagagataagcttagaagctatcatagctgatacagtaacaatctgctgcttaacttcatctgccactttctgcttttcaagttctgcttccttacctgctctctcgataattcttgcagcttcttctttagcttcatctatgattttctgctcattatgcatagctgtctttctggcatcacttaatataagctctgcttctttattcgcagcctttaacttttcttcatattctgccttcatggcaagagcagcttccctgttcttttcagcagtttccctgtcacttgttatcttatcctgtcttttctttaacatgttacgaacaggattgaaaagaataactgacaaaagcaggaataatatgaatacgttaatggctgttatcgcagcatcaaataagagctgataatcaagtccaaataatcttcctgatgtttcaagagccacaaatgtacttccgaaattcaattgttggcctcctttccattatcttaatgggcctttaccccttatgaatataatattccgttcttaattaacccttgaatggctgaacgaacattaagataatagctacggcgaaaccataaagacctgttgtctcggcaacagcctgtccaagtaacatagttgaagtgatatctgacttagcacctggattacgtccaactgctgctgcaccatgacctgctgcaataccctgtccaacaccaggaccaacacctgcgatcatcgcaatacctgcaccaatggctgacatagcctgaataaattcctgtccactaatattcatcttaaaatcctccgttaataaaatttaagcaccggttcttttatcaccgtgcaatcaaaatgtgcacattacacaatattttatatgcatttagcatataacattccaggtatgaatcttgtacatgcctggactaactatgaaaatctaatatccagacccctatatccggaaattatatttcaacttaatctgctatcttgtcgttaacataaaccatagttaacatacagaatacatacgcctgaatacatcctgagaacaagtcaaagtatgcatgaagtactgccggataagcaattgtaaatggctttaacaaatcatagataagtcccataagaactgttcctgacataacgttaccaaacagacgcaatgaaagagacaacggaactgcaaactcacctatcaggttaatagggaacaaaaaccagattggctggaataatgcagcaaaatgtcctaccttattcttctttataccattgaactgaacaagtataaatgtgatcagaccaaggcatagcgtaacaccataatcagctgttggtggcctgagtccgaaaagaccagatatattggaaattataataaataggaataatgttgaaatatagttgacgaacttgtttgcattctttcccataatgccgtcaaccatcgttccaagcatctccactataatctctatagcattctggaacatcccaggtgtatcatcaggcttgaccttattaatcttcaccctggcaataaccgccatgataattatgaagattgaaaccagcaacatagcaacatgtgtcgtgttaatactgaatgtataatcaatgcctggaatatggaactccttaaggctatgaatcataaaactcgaatcacatgctacaagtgtgttaacataagagcttcccaccttctcaccttcctttttttattttgttgattaatttatcagtaaacggctgtatataagccgctactttcattgaaaacattcccagtattgcaaataacagatcccccagatcaaaaacatacaatactgtaaacataacaagcatcactataagacgtattacatagcctaatataaatgtaacgcttgtattcgcccctccatacactacctttcttatacgtaaactcatatgaaaggtactaaaaaccgcatacgccacacctgctgcaaaacctatggcaggcttaagcggtgttttggctatacatattattaaagcttctcccacgataagatacaacatctgtactataagcatacctgggatagagggattaatatctttgattttctcaatcatgcattatactcctctcttttagttgttatccttatgtgctttgttatatcgttctaccttctgctgtatatccttttcctgttcaagttttttcttaacctcatcctgctttatagaattcatggcaagcacgtatgcattcctgcagccagccgcaattccgagtataagcagtggaatagtaaaacatgttcctaactttttatccagccatagacctagtgccagacatataaacgttggaaccataacgcatatgctaagctgggatattaatactatattcttcaatgcaattcctcattcccatacactaatgataacccactcactttaaaattctataccgattatacccttttaaacaaatgttgtctatatattttatttcccaaatatttacactcagatatctaatgtctaggcattttgactaatttttcacaaagaataacatctgaattttttattcaacgtttatccacatttttgttgaattttatatatctgcttgctataatttccataataaatatgtgctacaaaattcatttacttaatcaggaggaatacgtatggcaactttattccgtaaacgtcttatcccaagcgaatgcgtcaacctgaaagacgataccatcatacatattgatgaagatactattataaccagctggaaaaccttccgtcctaaagcggaattctcacatggcgtatcttattacgtactaaaagaaggttataaaataagtaagttctataaacaggatgacaccctggcttatatatactgtgatatcatagatacagcttacgataaagcttctgatacatacgtttttactgatctgttagctgatgttatcatagaaaactcaggctttgtacgtgtagtagaccttgatgagcttgcagatgcctgcagcgatggtcttatatctgacaacatgcttgtagaatcacttcacaagctgaataatcttttaacttcaatatattccggaacattccacggatatcttaaggttcttgaagattacgaagcttccatataatttactagtgaacaacataatactcattatatttaataatacccatcatatttatattatgcattcttctgcatagaaatatgatgggtattaaagtcggggcttttgaccccggcataattatatatatttattgcacatcgccacgctgactactacatctgctataactgaagtgtcacttctcttttatcagactcatacttataatatcttactcctgctgcgttaagcatcctctttgatgctatgactgaagctgtatccgcatacttatcgcaatcatacacaatagttttaattcccgcctgtataatagcctttgcacattcattgcatggaaacagcgtgacatacatcttggctccatctaatgttccaccacggtaattaagtattgcattaagttcactatgtgtcgtataaaagtacttgttatcaagtggatcaccttcacggcaccatgggaattcatcatcagaacaccctataggaagtccgttatatcccatagataatatcttattatcattacttactatacatgcaccaacctgtgtgttaggatccttggaacgaagtgctgacagcttggcaacacccataaaatattcatcccaggatatatagtcctttcttttatcgctcatatctctccatttctgacattgatcaaacattaatcaaacattaatcaaacattgatattcttcttatatgtctttcatcattgctgaattttgaatcaaggaatgtatctgctattctgaacgccagctctggtccgatcactcttgcaccaagacagagcacgttggcattgttatgctctcttgttgcctgtgcactaaagcagtcactgcaaagtgcagctcttattcccttgaccttgttagcagccatactcatgcctatacctgttccgcacataagaataccaagctcacattcaccgcttgttacaagatctgttactttgtttgcatatacaggatagtcacatgactcacttgtatatgttccaacatccttacactctattcctctcttcttaagatgctctatcatctggtttttaagttctactgctccgtgatcacatccaattgctatcataattttctcctttattatcgcgatattgtttatcaatcctgattgttccttggtgaggttattacatctacaacctttgcaacaagactgtataactgctcaaaacacctattatattcttcaagtcccttgccataaggatctggcacttctacatcaccctctccggcaagctcaccaagtgtaaagacatttatagccttgtcaaatgtatcatacattttctgtttcatagataagttcatagtaagcacaagcgtatctacactaaaatcatcattggatatctgggctgaaacattactaggcataatcattccatgtcttgaagctactgcaactgcctttggattataaggctcaggaaaaagcacaaccattccccttgattcacttctcatctccggcataagattagacataatcgttgcagccatagggcttctgcatgtattacccatacatacaaatattactttattaaatctgttcataacgaaacaccatcctggctcacactgcaatcttgttatctatacgtgtattatagtatgccctgcagcttttatcaatctgttcatgactgcacgtccaacattctctgtttcaaagctttccgaaaatacataatccacatgttcattatcaaactctcttagtatcgcatacaaatgtcttgcaacgcttagctcatcactcttatgtcccatggaaataactattccatctgtataaaaatgccttgtttcatcggtagtcattattgctaccttaaagccttcattaataagctttttcgtgttatcgtttatataatcaacaaccttagccatgtcaccttcaacaatcttaagatctgcatccggtgcataatgcttatatttcatgcctggtgctcttggcacaacccctgccttcaccccgtcagttatagccggatctatagtcactctgcctataacctcctcaaacatctcctttgttatatatccgggacgaagtatagccggcacttcctcactaagatcaataatagttgactcaacgcctatatctactgtatcatctgctattatcatatctatctttcctgaaagatcctttataacatggcttgccagcgtagggcttggttttccagaggtgttagcactaggtgccgctatatatacacctgattttcttataagctctgctgccactttatggctcggcattcttatagcaaccgttccaagtccacctgtgattgaatcaggaactatatccgacttttttaatatcattgtaagaggtcccggccagaacttttcggcaagctttagggctgtctttggcacctcacttgaaagcttgtacagcgcatccatatctgcgatatggactataagcggattatctgatggtcttcccttagccgcatatatctttgctgaagcctttacatcaagtgcatctgcccccagtccataaactgtttctgttggaaatgcgacaagaccgcctgctcttagtatttctcctgccttatcatatattttgtcatcctctttgggatttcctgtaatatttgcaacaatcgtttccactgtcacttacacctcttttatattattcgttggtcagatattccataagaccattgtatatactcccggcaattttctgctgatacgaatcgctgttaagtcttcctgcctcttccgggttagataaaaaaccacattcaactatgacagctggtacattcgtatgaagcagcaggtaatatgtcgaatccgccttttctacacgtttgttagtagtatcagcttcatttactatatgtctctgtataatacctgccagtttttttccttcagctgactgcttataataaaatacctgtgcacctcttgattccccagacacataactgttctgatgaatacttacaaccgcatcagcattactttcattgattatactgcaccttttcttcatatcagaagcttttttgtttgtgtcgctttcattatataatccattatcatctgaccttgtcattataacagttataccagactgttcaagtaatttttttaatttaactgatattgcaagattaacatccttttcatatataccgccgacacctattttacctggatctattccgccatgaccactgtcaatggctaccactttttctgcaacattaacatcctcaactgtgttttcggcttcaacacctcctatggtgtttctgccagtttctgcataatggaatatatatacacctgttagaactaaaagcacaaacaaagataccttcaatatttttaatctgaacttcatattaatcacataccttttttcttaaagtgtatgtcagtctgcattatttattcctaattaatatatctgcttatcatattccatactgatgccttttctaatccaagcttccatgctgcaacacctgctgtatcatattctgatatgaccttaagtttttcttctatagacttatcttcctcaaaccatgtctttttagtgacaccattcttatcatatgaacttacatactgtccggcatcttcattccatggtgcagtttttccatcagcattaagttcatcaatcgcagcctgcatacctactgcacggcttgttgttgtctgtcctgatatgctccatattcttgtaaagaaaggaatacctactataacctgctttgatggaaccatatctatagtatcacttacagcttcccttacaaaaggcagagaagctacagaacctgcctcagaacctgcataatgctcgtcatatgccataactacaacataatcaacatatgatgactgctcctttaaattgtaaaatttattatatgcctctggtttataattgtctgttgaaagaactatattattcttatgacattcaagtgcaagctctcttataaactgaagaaaatcctttgaatattcatttctgatattttcaaaatcaagattaattccatcatatccataagaaacggcatctctcataagtgtatctataagctttcttctattgcttcttactgagaacaaagttttataatctatatccttattaaaatcattgataagcggccacacctttattccatctgcatgcatatcattaacccatgccccttgtgcatagcttgaaacgtctccctgctcagatgtaacgctgtaccacgttggtgatatcacgttaactgctgatgcactgacaaggcctgctgccttgctgttaccacttatcccacctgtctggaaccatccaagtcttatctttgaatcagataaaacctttgcataatcctcaacataagtatcttctggtacatattcatatacatccgaaacatctttacttcttacatatcctgtataccctgtactggttgtaacctttatccagtcatcaagatcatcaacatagtaaagcatgcttccttttgctgctttctcaagcacatcactctttattccaccacgatatcttacatatgtatccttatcagccactacagctttctcttcacctgatatgctgcgtatgcatatcctttcaggtgcacttccatatgaatatgtacagttagtatactgtgctacatattcccaggctacatacttatcatcatttaccattactgctattggatattctgttttgtagctgttgttttcattatcagtgtaataatccttccctggtgcatactcatacgtccttttatcatctgtataaagaactgctccactttctgcatcattataaaacctcacgttgatattttctgatacgaaatcaactggaagataccattttccatcaagtttcatacccttatcttcgtatttagaaccattgattataataagagcactatccgatgtattatcaacattaaaatattcatacccatccatatactttttagatggtgaatattttctgacaaacactgctcctaccacaattcccgctagaattacagctgcagccacacctattaatccaagctttatttttgttttatccttacttcccataacaatctccaatcatatccagtgttttatcttatattagcatacatttttccaaatgcgaagtacttataatatggatatcacaggggaattagtcataacctgttcccctgcaataacctgtaagcgaaggaaccgcttttatatatccgtgatattataattttaaacgtactaaataagtttttaactgttacgtaatctttagaagttcaagaaaacttctaagattttcaccacttatgacaaatggatttctttcaaatgggataagaacaacttcaaccccatgttttttaattatactcaccgcttccttatcacatgcagccaatgtaaccatttttaatcctcttatatcaagaaatctttctattctttccatctttttttcacattctcttgatttccatgggagcatcgaccctgcaagaatcttttcatcacacgctgataacctcgataccatccttgcaaatgtaacatttgtattatcaaatgtattctcaaagcttatatccagtatgataacatcatatttctgccttaatattcctatgtcttcatcacgtattccacagtaataatcaatgccatccatactgtatgcatgccggcttgctatgcccttatgctgtatcgctgatgccttttgcatctgtcttagcataagactgtacgtaacctcatctcctgctacagcagttttcttttttaatacctttcccataaaaacagccagcattatacacatctgagttgtgcctgcaccactgcataaaccagccacacctataagctttattgaggttaatttcgctgatgttctgtattccttatatattctacggctttctttttttacatgtaatactttttcccccgaaacattgccagagcaccttaaagattttatatctgataatatacgccttttcatataataagcctaacttctccttttttaagtctgttattatattttcccatatttcaggcatattatcctgaatgaaatcttttatcaccggaataaattcttcattacatacatgccagttatacatacatggaatcctatagcacatcctgctatcagcgatatagtttacatattcatagtattgagttttatccataagatttaacataagcctggtgtcatatgtacagttgttaatgatgctgcactcattagcaacgccatactttccacctgcaactataatattaataaccttataattattaaataaactgcacataatatcttcatagttaactttatcagtgccatgtattccttcatctactattatcactttataacgcggactgcttttctcatcctgctgcttatagctgataccatctgctgcaaaatgtacacccttatatgtaaataatccgttttcatcaagccttccattaagcattatagcctgtatatcacttcttcctgatttttcggttacaacacagctgattccacattttccaattgcatatgctatgcttaacgcaatgtgagtaactcctattcctctttttgttccggatattcttataacatatgagtgactattaccttcttttgttttacccagtcgtcctgactggcagcttatatgctgtaatgcacaactcacagcctgtacatttctatatcttaactccggcttgtggcgtgtacatttcattattacctggtatattcttttatgacttaccctgctaaaaccgcttgcatccgtcataaacttaagaaccattcccacactgtatatatcagtacgttttgttggctgtgcaccctgatactgctctggtgctgcaaagcctggacttaacatactttgatcattcgtttcataactatataatgaattaccgaaatctataagcttaacattattgttatcatctataataatattatccggcttaatatcaaggtggattattccaccgcaatagttatgtagatactccaatatgttacataactttattcctatatcgcatatctgatttatatccagctttcctgattcacacacgaaatcacgcaaagatttaccagatatatattcttcaataatgcaaatacttatatcatcttcatatatgtcataaataacaggtatgtggggatgtttaagattcttaataagactggcttctcttatgatatggcctttatcatatgaagccttgttgataaccttggccacccgcaacacatctaatactgtgtgcctgaccagataaacactagaataactggtttttcccagttctttaataaactcgtatctttcgttaaactctttttctcacctccagttgattcagttctaatcactctgtttattttataacatatattaaatatattatcaatatcaaattttataatttttgtcaaaaattgataaaatttacacattttttattttaagtatgtgtatgacttctttacatatctatgaaaaatgagtattatatttgcatagatatgaatttactatgcatttcgcaggaaaggagattgttatgaagatagaaagagttaatgaaaaccagatacgttgcactctcaacaaggacgaccttgcttcaagacaattaaagataagcgaacttgcgtatggcagcgataaagcaaaagaacttttcagggacatgatgcagcaggcatcctatgaagtaggttttgaggctgaagatattcccctgatgattgaagcgattcctatctcggctgactgtattgtgcttatagttacaaaagttgagaatccggaagaacttgatacaagattttccaaattctctccttctgatgatggagaatatgactatgatgatgagtattcagatatggaaactatcgatgacagctcttcatatactgattcatcagttccaccaacagcaggggatgagcttgacatagacaccaaacagactaaatcagaaggaggagttatcggtgatgatcttatgaatctgttcagtaaggtacgtgagtacttaaacaacacgaataagacaccagataacacttcattgccttctaaaaacacagatgagccagctgataaaaaggaagctgaggaagctaagcctgtgataaaaaccaggatatattcttttgaatccatggatgatttttctgatgcctcaagagctattgctcctatatataacgattctaattcattatataaaaagccaggttcagatagatattatcttattcttaagaaagagggctgctcatcagtgaactttaacaaagtatgtaacatactttccgaatatgctgctaaagaatccttcactgaggattctgccgcttactttaatgaacatggtgaacttattatcggcaggcatgccataagagttgccgcagcattatgattcatgtcgaatgcatataataaaaggtcagaagcttataacttataaaagcttctgaccttttttattgtcatgtttatgacatattatttttataatgtctgatgtctttattagcttaatgaatcaagatagctctggatttcttctacaagcatatcaccatcaattccatgaaccatggcagcttcctctaatgtttcacctgctgatgatgggcatccaacacaatgcattccagctcccataagaataggaattacacctgcatcaatctgtataacttcaccaatagtagtgtccttattaactcttgccatattagtatcctccatatattctttatccgcatattaagctgcacatgcatagattactgtaaaacctgccactatccagccggttaacataaactataataacggcgtataatacccggaacgtatatcttatatataatattacgttagcagacatacgtcaatcttaatgttctaatttgcataattttcataattcttatgcatttattcttatgatcttaatctaagattaatatttccataaattctattaagaatacatcaatcttcttgtttttttcatagcattatcgtataatgttgatactataaatccaaggaggaatattattatggcatatgtaattaatgatgattgtatcagttgtggtgcttgtgctgctggatgtccagtagaggctatcagcgaaggtgctgctcattacgaaatcaacgcagatgcatgtatcgattgtggcgcttgtgctggtacatgtcctgtaggtgctccaaacccacagtagtttgaagatacattactattaaatcccccggaatctgatgattccgggggatttttatatagctgttatatagcatttacatatctgtttttatatgacttattctgaaggctattttacatagctattcatatctacataccaggattctttgcaagatctgcaaaccttgtctgctctggtatccatgccatttttactgttcctattggaccatttctttgctttgctatgattatctcagcaataccttttaactctgtatctttattgtaataatcatccctgtaaaggaacataacaacgtcagcatcctgctcaatagcacctgactctcgaagatccgaaagcataggtctgtggtctggtctttgctcaaccgctcttgaaagctgcgacagtgtgacaaccgggacatcaagttctctggcaagtgcctttaatgaacgtgatatatctgatatttcctgctgtcttgactcagtccttccactaccactcataagctggaggtaatcgatgattataaggccaaggttattctccatcttatacttacggcacttagaccttaaatctgctatagatatacctggtgtagcatctataataagctttgatttggctatactatcggcaccttctataagcttgccccagtcattggaatcaagccggccctttcttagcttatctgcatcaactgatgactcaagtgaaagcatacggttaacaagctgtacatctgacatttccagactgaatacggctgttgttatgccttgttttatagcaacattttcagcaacattaagtacgaaggctgtcttacccatagatggtctggctgcaacaagcacaaaatctgatggctgaagtcctgaaagatagctgtcaagatccttaaaaccagttggcacacccgttactgctcctctgttcttggctgcggttgatatcttatcaagtgcttcaagaactatcttatctataggattataatcactttcgcctttatttctgacaagttcaaatattcttttctcagtttcctccaggatatctttagtgctttcctttccagcataacagtcatttgctatcttttcattaactcttataatgttacgaagtatagacttatccttaacaatagaagcatactgacgtatattagcagacgttggaacggctgataacagttctcttatgaactctatactatatacctctggtggaacatctttttcttttaacttttcctgcaatgtcacaatatcgacagtctttccttcgttgcacatttcaaccatagactgaaacattatgccatactgcttgttatagaaatcatcacaaacaagcatttctcctgctgttataatagcctgcctgtccattatcattgaacctataacggactgctctgcctcaagactgtttggcataattctggtaacgcttatatcttccatagttcctcacttataattacttttctacaactttaactgtaagtctggctgtaacatccttgtgaagcttaagagctactatatgtgttccaagtgtcttaataggttcatcaagcttcattttcttcttatcaacctcaagtccaagctgttcttttgcagcaacagctatttcctttgttgagatagttccaaatgtttttccaccttctcctgtcttcatagaaagtgtaactgacttgtcttcaatgcttgctgcaagctccttagctcttgcaagctcctctgctgcttctttttcttctcttttcttctgtaacttaagatcattaagattcttaggtgttgcttctatacctaacttcttaggtaaaacatagtttcttgcatacccatcatttatttttacaatctgacccttctttccaagagttcttacatcttctaataatataacttccatgattgtgcctcctataactattgttatgccttttcgcttttttcttatatttctccatcttcaagcattttatcaagagtgagttttattgtattaacggcctgttctatagtgcagtctgtaagctgggctccggcgatactcatatgaccacctccgccaagcttttccatgacaagctgcacgtttacttcatctatagaccttgcacttatatataacttatcctcatatgctgttataacaaatgatgcctttatacctgatatatcaagtaactggttagctgccttagcaccacctatcgtagggctttcaagaccagttccatcaaatacagttatcgcaaacgcgttcttatacacctccgacttacttactgcagaagctatggccttatattcattcatatcgttacgaagcattttccttactcttgttacatctgctccatgtcttcttaagaacgctgctgcctcaaatgtacgtggtcctgacttgctgttaaaaccatctgtatctatagatattccagcatacaaagcatctgcttcaaatgcacgcagcttaatcccatcatctacatactgtatcatctctgtaaccatctcacatgccgatgaagcatacggatctacatatgaaagcacagcacctgttatcgtatcacttgaacgtctgtgatgatcaaatacaattactgttttacacttatcaagaagtataggacattccactctctgtgcccggtttacatctacaactatgacaactgttgatggctttatataactctccgcattatccttacttataaacatatcatcaggatactcttctttattaatgaagcggttcataaagggccttacacttgtggaaacctcaccaaacactatatgagcttcctttccaagcttctttgctataatatatataccaagtgctgagccaaatgaatcaatatcaggaaggctgtgccccataatgagcacattatcattcgcctcaagaatctgccttagggcatgtgcttttacgcggacctttactcttgtattcttctccatctgctggctctttccgccataatagtatatcttatctccgtccttgataactgcctggtctcctcctcgtccaagtgcaagatccattgctgccttagctatctcataattccttgcataatcattagcgcctgtacctataccgatactgagtgtaagcgttttttcattgccaacctttacactttttatatcttcaacaagactgaacttatcagaaagtatccgttcaaggaacttatatctgaacacaaccagatatttgtccttctccatctttcttataatagcagctccggcagaaaaatacttgttcactcttttatctactagtccgacaaaaagcgatcttcttacatcatcaacactttcaagtgcatcctcatagttgtcaatataaacaagtcccactacaaatctttcatccctgattttctgaatgtacttattgacatctgtttcatcaaacatatacatggcaacaagtgatgaattatagtcccttgaaagtatatttaccccctgagtaagtatatctgcacttattcttttcatctcaatcttataatctctatcattaagtgcaactcttacttctttataatcatcaaaatttctgaatacattcgttgaaagttcaggaataattgttgatatattcttattgtaatcattctttttgcttatacagtgctgcatagcagaattcatccacaatatattacctttattatccaaaagacagtatggaatactaagatcatagagcaattgcctttgaacctgtgaataattagaagaaaactctacgatttcttttataattcttggcctgaagtacaatatcataaatgcacacacacatatatatacaaatgtaaatacagcaactactgatgccgcaggtatatttataaaatataatataaaatcaattatgataagtaatattcccaaagctataggccatacaaaaaccgaattaagtcttccagaaggacggaacgacttttcctgcttattattcataatatctccattcttatgatgattaaatcaacataataatacaattccatataatatgttatgtcagttgactacatgagttgcaaaacaatatagtaatcctaatgcaaaagcataataggattataacatatgttgccacaatagggaagaggaggctcctcgaatataaaaacaagaattgtcttttaactcgtaacgatgagtcatatagcaattctggctttgccataattgctatatgacagtcgcggtgctcctcgaatataaaaacaagaacccaattattcctgcaagcaggataattgggttcttgtttttatattctcatcgttactcgcgcttattctactgtgtatggtaagagtgctacgtgtcttgctctctttacggctactgtaagagctctctggtgcttagcgcagtttccagtgattcttctaggaagaatctttcctctttcagatacatacttctttaataaagcaacatccttataatctaatgccttgtttgcatcagcacaaaatgcacatactttctttcttctgcgcattggtcttcttctcatctgaccctctggtctttcagccttcttatctggcatgttaagttacctcctatcttaattgaaaggtaaaccctcgtcttccacgctatcaccatcaggtatattcataaagccatcaccagctgcagcgcttggttcaggtcttgatggtgtatatgctgttgtaccagctgcggaagaagcggctttactttccgcaaattcctgttcttcaacaacaacatcagtagtgtagaccttctgtccgtccttattggtataactacctgtctggatacgtccagtaacaacaaccttagttccctggtgtaaatacttctcagcaaactcagctgctcttgcaaatgcaacacaacctataaaatctgctgtctgatcatcaccagcaccactatttcttgagcgtcttctgtctaccgctaatgtatatctagcgattgccatagaaccatccgcattctgtgaataacgaacatctggttctcttgtcaatcttcccattaatataactttgttcatacttaatctcctcttctataaagagttgaaagcctaaacgtcaattaattattctccatcttttacgattaagaatctgataacgttttccataatacgaattcttgactcaacttcagctggtgtagctgcttcagcttcaaacttaatgaagttgtagtatccttcgctcatatgctggatatcgtatgcaagcttcttcttttcgcatgtacctggatctgtaattgtaccaccgaaacgagtgattaattccttaacctgctctatagtagcgtttcttacttcatcctcgacgtttgcgctaacaactaatgctaattcatacttattcatctacgtcgcacctccttctggtcttttggtcccttttattcaaatataaaaagaacaaggattataatatcacgaggtctaattctaacatagattcattctctttacaagtctttattttcttttttttgtattttttttgtatttttttcaacaagtgatctttttaatataatctcatgtgaacacccacaacaacgaagcttaacatcagcacctgtttttacaatctgccattcatcacttccacatggatgcttttttttcatttttattatatcaccggcatccagctgaatcatttcattctcctttaatacactattctctcattataacaccagacacattacagccattctgttcaagctttttaacaagtgcgtttgtatcatctatagaatactttttcacgtcctgtattataacagttcccgcacaatattccgcaagtattcccgtatcatctgaatccactacgatataatcataattttgattatatttgtcaagaagctttctaaatgcttctttctcttcctgggtaacaataccatcttcggtaattcctgtaaatataatatcgagttccttgtgattagtcacacagacaagctcataatcctcatctggattcttaagataatccataacacctctggcattttttccaagcttatacttacctaagaacacatcacttgtgatatctccatctacgaataacaccttatttccagcttccataatgctataagctatcctgaatgtatcaaccttaccacctatgactgctactgatttacctgatgaaagagcttctgttatattatgggcaatctgaactaagctctcctttttttcactgtcaatgtccataagtttatcaatattcacactatacatacgacaccccctattttattcttttatcgtacctaatatacggtaattttccctggaagcttcctgtatatctgctacatctgatgaaaatgtcccagcagactcccttaacactttttcaaccgtttcttcgtcatcaatcgtagccgctgcctgatcttcaatctctatgttctttaactcatcatccgataattcatcaacaatactcatatcttcatcatctttagttttgtcattttcagaatctggatattcctcatcatacatgcctaaatcagcttttatattatcacttatatcatcgtttaaatcagcttttatattattgtttttattatcgcttatatcatcatttaaatcggcacttatattatcgtttatatcatcttcatcattttctaatataatactgcctttagtatcatcagctttatcatctgtatctttactacctgagtgcttatgttttttctttttcttttcttcttttccttcattgaaataatcactcacttcattctcaagcttttcaagaatatcctcttcatcttcaataaacgatggcttctttttcacttgttcactatcattttttatgtgtctgctgttaacagtatctgcgttatacaattccgttgttgaattatctttgtctgtctctataagctgtggcttatgatctatgtaatccatacgtccaaaacgtctttcatactcatactcatggttaaaatcatcttccttggacttaaatgcactcataataagacatactattatctcaataaacatacatacagcacatgcagttcctgcaataatgcctgtattcttatataaatcaggcttaaaagatactccacttgatgttccctctgataatatctgtatagactttaccggtattatggatgttgtcttaatagcggtagatgcaacagcatcaacatacttctttgcagtattctggtcaggattaacacatttaatttgcactatattactatttgcaggtgaagataccgtaagatactgtgcgatatcctcagaagttcctgctatcctctgagctgccgagattacaacactgcttttaaatataattgtaaaatcatctttaagtccaccattattagccctgatagatgcttcattctcctcgcctggtactacatacaactgtgttgttgactcatacataggtataatcttcttattctcataaacatatcctgctgcaccactaagaattgcaacaataatcaatattaacacacatcttgaaaactttttcatctattattctccttcttccggatagtaataccaccttatggcagttatcgtcccattgttgtctatatcaaaagcaatctgtgcaaaatcatcatctacagttgctgttcctgatttataatctggtgaaaaatatgtcagttcaataatataattctcagcatcctctaaactgtcatatccattataattaatcaggccataggatattgcatccttcgtatttatcttatcaagatcatccatagtaaaacttccataaagataattacctaaaactgctgttttatctgatgtcatacaataattgtttctataatcagtatctctgtaataaacccttaatatagaatccgctgacattccgaccttaagtcctcttgcaaatacatccttatcactcacagatgcagctgccgtcagcctgtatgttcccgactggttctttccggctgtcttacccgaatcatcgaattttacaaatataaatgtaagatcgttgtacgcgcataccttctctacatataaggtatctgcattattttctttttctgtagattcatactccgaaaccggtgttccgtatatattcttcacatcattttccgacatcatatatttcaatgaattgaccgtaagatcagaataactgaatttatctgctttactcgtttctactgttggatattcctgatagcttgttatatcctccgaatcatctgttataacagcctcgacatgctttccacatgctgacatgccaaacagcatagtcatactcagtacaattcctgcactttttctaaaaacactgaatttgctcattgttttccccttttatatacatttctataaacattcagatacatggtcacagtataacatatttgtcagttttataaaatacaaatgcataaatttgtcaatttcatgtggattgtttatgaaacaaaaaaagtcatcccacacagtgagatgacttagaggcgacaaccagattcgaactggtgatcagggtgttgcagacccacgccttaccacttggctatgtcgccatattatattctattcagagtaagaacaaaaaatgactccaaggggatttgaacccctgataccaccgtgaaagggtggtgtcttaaccgcttgaccatggagccttattaaacaagctagaaggacaagtttcccttctgtatggtaaatcatattagttcttacaactccccgagtagggctcgaacctacaacaactcggttaacagccgagtgctctaccattgagctatcgaggaatataattaaaggattgctccttcaaaactgcacattaaatattctatattatacatccgtattctgtcaagcactttcgtactcttaccttcaagaataactctctttgtt

SEQ ID NO: 332 - DNA, 201 bp, Unknown
  gut microbiota DNA sequence
ggtcatatccgagcagaggaggtgtaaggaatattccccgacgaaaacgcatttcaatggaagaattcataatttcacttttggtatgactttcttcctgcgcaagtgttgacatgaatgacagaatcatttcgcttttgggatcaagagtatttaaatgctctgtttcaaaaaatacaccgacgggtggacggagtgaag

SEQ ID NO: 333 - DNA, 242 bp, Unknown
  gut microbiota DNA sequence
ggcacttcgcttcaacatagagatgcattcaaaaaaatgattgaagattgtgaaggcggaaaaattgatttaatcataacaaaaagtgtatcccgatttgcaagaaacgttgttgactgtatccgatatgtacgagagctttcttcactccgtccacccgtcggtgtattttttgaaacagagcatttaaatactcttgatcccaaaagcgaaatgattctgtcattcatgtcaacacttgc

SEQ ID NO: 334 - DNA, 23848 bp, Unknown
  gut microbiota DNA sequence
ctgtaaaataaggaaagttcaggaaatctctccacaaattccgatttatctagctaaataatatcatacaccttagtttttaaacatttgctatattaaccaatttagccagaattacaattctcttattgttatctcttgtatcacaagtaaccaatgtcattaatcgatcttctttatttactgaaacaccagttttatataatcctctattaatggaatctgatataaaggcattaatctgcttatcaagttatatgcagtaactacatagacaaaaattgctacacctgcaaatatcatagcatctttctttgcaccattatcataacactcccttgcattcgtcaaaaaggttaatcccataaaaacaaacataattggcagtgttatatcagtagacactatgttcatcagtccaagagaaccgaatataatggttaaaacactaaatattgctttcttggtacgcataagtacttctccttccaacttctgtttcttttttagatacactcatttattcgagattttttataactaagttgtaattgctatcataatgcagtccaagttctctacacattctatcgtttaccttatctaaggctttcttgtattctgcgtactgtggagatagcaccatcaaattaggaatgaatatgtcgttatatcctttatcttggaactctttctgcatttttctctgggcaataaatgacggatgatatttcataatgccagttttcattttagcacctttctttaccatttcttttaatttttcatatttgctttcactcatatcacgataataagctatcatctcatctgcagttcttgtttccggtgcaatctcacctgctatttttacacctattcccataataaaaggaactttcaatgtcgtttcatcacaatactctaatatgttccgtaaggcttgcttctgctccagagtctttaatctcacattaagaaatggtttgaagtgactttttaagtaatctccccattcttttcccggtaataaagactcaatcgcattttcgacagtttggtaatcaagtatctcatttgccttgtctgcattaccatcatctataaattgcttcaacgcttcaagttctgagtcctgtaaaattttttcctgtaatttttcctgataaatacgtaaaagaatacttttatcatctttttccaaaagggtttgtatatctttaataccaatcccaagctttctatataccgaaattttttttaaagttttaacgtcttgcatggagtagtttcgatagccgttgctatctttatctactgacaacaatcctttttcttcatagtatttaactgcacgctttgtcattccgacttccttaataatttcatttaataacatcggacacacctccttatgatgatagtataagggtgtacgttacgtacaagtcaatatatttttgaagttttcatttcaatcatacaaattcaaatcttctgttgctttcagtctctgccgaagactgaaagttaccttcactttactatttctaatagttttctcacataatcatctgcgtggtttattgaaaactctccatgatacatattaggaagaacttttataaaactatcctgcaatttttcatgaatgattttagcagattttttcattgattgattttctttttctccaacataaatttgaacggttgcttcacactctccaatgccatcttttagtgaatatactgagttttcctgtaaaaaggcaatcatatcactctttctaatagcacaagtatctttgtaatattcatcaaacaaattcgactttattcgtagtgatttgaattgcaattttgaaaaccacttatactttattaagccatagcaacttccaaacgccggtttaatcatagaatatgtaaattttgaaggtataacaagtacactttccactattgcatacttacatatatctttgcgttgagataaaatttcaagcaatcgttgtaaactgcttatcacatcctgcatgaccatctaatataggcaaaaccacatgataatctgtttgaaatctttcagcaacctctttcacctcgctgtaaacttccgattctaatgtctctattataccataattatactattataaaaaaggaaaaagagctccttcgagctcttttgagtcagttcttcaaacttgaatttgcacttcctcactcgtcttcttttttattgtttctactaatattcgagcttaacgataaaattccagagcataaaaataatacccacattataatattttcttgatttatcgcactataaatcaagcatattatgcttaatataatctgtacaattgaacaaatcactcctattttttgtgtctttttatccatcattgtctcctccataaattccgatttacacatcaaatcgttttcttcattctatcacatggctcaaatgcccttgttttaatttcaattacaacataacaatgcttctgtatattgtaaaatagcatatctataaactgttccgtctgtcctacaatcaaacgatattctcttccaacaaatgcaaaacctttccctaattccaacaaaaaactttgtatattattcatcaatgcatccttcagttctttctcatcatatcccgcacgcatagttaaaaaatcgaaattatacgatcttttgttatttcatttgccgaatctgttcctacacctggtaacattttttcaaaattggttatggctttcccgtctatttcatataaattggtatccagaaaattcataagtactgctctgaaccaattattattcattgtttgtctcacaaaatacaatgccttatctctattgcctttgcattttgtcaaaatctgaatatgatgcccccaaggaattttaaaaattatacccacttcagaatctgcaacaagtttaattgtgcaatctgaaaattcaagttatggaaccgaccctttttgcctcggatcgtattacataaaaaataacaggaaggcagttcattaaaccgtgctcctgttattttttaccattgaggtttctctttattcatatctttatctgcatcatttcaaaagagaatgacggagatatttcgccctgcttattcttgtagcaaccaatcggctatatcgtgaatttcgattccttcatagctatattggggatgtttggttctggcaataatcattttcggataagcatctcgaatctgaagcagagacgagcattctctctcaaaggtttcctgaccggaaatgttgtcgctgacctgaatataaaacttctcgctgcctctctgagcaacaaagtcgatttccttttgatagagcttgccgacataaacatcatatccacggcgaagaagctcgatgcaaacgatgttttcatatactctgccataatccatatttctgcttcccagtattgcatatcgaatgccgctgtcacacaaatagaacttctcagcgctttcaagatatttcttgccacggatgtcatatctcttaatatcataaaatacaaaagcattgcacaaatacttaatgtacttgccgatggttacatgattggttggggtctcatttgctgtcagtagctgactgaccttattcggagaagtcaggttgctgatattatccataaggaactcgctcagacgttgtaaaaccaaagtatccgggagagtatatttctgtaccaaatcccttgtaacaatcgtttcgtagacctctttgatatagtttgctctgtctttttcggttgtataagcataggaacctgccaaaccacccttgacagcgtactcatcaaagagcttatctttgtcactaatatcatcataatattggcaatattcctggaagctgaaaggaaacacatgaatttcaatatagcgtccagtaaacagagttgccagatctgtactcaacaggaaagcattagaacctgttacatagatgtcgtatttttccttagagtacaggctattgattgccagctcaaacttgggacacatctgaacctcgtctacaaacaggtagttcgttctgccttcctgataatgttcttccacataggcgtgtaaggcatggtattccttgatttcttcatacgccaaatccatgaagtcgatgaagataatattgatgttttcaaaattgcttttaagatacgcaatatacgcctgcatcagttttgacttaccagatcgacgaatacctgtaatgatcttgatgtcaggagtacccttcagttcaatgattctatcgagatattttgctctcgtgattgttttcatatagccacccactttcaaaaattgaagttttttcatttctcgaaactgcttcgctgtatttattatactgtctgctaatagtatatgcaagatgtcgctttcaaaaacacaaaattttttattttttgaaatcggaaactatgtaaaggcaacccgaaggctgccccatgcattagccaacagttatcattgaaccatcgctccatgcgggaacaccgcccttaatttacttggactttccactcaggtaacggctatctggtcctatatcagtgacgaaccttataaaacctatgaatgaaattctacaaaacttgaattctcctgcctcacattgcacttcaatcactataaacaaaaagcagcaaatgaaaatcatctctaatctccatctgctgccctattatagcgttccctgggggaatcgaactctcaactgccccttaggagttcaagtccccacagaaaatctatgactagttagattaatataagtcaaggaaagacttggcttaacagtgataagaaactaattcaaacttattactgttagccgatggattcaggtgtgccaaagcattgcagggctggaagtattcagcttcggcaaaagatatgtaaaacagagaagcgcccgtagtttctttcattatatcagaatatcagaaacggggggattttgtagctttttgacagctttccttgaatcttactttgcaagtacaacggaaattttgatttccttttccgtcttgctcaggtcgaacgcgccgccgtccgcgacgctcacacgcagctcatacagtgtgccgtcagaaagcgtatccacggcgctgcctgcttcatccgtgatcgaccacagttcgttgctgacctttgccaacattccgtccgcaccgtaggcatagagcttcagtccagcggcatccccggaaagattgttcatccggaacgagaccgtcgtgttgtggtggacgttttcgactgtcacggtgttgcgccagcttgcagcgaaatttctgtaccgattgttattttgtatacataatctcatctgtatatgttataattcaatataatacttcatgtctaaagaaaggagtttacgaatgaagaactggaaattaggtactaaaatcacactaggcattaccatcatcgtaatcatttgcatgagcctgctttaccttactgcaaataagacaatgactggcatgatgcaggaatctgagcttaatgttatgaaaaataccctgaatgcccaagcaagtctgctcaacgaatacgtcgcacgtcaggaatccatcctcactgcttacagtaaaacaccttgtgtccgcgactttttaaaggatgtcaataattctgagcagcaggcaatcgtgcagagctatacagaggactattatagcggtcttaacaactgggaaggtatttatatcggtgaatggaatacgcacattgttgctcattccaattcaaaggtaatcggaatgactacccgtgaaggtgatagtttaaaagccctgcaggatgccatgacacaaagaaacggtctgtatgatgccggtattattgtctccccttcctccggtgaacttattttatccatgtactgccctgtatttgatacagatggaaaaacaatccttggatatgtaggcggtggaccttttgtaaaagagcttgaaaaacagttatataatttaaaaagcgaaaatgacaccctccgctactatatggtcaataccgaaactaatatgtacatctttgcagatgacagcagtttgattgccaccgatattcaggatgatatgctgttaaacattattgataaaattaaatccggcgaaaccagtggtgatcttaactacaaaaaaggttccgattcttttgtggcaagctatcagtctatcgcagaacatggctgggcaatggtttcttatgacagtgaaaagaacatttatgagaacgtccacaaaaatatgcgcatcttaggtctgatatgtatcatcttcgttttaatcatcagtgtactggcatttatcacaattgcaatcagtgtcagacctctgttatatgtcgaagatgcaattatccaacttagcaatttaaaacttgaaaagagcaaacgtcttacgccttggatcaataccaagagtgaaattggaaaaattgcaactgcaatgaattctttatatgatgcactcagtggcatcattgccactttatctgactgttcaacatcacttagcagctctgcgaccgcaatgcaacgttcttcagaaacactgcttagttgtgtggcagacaactcaaaatccacgcagacatttgcagaacattcagaagatattaacgctactgtaaacgatgtaggacagcagatttccgaaatgacaacggttgtttctgatatcgaagaacgtatccgtcagggtaatgtccacagcagcgagttacttcaaaaagtggaaaaaatgcagaccttagctaataattccatggtaaatacaaatacccagattgcagaaaatcaaaaagctatcgaaaatgcaatggaaaaattacaatcattaatgcgaattgatgaaatggcatctcaaattttagatattacaagccagacaaaccttctgtccttaaatgcttctattgaagctgcaagagttggagatgctggaaaaggatttgctgtagttgcaggcgaaatcggtaacctcgcatctaattcatccaaaacagccacagatattcaggctatctgtaatgaaactaaaaacaatatatcacatgtcaaaacttgtttcgatcagattattttcttcctgcaaaatgacgtccagacacagtttacagaattggttcaggaaacccaggattactaccaatccattcaggaaattcaggttattatatccgaaattacagaagagtctgaaacctttgtcaacacagtacaaaatattcaaaaccagatccatgctatttcagatgttcctgattccgaccatatcagcagtcaggatatcttagaaaaggcaagacaaacagaagaaacgacacaggaaatgtccgttatcgtaaatcataacaaagaaaatgcgttggaaattaataatattgtagaacgcttttcctgaaaaaataattaatatcatatgccaaaatagatgtacatccacctgttcaagtgatcgtacatctatttttatgtgtcaatttttttcctgatttgatttatcaatgaaatatctgtctaaaaaaacaaaatgcggtgctttctcctgattgagtaacaccgcttggcttactgcccttattcgttttgatttctgcaatgtacttctatctcctttctgcccctgtcgctgtaaatgtattttacaaataaaaaagacaaccaagattttgtttcttaattgcctgtttctatgctattaaatttttattgaaacgatagccgactccccaaacagtctgtatgtagattggcttgcttggattatcctctatcttctcccgaatattccggatatggctcatgacgatgttgtaatcaccggaataggattctttccagactatatcataaatctgttcctttctgaacactattcccggatgctttgcaagaaacttcaagatttcaaactcggtatatgtaagctctatctcctaattctcccgaatgatcacccgttgaacctcatcaatcataagacctttgaaattcaacagatgattattcaaacctgacatctgagtgatttcatctctggtatttatcaacgataatatgcggttcatcatatcatcctcactatcctcaaatgtcagaactaacattttcccatacacatcacctgccttattacatttatctactgctaaagctcgggtcaatacaaaagaataattcctatatccaaccaaacaatgtggtacttgatatttgatctttcttatttatttttcctatatgctataaaggaaattatttttccggttgttccaaactgctatcctctcaacaatttgttattctgcaactctataccctgtttttgacaacaactctattgcttttgaaaaattttttgattttattaaaacataatccgtattaaacgtagatatagcaaaaatgcctatattattttctgccatcaggcaagatatttttaaaaggattccgattaaggaaaaatccaatgttccctgtattctgaatgccttccattcatcatctctctgtcctccttgagatatagaatcgaaatccttttctgcaattactcttaatctgaacttctttccttttgcaaaaggagtgaataaagcctttccctcttattcaccccctcatattcataatttgtttaagaaattactgcattctttctcctgtatgtatcattatctttctggcttaactccccctcaatctgagccagctttttctccaataccttaaccttttctttatcccccgccgcagcctttatctgctgttcaagctgtttcttttcctccttgagtttctcaatctctctgtcaacattatctgtatttgtcgtacatttctctgcctttttcgctggctcctcctttggctgaacatctttcgcctttgcgactctcttaggatcatcatacattactttaggattaccattttcatcttgccctaaacgatacagaccacttggcttgctaccagatttttcgctactaatatactcgtcctttggaacgggaataccttcgtttttatcctcccccctttgatcttgtgaagattcttttactttatcctgccctgtctgtaccctatctaaatactcatttttgtaatccttataattactgcttatttccattgacataaaacgtcctccttttctttaatacactataatgtttttacaatctcttattcgtcattcatatatctgtttttaacagatttgttgtgaaatgctttctgattgttgcggaatgattaaaagaacacttaaaacaaatatatctccatctattcttacttccattgctccatgatatttttctgcaactgcttttatgttagcaagtcctgtcccactgcgaatgctccctctcccactatggctattaattatttcaattaaaagaaaatcaccttgcacttttcctgttatgtgaatatatttctgattatcatggggcactcggttacaagctgagatagcgttatctaatgcattagaaaaaataatacaaaagtcaatatcagcaattccacatggatatggagaaataaatgaacattgtacttctatctgattgctcttagctatccctaacttatttccaattaaaatatcaagtacagggttatttgtacttaccggaaatgacatatctgctgttaaattttccatatcactcatatactgcaatgctgtatctatatcgccattctgtaccaattctttgacaatagatatatgatttttcacatcatgtcgaaatgcttttgttttctcataacgtacttttgcttcttccacatactgatttaaagaatgtttttccagttctaataaagatagctctctgctcaatttaaaactatccactaattttttatacgcaaacatgatgcaaaacagactggctatccccaatatctgtataaacagtaatggaaacggacttatgctaggtaaactcccatctgcttgtatcgtaatcgtatgtccataaatatttgaactaatatattcacttaccaaaaaaatcactaaagtcggtattaaaatcagaagaacatattttgccccaacgttttcatcatatgaaaaatttttatttatgacctgataacacaaaacagatgtaacaagagctaaaatactgctcattaccataaataaaacgctaaccgctttaggattttcctgaaaaaacaagggagataaaatacacgaaatcgaattaaaaactccatagcataagtgcattatttcaatcattacaactgcatataacccgacaaatatattgtatgttctacatataaaaaatcctcctgccatcaacagcagaacatataccaataattccctaatactgccggttggaaaaaacatcataatcgtcattccaagaaagacaaacaatatataataaataaactttacctttttcttaagaaatctggtaaagaaatgaaaaaccgtcaacatttcaatgcttcccataatatatacattgaaaatatctaatccatccattctttcacactctccgttccttcatatatttcaaaacaacacttgaaaattccttgctccgtaagcgtgatacaggtatctgtttgtcatttatcatatatgccatcccatttttataacttttcagatggctcaaattaattaaataacttctatggcatttaaaaaatctcccatctagttttgtttcaagattttcaattctgtcatagtaatcaataacttcctccgtttttagatgcagatatatttttctatctataatttcacaaaaaacaatgtcatcaaaggcaataatattactctcgtatcccttttggacaagcaaacttgcgtcttttgcattttgcatagcagaaaataatctctccatcgttttttcaaagcattcttcttcaatcggttttaccagataatcatatgcctggacttcaaaggattgaaacaccatttcctttagaactgttataaaaattaggtatcctttataattttgactacgcatcttccttgcagtttccatcccatctattccatccatttgaatatctaagaacagaatatctatatttttgttgtgtctcagtaattcctcaccactcccgaattgtgaaacagttatttctacgttttttctatgaaaaaaatcaaataccagctttttgattttatctaatatgtatttttcatcatcacaaattgctatgttaatcacacgaccacctctttccttaagaaatttattttagcatctatcctcaagtgaaacaattataatgctttgaaatgtaactgtaatgatgtgtaatgatgaatagtctaataaatatatcggtgaattcttatcaactttaaatttgcctattgttttcgtctgaattgattttctccatccgtaaccttgcctgttccctttgttcgtcacttaaccttctcggcttacgataaccacataacaggaaaaagcagatagattgctacctgctctttccataaacctttataaacttgcttcctgactcttggtctttggtttctctggttctaccttttcctccgcttagagtaatacttcccacaccacacaatcctgcaacggaagctctgcttacagtcatgcacacacttcttgcactggtcattatactgtatcctgttcttgtcattcaaaaagaacacccacaaccgtttttcttttttgcccatcctcgccactgtggtaccctctttcaaaatgttcaaattatgtagccttttttccgttttttatgccctttaagcgtgtcaaaagatatgcaaaggcatatttccctgtcacttcatcaggaacgccttaaatcgtcaatttcctgtcagaaaaggcaatcagtattcaaactgattgccccctcagatgttgtgacactttcttattccgtctgtatctgccggaatgctgcttcaaaatgtgctaaagccttatccacaatccagcagaatttccatttatccaacaagtgctgatacaagtcctctgtattgtcatagttggaattattctcaaaatatccgtccatgtaatactccagtacaataaagccgaacctgacatcatataccacacacatatctccacttttcgtatttctcatcataagactcctgggatgcaagctccaccatatgtcccacacaccatctgacaatataaccattgccctccaggtatccgtcttctctcttatctgcaccgatcaccttcgctatggactgcgccaccgaaggcttttcggcaatcactaatttatatgacattaaaagtcctccttttgtggaaaaaaaatagcaccttaaccttttggctaaagtgctgtgtaaaatgattattaaattgtttgtgaatcagacaaattggaatttatatacctaaatcattgctgctaaaacaaatgttccctgggggaatcgaacccccaactgccccttaggagggggccgttatatccatttaactaaaggaacttctatacaggttctatcaacctaccaactgataaaaccttaggtattataccacatttacatatacgtggcaaacatatatttcaataatctacaaataatctgcaaataacatatatttcaatagtctgcaaataatctgtttaaactttacattcaactttacatttaattttatattttatctgttatcccttaaatgcaacacttccctgcagccatacctgacccttaaatcttcttccaaccgcaggttctccaagcagatctgccttatttacagcaactgtcatgctaagattattacattcaataaccataatatatacggtttccttagtgtagtgatttatttcctcttcaagttctaatatttctcctacaacctgatactggtcacattcaacaccacaaggcataaacgatgaatcaactattgaaaatacatcttcttttaatatacgttgtgacagctcattatatgtatcaatatcctcaattgtcagattctctattgctgtctcatcacccttcttagctgcctgtataagtttttccctttcatcctgttccttctttgcctttactggttctacttttctgtgagaaggcaggagtatcataccacctatagagagtgcagtcagacttacctttttatttttaataggtattctatatacggaaccttttctatcaatattatactctttctgcttaagcccatccttatcaaatataaattcaaggtaatccataacattctgcagataaaatataagagtaactcctgttcttgactcatcacatacaactgcaaacgactccttatcaagatgcctttcaatggttatctcatcattgtcacagcttgttttcccaagtataaaaggaaaataatactcatatataaactcatcacccttgaatcttccatatatatacaatcctgttgattcacttactcttactattacggctcctctgttaagttttgtattctttataacaaaacccttttctatactgtctaatattcctgcgtgaatcatctcttcttcaaaatccgcatcaagatactggaaccctatagcccttatatataaattcataactatccttctatttatagatatatatcttattttattatagtcccatatgacatatttattatacacatatatcacatattttaactatacaatctttaataaaatctactccgtatctactataaacaatgtaagatacttcataagatctttctctacgtcatcattatatggggaaccatctgcatgcttaagcatctttataactggtctgtccgtaaacttatgattctgtcttacaacaacacccatttcaccttcacttgttataacatttattcccactggatatacagcaactgattcaagcaatttatccgttattgtggcatcatacttaataccctgattggcctttatgtattctattgcttcatatattttaagctttgttgaaccaactccgcttatgagactctcaaaatcatcacataaagataccagttttacctcggtctttattttatcgcccttatgttggaatggatagccctttccatctattctttcatgatgaagcagaataatctcttttgcaatatctggtatccagccctcatcctgtaaagaactgtagccaaatattgtatgtttcttatattccagtgcatcctttacattcatatatgtttcattggtattcatatatggaactttaatatatctaagtcctatatcatgaagaattgcacctatagatatatttcttacctgcttctcgctcatctttaatcttaatgccatgattgttgataaagcacatacatttatacaatgtgtgtacatatcagtagaaatatttctcatctcagttatatttgtaataacctctggctcttctataactgattctattatcttttcagcctgctctcctataacctttaaatcactattatgtctatatatatgcttctcaagtacatcttttattatagttcttgaattaatagcagtttcttctaccttataaatgtgattttctatatatttattattatactcagtctttttttcattttttacatcagcacattcactatcgctaacatcctgaccttcattataaacatcatcataatcgtcttctgaggatataactatatgattataattttctttatttattacttcctcagggtaatcctttatataaagagactttattcccaggcgtattgctctgtttataagctccggcttcaactcaacatctgcatgtataagtaccgtgccaccatctgtcactataggaagggctaatatctcattccccttaagactttttaccttaacctttttcatacatactccatttccgcttgcgagctacttcccatttaaacaacttaataaactccacactcaatattcccctgcttatatatttataaagataacacaaatctttctatatatcaaataccgtgtcattatttaataatggcacggtattttttctgttattttattatcctgctgcaaggattgcgtgaattaaaaagtaacgaaacaaacctgatatctcagccattgccaaattctacttttaacaatcacattttatcatgcattttcaataataatattatacttacttgctaagctctgtcttaccacccatatatggctgaagtaccttaggaatctttacacttccatctgcctgaagattgttctctaaaaatgctattaacattcttggaggtgccacacatgtgttgttaagtgtatgtgcaaagtacttattcttatcctttccctgcactcttatctttaatcttcttgcctgtgcatctcctaagttagaacatgaaccaacctcaaagtacttcttctgtcttggtgaccatgcttctacatctatagatcttaccttaagatcagctaaatcccctgaacaacattcaagtgttcttacaggaatatcaagtgaacggaaaagatccactgtattcttccagagtttatcaaaccacattctgctgtcttctggcttacatacaactatcatttcctgcttttcaaactggtggattctatatacgcctctttcttctataccatgtgcacctttttcttttctgaaacatggtgaataacttgtaagagtctttggaagttcttcctctggtgttattgtatcaataaatttaccaatcatagaatgttcacttgtaccgataagataaagatcttctccctcaatcttatacatcattgcatccatctcatcaaaactcataacacctgtaaccacattacttcttatcatataaggaggtatgcaatatgtgaaacctctatctatcatgaaatctcttgcataagatataactgctgaatgaagtcttgctatatctcccataagataatagaaaccattacctgcaaccttaccagctgcatctagatcaataccatcaaacttctgcataatctctgtatgatatggaatctcataatctggaacaactggttcaccaaacttttcgacttctacattctcactatcatcttttcctataggaacacatggatctatgatattaggaatagtcatcataatcttagtaactttttcattcagttctgcttctttagcttcaagctctgctaatctgtcagcacttgctgaaacctgagacttaacatcctcagcttcttctttcttaccctgagccataagtgcaccaatctgcttagaaagcttattcttattagctcttaattcatcggcttctgtctgtgcagctcttgcctgtgcatcaagctcgataacttcatcaactaaaggtaactttctatcctgaaatttattcttaatattctgctttacgatgtctggattttctctgacaaactttaaatctaacatactttcctccattatttcgtattcataattatactttactaattatgcacctttttatacataatttccagtactttattgcatactttttaatatactttttattctcacgttttatttatttttatagttatttttgtattttcattgtattctttttattttttattacttacgttttgtgttttgctttatatcattatcaaagtttttttatttctgattaacattattcactatatcatttacttcctggctcaattcttcatcacccattcttccagctactgcctgcttaagtgccttttcttcttctccaccaagttctataaatgattctccgttaattatctcctttacatatgcaaaacatccattattactgtgcattacattaaccagataaccattgttgttattatcgagcatgcacaacgcaaaacttagttttccacccatctcatgaaatgcatcatatttgacaattccaattttctggaatgtatactgcagcttttcatatatatccttaatagcagctgtgttatcttcataagtacttttaagcagcttaacatcatctgtatattcttttattatctgctctatgctctttccatcagagccctccatcattttattatatttctttttcattgatgaagactttgctatagcaactattgatagaacaatagctatcacaagcaatgcaattattcctattaatacatatagcgtttcaacgctaaataagccaaatacatctaacattttttctccttcctgttttttattgttttatttatctgtttatttataatgcattttgtctataatgagtaagtgtgcaaatacatatatcataaatatactttttattcacctttttcgctttttattcatttattttctttaataaatcatatattctttcaagttctgcctgcgaataataatctatttctattttacctttattattgctcttgttttttataataacttgtgttcccattatattttttaatttctgttcaagatctctatatacaaaatcatttgctggaagttttttttcttttttttcgggtgcatcaagtgttttcattaatttttccacttcacgcacacttaacttttcatcaaatattttctgagctatcatatactgtttatctttatcttcaatagatataatagttcttgcatgaccactactgattttcccttccataaccatatcctggacacgttcatctaattttaaaagtcgtaaggaattagttatagctgctcttgatttagatactttttctgcaacctcatcctgttttaatctgtagtctttgataagtctctgataagccttagcttcttctataggattaagatcttctctttgaatattttcaataagagctatttccataacctcctgtgaagaataatcctttattacaacaggcacttctttaacacctgcaagttttgctgctctccatcttctctcaccagctattatttcataataattatcttttttctgaacaagcagtggttgtaaaactccatactgtttaatagattctgataattctatcaaagcatcttcatcaaaagcctttcttggctggtctttgttaggctcaataagtgataattttactttagtttcagatggaactttaacctctttaactacttcctttaccacttctttaactaccacattatcttctttcttttcattttcatcatcaacattaataagatttgatattcctctacccaatccacctttactctttgtttttgaacctgtttttgctggcatattcattctcctatcttaatacattttaaatattttacatttttattcttgtcttatattttcttatctctgtccataacttcctgtgctagcaatctataactttctgcaccagttgattttgtatcatacagattgattggctttccataacttggagcttctgctaatcttatatttctaggaattatagtcttatatacattttgtttgagattatccttaacattttcaacaacctgaagtgaaagatttgttcttgcatcaaacattgtaaaaacaacaccttccatctctagtttcttgttcagtttcttttttgcaagattaattgtgtacataagctgtgataatccttccaatgcataatattcgcattggattggaacaagtacagtatcggctgctgtcattgcattaacagtaagcatacttaaagaaggagggcaatccataattatatagtcgtatttttttcttaccttcgagatttcgtctttcaacacgtactctcttctgtctacgtctattaaatctatctctgcaccagctaaattcacatttgatggcagctcatctaaattatcatatacattatgtattattgcatcttctatgctgcattctcttaaaataacatcatatactgttttatcaacattattcttatcaataccaaccccgcttgtagcatttccctgtggatcaatatcaattaaaagtactttttgaccagcttcggctagacacgccgacaaatttatagctgttgttgttttacctactccacctttttgattagctattgctataattctccccatttttaacctctttccattaaatagttaaaagttttttctctattttaatacagacttaatatagagaattttaataaccacaatgtgatatatacgcttaacaacgtttcacgtgaaacattgtattataaaaatattaaagatgtcgtgattgaaagcccacgactttaatacattaggattatttcatattacgtactcacacgtctgcgctatgcttcggtacatgctaaacatgtaccactggcaaattgcaccatacacaatattcgcataatgtgagattatcatccctcctctatattcatattggggctggtcttaagttttcatatctacctgtaaataaactcatgtaggtttatgccttttaaccatgatataataatatgatgtcggggtcaaaaatccccaactttgatacctacgaattgttccgtgctacgtacttccacaatcccccaatattcacatatcgtgagattatcatccaactttcatgttcatatcgtaggtgggtcccaaggtctaaacctacctataagcgagctcatgtgggtttggaccttttaactctggtattataatatattatttgtaaaattttcagatattagaggattgaataaattgcgtagcaatgcatcaatccaagttcgtataattaaatattataacattcaaatcagaaaaacatatctcaaaattgtatataacttattagataaaaccatcactatctatctgtttcacgtgaaacattacattatattttataatacaaataccaatttttcaaaaattatttctgcttatataataaagcttttttattaaaattgcacacaactcaatactataagtagaattaaaatcataaatgtgactttttattaaaaatcagactatataaaaatagaaaatgtgtaaagatacatcagttaatatttatcaataatatttgttgaaccattttttgcattatgtataataactgtattaaggttatttcattaatatatgtttaaatcatttaaatgtaatctatctatttatccactataatagtctaatactaaactatatttttttcaatatttattgagcgtttttcatatattttattaatttcagtccgcaatatgcagccattgcagactattttattgaatattataatgtaagtgtcaaaagtataaatttcgtttgtgttcgcacaaataagcgatttacacttatttacacgtcgaacactgaaaacagaataaaacggtgtaaatacgccattttatgtaagtttgaagcgttcgagaattgcatgaatcgcatagcaatgaagcaatctggttacatcagtaagtggcaaaattcacttttgatactcacatcatattataatcactatttttataattgatattttcactatcatcaatataattattacacttaaattatattgaacacaaaagaaaagaaaacggctgcaaagcagacattgatttttcttgtgccattaacgaatgaattgtcatgcaacgcatgacataatagctcgaatatgcagatacatgagtaaagaacgaatgaagcataacatattatataatagtaaattatctaataacaaaagtgcaataaatcataattttatagtttcatggtgtgatagcttatattgccattagtttaaggtatgtgatatacagtaaagcattattaaatcaaagtgaaataaaataataaaacatttataattgaactatttcatttcactttcattctggctttaccttgaaaacaaaaagtcgtaaagcatgccatttatgaaagtttaagatattagagaattgcgtaaattatgcaacaatgacaatatataaatccaatcgcatcagttagtaacaattcttagctatgatattaattatgtttcacgtgaaacataattaattataatattttatataatttataaatatatataaattttaaaatcttactgaatacatgtattcaaaatatagtgatacatattaaattcgtataatttataaacaatcaacttatcacataaatattagtgtattttcaaagattattaaactaagtacaactgtatatattgacaccaaataatattcttaaatttttttactaaagcattttaaaattttaattcctataatatgtttcacgtgaaacaaaaagactgatataataaatataaaatttatcatatcagtctaaaaacattttttattaaatcaaatcattattcagcaaacattttcaatttaattctatttattatttattaaacgttttcaatttatttcaacttaattatatcattttttatagcaaacaccgcagcctgtgttctatctgaaacatcaattttcttaaatatgttagagatatgattcttaactgtacgttcacttatatttaaaaccgaagctatttctttgtttgacgaacctgcagctatcatccttaacacttctatttcccttcttgtaagctcattggttctgtctttcataacatctctttctgcaagtctaacatttagtaaaggaacaaggcttggttctatatatgtttcacccttatatactgtcattatagctttttttaaagtatcaaaatctgaatcctttaatatatatccatcgcagcccttatccagagcttttattaaataatctatttcattatgaattgtaagtattattaccttacacttcatcttctggctttttataatatcaagtacttgaagtccatcaagattaggcatatttatatcaagaagaataatatcaggctgtgttttattggcataattaaggcattcatatccatcatcagcctcactaacaacatttatattatcatccatttccaacaattgtttcagtccttctctgaccattctatgatcatctgctaacaatatattaacaggcatattataaccgtcccttctaatgattaataaaagttttccgcacattccaacattacgcttatatgagcagtataatgttgtccacagttttaactcctatcatcataatctattttaataatgtacaaaataacaagttatacacagatacaacgttcttaatttcaagtctatatcaatatattgggattttaattttaaactctgctctgtctctgtcatattcaatgcttcctttaagaagtactattctttcatttaacattcttattccgtatccactattattatttttaaccttgcctattgaattataatcaaaaccacagccatcatcacgataatctatatatatatattgctcatccgtggatatatctatgtatatattagaacaatcagcatacttatatgaattactagatagttcatttataattctaagactcgatatgcttgcgatctgtgatatatcatcactacaatcaatagttgtatggatcattatattcttatagctatcgtctaatttatctataagattaagaagtgcttcattaaagcctagatcatcaagttccattggtcttaactgatatataatattcctaagatctttaacgctatcctttattaataactttgcattatttatttctattttagcacgatttacatctttatctactatctgattgataaattcttccttatgtataagtgcagtaagattctgaactactgtatcatgaatatctcttgatatacgctgtctgtcttcttctaatatccacaatatctctgcatcagattcatttaattcactttctgatttattattatacacattttcactatcttcatccaacgaattgttaataacttctctcatttcatttattttgttaataacttcatcaagatcagatatttttttcttttttaaattttcaagcgactcttttttattacaaaggtttttatattctttttctatgtatttatcacaattagttgatgtgaataaatcctgtgttttatcgcctgaatttaatacttcattcatcttattgcatatggatttaagtttcaactctattgaattgatttcatatttatattcatcaacatttttttcaagtttttttatctgattaattatataattaacagctttatcagactgaatatctttcataatatttacttcctttttattccatatacaacgtattcatacttaataaaattttaacccatttgttaataaaaataaagcattttttatcatgttttgactacacatatattaacctcgcatattttgtctgataaaacctaatctataaaatacagttgtagctaataatgcaattatttctatatactaaacttatataatgatgtgagtggcataagtaaattttacaactaacttaatagctctcttaatattacattttataaagatactctgaataatagcttttataaagattgccactttttatcttatagactataatattatgatataatgagcgcaagagagtcagaaagctgcttgcagatttctggcgaac

SEQ ID NO: 335 - DNA, 320 bp, Unknown
  gut microbiota DNA sequence
cggatttaaagatacaattttttttagaaactcaatctcctgatctttatatgccagttgcatttctaaatattttatccgattttcagccgacagatatccgttgcagccctgtgcataggtgttaagatctcgaaaaccatttcccttttttacttcatttccaatcatggttttcagaccatttattctggaatcccccaggatatttggatctatcccaagagtcgaaacaatctcacgtggaagcctgccctttgacagttcctcccaaaacagttttttaaattctgccgagaaatgtacaatgctcggtgata

SEQ ID NO: 336 - DNA, 410 bp, Unknown
  gut microbiota DNA sequence
ccaagagtcgaaacaatctcacgtggaagcctgccctttgacagttcctcccaaaacagttttttaaattctgccgagaaatgtacaatgctcggtgatacatccagcacatatttgctatttcttagtgtgagcatttcctgttctgtaaactttttgtttgccataatttcctccaattcatttttattttaatatcaatctgaatcggagtcaaaaatcgattttgtccaaaataaagggaatcatcagaaccatgtccgaagttaagggttccctgtaaactcattgtatagatttaagggttttcgttaaaacttactgtctaatggtaagggttttaaaaactcaaactgtctaatctatagggtacattttaaaatgaagtaaattatcataaaaatataaaa
